United States Patent Application Publication US 2013/0096032 A1 - sequence listing, part 19

SEQ ID NO: 602 - DNA, 109936 bp, Arabidopsis thaliana
aagtcttagcttggttaagttgtaaggtatgctcttgtcagaagattatttattacagtcttctctacaatccagttgaaattttcatgatatattcgccatttgaaagtgatacatgggtctgaatcactatgttttgtgcatcacatatgtttcagggatgaggcatgtctaatgcttatatatctttttgggtattgcctaacgaaaattatttatttgcagagaagctgatttaatgctgcctgcactctaattgttttttgtttggcattctataattcttgtctttctgcatggatttgaagaaaagagaatgcaagtaagctcgtatctgttttatttagatccttaacgtgcctgcacttttatgaacgcagatctactgtttaaagaattctctaccggaattggacaaaaactatgcagctcaagatgagaaacaaacatgtaagtcctagaacagagatcattttacttgcttgaagttgacccttaaagaggtgatatgacatgtcttttcactgatatcacctttaatctgtacagtggtagattccgtctcaattgtaggagagtacctgaagaccgagccttggttgaagcttctatatgatcatcttgggtactttttcaaaattaaaatatgaaatcttcaaccaatcagctaaagcgaatcatatagctcctgacagaagcattcattttgtctggtttattttacagactcaaatttgttgacccgacgatgaaagaaaccaatatggagaatcttccaactgcaaatgagaataacatggcatcatcaaattcaatacaggtgtgtgtatgcaaaaactgtaggcaagagttctaagttccatatatttgtgttccttgttcttggttactaactgtccttgtttacatttgttaggagaaagcgaataagaagccaggaaaacagacaaagcaagcaaaggtagagactggatcaaagaacataagggatatgttttcaagggcttgtaagaaaaaatgctgaatgttcaaaatcggttaaaactagccaactatttatgattattctattatgctatcggatgatcttcgcttagctataacatcttgaacaaagacccaactcccaaatgtgtttattctatatttctagcaaatgtcgtgagaatacatgagaatcattgtaatttgtaaactaaagattgtaacaattattacaattacaagaaaattcaggctcaatatgaatttagaaccgcatgatcatccatttatgaggttcagttccgggaactgctgccgttaaggttctggaaaagctcgggaagatgggcattggtgagtttggttctcttgctgatctcttgtttcttcttcttcttatcctttggtttattcgatatgccatgcgtctgtgcagcagctctcctctctgcagtgtttgtcgccggcttcaaaccgattttcagcagctccttctccacgtccagcatgtcgttcgggatgtttatgtcacggaatagagctttaaattcgtcatcaaccttaatctcacacttgaaatcatttgggtatgcaatgtcctcttgtgaatttgatagcaagtagatgtcccctgaagcactcagagcctgcaaaatacaagacagtcttgaaactttcaataccttcctggtttggtttcaaagagtaacatatattttccccatctgcttagcaaaatacagcagttcctacaacttttgacgccgcagaaaacacaatataagacaggatcccggtatggttttcagtcatactccacctagaaataagctgtctaattgattgtccaaccaaaaaccaatgcttagagaactttcatttctcatgccaccattcatatcagaattgctaccaagaatctacgggatacatttctgtcatctttgtgtcttgccaattataacaatgcataccttcaaatcctccattacattagggtaagcgtctttgagatcaaccaccgcaatcccatcaaggtattttctcaccaatgaaagaagctggttcttatcattaacatcgtgcgtagcctgtgacggcaaagcaaaattgtaaccacatgaaccttttttcaaagagaaaatgaggaacaaatccaccttgaatgaaacgtttaggttaccttataagagaaccttcttccatcataatgtgctttcggattcttccttaaactatcaaaaacagccttattagcatgcatatctacatgacaccattcatttatttgctctggcgtcaaggctagccttctctgtaagaaataagagacaaatcagcttcattatataaacaatgatttatatggctctcatataaacaaacacaaacctcatagagaagatcaatgacacgcttgatttgagctccaacaggagcttttctaatgttgttaatgttctgaagtcgctcggtatcgcttgaaaacttgacaggagctgcatcaggcttcttctgcgtgattgccgcaggcaaaggcacattctgcctcgaagaactcgttctttctctggaagaagcaatgctcgaaagagtagattggcatttcacttgctgtttgttgaatttatctagctgttcctttagagccatctgaagaataaacgtaactctaaccatcaatatctactgttttcaaaagatgatcatgaccaccaaataacttagacaacgccgattcctcaaaattagggtttatagactgtgcaatttttccaataactagattctgcaaccttaaacaccacaataaaatttcatttctcgaatcaacaaaaagtagagttcgagcttgatttaatagaaacagcctatatctggagaatcctcataattacggtgagcgatttcaatatctgtgatcccgcaagctaaacaccacaattactttccatttctcgaattatagaacgaaagcgattatgaatcgaatcgaatcgatacgaaccttccttggagaaagaatacaacgcgattagaacgaaccacacgaaacctgacgagaggaagaagatcgaagaagaagatcgaagaagaagcttgatttgattttttgctttatcgacgatagaggaaatagaagtttctctgtcgattgaagggagacgaaattgagaacggtgttaggcccatcaatattcggcccaataaccccaaatttggaatttgttctatttaccttcaatagtttatacattatatgcattagtaccaaaaccaaaaactccgtttcttcttccggggctctggctcgctccctctcgagctctccggttagcattggcgattttcctcttccgatcgattctctagatatcttaggtagttggttaacctctccgttatcgtagaaacttgacctagagttatcggcattctaattgttgctttgagttctgagatactcgctctgaacgtagaaaaccctaatttcgtgctccgtttgtcaatcaatctccattgcctctgttatctttcaatcaatcaatcatcattgtattttgcagagtttgtatccaacacaaattcgactggttatattgtaaagtgtctggttatattccatggacaaatcaatcacggtggtgcggaaaaccgttgtgctcgagccgtttgtcaagtacttttctctataccatttctatccaaaaatcacagacatccaatatatatgttctaacttcgcgtttttatcaattatttctgcatctcctaagttgatttgcattaattttcaggctggtgaggcttttagtaaggattttctatgacaattatactccggaaagcgataatcagcagaaatctgtgaaaaatgttaaaggtagtgctgttatcgtgctggacgcgcttacgaggtttgtatgcatctcttcagtggattagactattttttgaggttattaggtttgttgaataaatggctatgttttcactaactttcatttcttgtatttattctgttctatgtctgctaggcggcaatgggttagagaagaagacttggcaaaagaggtgaagcggaatgccaaggagcttcgaaaattaataagacattttgaagaacaaaaatttgtcatgcgttaccacaggaaagaggtctgtgcagaaactatcttctttcagattgatatatatcacaatattgtttttttgctaagcctataactcaacaaacttgtggttgtatatttctgtttgattgttttcttgtctataagccggtaacacttctttccttactctggtgtttgatttattctcaatcttgtcaatagactgcaaagcgtgcgaagatgtatagttatgcagtgggtggtacaactgatggccgagcagaggacaatgttaagttccacacgcactcgtattgctgtcttgattatgcacaggtatgcttcatgtcccctaatatttatttttttctttcagtttgctgttatgctttttgttttttctttctggtttcttttttgtttaatcaaactaccctttatcacttcttctctcttacagatatatgatattgttcgttataaactgcaccggctcaagaaaaagttcaaagatgaactagaagacagaaatactgttcaggagtatggctgtcctaactgcaaaagaaagtaaagtccactattctttatgtttttaaatctttacatggtgagttgtattattttcactaaacctgtatagattctcatttctggtatagatataatgcactggatgccctgagattaatttctatggaagacgattcttttcattgtgaaaattgcaatggtgaacttgttatggaatgtaacaagctaatttccgaagaagtagtagatagaggtgacaatgcaaggagacggcagcgggagaaagtaaaagtttggcttcaggatttggaggtctgtgtttactgttttagcggctatttcaatgaaagtatgagaaaaacacaaattgatttgccttcactgaagcttgtgcatcgttccaaattcatgatgaaatcagaacgatatatgattaagtttcctaggagattcattcttaaatatccaatgcttgagatttgcaaaacaaaacaagactgtggctgtagtgtgtgcgttgacacaattggaaataaaatgtagggtgaactgaaacccctgatggaactaataaatagagtaaaagacctaccgttccctgcctttgaaccttttccggcatgggaagctcgtgcagctaaggctgctcgtgaaaatggtgattttaaccctgatgatccttcaaggtctttgggcggatatggttcaacaccaatgccatttctgggagagacaaaggtgatctttcgttacagttctcaatgtatataatattacaatgttattatggaagataagttttccatgcatttttcccttagttgatttctttgatctttacatggttaggttgaggttaaccttggtgaaggaaatgaagatgtcacatctacaggtggagattctagcctgaaaatgttgcctccatggatgatcaagcaaggcatgaagctgaccgaggaacaaagaggagagatgagacaggaagcaaatgttgatggagaagcagcaaaactttcagatgacaagaaatcagtcatggaaaatggcgatgataataaagatttgaaggcatggttttggaggaaaattatttgagtttagttagattcccacaacagcatcttgtggattgtgtttccagaatcttgatacattttatatccattttgcttcaggatgagtatctcaaagcttactacgccgctataatggagcagcaaaagcttgctgcaaagctgaatgagcaagaatccgcaggcgaatcaacaaccactgacattgaatcggctactacatactcagatcgtcaagttggtatgaagtccaaacgcgaagaggaagaagaagatgttgaatgggaagaaggagcttctgttgcaggtcagttttagtttattactacttcatttccagtttgttaacaagttgatcatatgaaacaagacattagttagttagagggaaacttgtttaggttttttctaagtagaaaaccggaatagatacttgttaagacagctggtagttaaactataatagtgggccagtttaggtctcatgataatgtgatgctcatcttggttactttccatgtgacttaatttgcagcaaatggaaactacaaggtggatttgaatgtggaagcagaagaggcagaagaaaaagaagatggagacgaagatgacgacatcgactgggaagaaggctgattgtcatgtgcactaatagtcacttaggaaccttattgagaatcttattatctacaccaattttttgaaagtgttacattgaaaattttacttgacagaagattgaaacaaagatagtaccatttctaagtgttagacagtttgttacaacttacaagggagtagggacaattgaggcgagtaggcaaatatgattctgtaaaattaccaaatacatgatttgaaggcccaatagagaagatttttgggtcttataaaagcccattagagagatgtaacctttttaattaagcgggagaaacctggtttttattcctccttctccatcggccattgatctgagtattttcagattcttcctctcaagtgaaagcaacgatcctgtctcttctcttttagagtttatcgatagctttgtttcctaattgaatttctggttagattcatttatcctttttgccattattttgaattttttctcttttcaacaatttgagatagtaaaacgggttaagtagaagacagacgaatcgttgctagtaattagcttaattggctacgattgtagttatgattcaattagaagtgttctaatttgttttaaaaaaaaaatcgaaacccaacttcgattttttgacagtcatggagttagagagattcagggtaggtcttactccaactgtattctacattcccggtttcataactgacgaagagcaaactcagctcctaaatcatgtaaaactctcctctccaattgtttaagcatttgacatcttgagattatatgtactacccttttgctgtcttgtaagatatatggagcatctggttccaagtggaagacattaaagaacagaagattacagaactggggtacacttgcttttacttttgttttcattagattgtttttttggttgttgaagagacataataaagtcttgagcttttggtttgtttcttcaggtggtatggtccatgaaaagggtcttgttccacaagagtgtaagtaagaatgaaaaaaagtccaatccaatcattcttgattatcaaaggttctagatactagtgtatgtatatatgtatcttttctctttgtttcagtgcctccctggctgacaaagataacagcggaaattcatgaaagctcgggtctgttcccttctgctataaatcatgtcctcatcaatgaataccatcctgaccaagggattatggtccgttatccgtcctctgattattttgttggttatgtttttgctgtaaacgcagcttcttactccagtggttttagtttctgtgtaaagttcatgagcaagttttagttactttccatggttgttgtttccacagccgcatcaagatggacccgcttactttcctgttgtagctatcttgtctcttggctcacctgttgttatggacttcactccgcatttgagattaagatcaggcgatggttacatttccaaagaccaaagtccctgtgcagagagttgtgcccctgagagagactcattctctgtcttgttgatgcctcaaagcttactcatcttcaaagatgacgcatattcaggtaaattgctcatctccttaattgaactacatagagtgaaagaagagtaatcaggaacattttaaaaacatccagttgaaattcatattatcctgtcttgttttcagatttcctccacggcattagcgatagtccaacacaatgttacaaccaggtacatacaacaatataaagctctttatcatattcgcatatatgtaaaatggtagtgaaattagtgtaaaaggacagtgattttactgtggttcatgttcttcaggtcgttaatgaagctgaagctttggcttactctaacgaagaagattcaagaaaagatggtgacaagatttttcacagagaccaaactcgagtttcacttacttgccgtctagttcccaaagtccgtaaaaatctcttcagattctagcttgcttccctaataacactggttttatcttgtcgtttatgactgtaaaaaacgttacgatttgtgacgtgtggaatataaaacgccacgatttgtagttgccgaaacatgaggacaaaaaacttgcaacggataggattaaatatgagcccttcattttattttattttttcttatttttcttctaaagagataacatcactatacaatctcactctatccccaaatcttctccttctccaaaaaaatttcaaaccctagcttctcgatttctctcctctgctctccaattccatcttcccatggcgatttcggctccagccgcttgttcttcctcctctagaattctctgttcctactcctctccttctccttctctctgtcccgccatttccacctctggtaaactcaaaaccctaactctctcttcctccttcctcccttcttactcattaaccaccacctccgcttctcaatccactcgtcgctccttcaccgtccgcgccgctcgtggaaagttcgagaggaagaagcctcatgtcaacatcggaaccatcggtcatgttgaccatgggaaaactactttaaccgcagctctaaccatggctctcgcttccattggttccagcgtcgctaaaaagtacgacgagattgacgctgcgccggaggagagagctcgtggtatcacaatcaacactgctactgttgagtacgagactgagaatcgtcactacgctcacgttgattgtcctggtcacgctgattacgttaagaatatgattaccggagctgcacagatggacggagctatcctcgttgtttccggcgccgatggtcctatgcctcagactaaagagcatatccttttggctaagcaggttggtgttcctgatatggttgtgtttcttaacaaagaggatcaagtagatgatgcagagttgctagagctcgttgagcttgaggttcgtgagcttctctcgtcttatgaatttaacggtgatgatattccgattatctctggttctgctcttttagccgttgagactcttactgagaatcctaaggttaagagaggtgataacaaatgggtagataagatttatgaacttatggatgctgttgatgattacatccctatccctcagagacaaactgaattgccattcttgttagctgttgaggatgtgttctctatcactggacgtggtacggtggctacagggcgtgtcgagagaggtacggttaaggtaggagagactgtagatttagtgggtttgagggagactaggagttacactgtcactggggttgaaatgtttcagaagattcttgatgaggctttagctggtgacaatgtagggttgttgcttaggggtattcaaaaggctgatattcagagaggtatggttttagctaagccgggatcgattactccacataccaagtttgaagcaattatctatgtgttgaagaaagaggaaggtggaaggcattctccattctttgcagggtacaggcctcagttctacatgaggacgactgatgttacgggtaaagtgacgaagatcatgaacgacaaagatgaagagtcgaagatggttatgcccggtgatcgagtgaagattgttgttgagcttattgtgccggtggcttgtgaacaagggatgaggtttgctatcagagaaggaggaaagactgttggtgctggagttattgggacgatcctcgaatgattataaggttttagagagtttcatatagtgagcatctctacttgctttctttttgtttcactcttgattctcaaactctttgagtttttacctttttttatttatttttgtgccattttccataagaacttgaaatcaaaatgtcatatatttcttgattttctgatccttgttattcatctttgtctcgctccatatgattctgatgtggatttggtactcaacgaccaatcacttaatttgaaaccactgtgggcagattacatcaacaattcaaggagattgcagaatataacataaagaacttaaagaggaaagttgaaatgtgaagagataatgaagaagaggaaagagagagcttatggaatgcgaccaccacctctgccactgaaagatgggcctgcatcgatctcaccatttgtttgataactcctcattcttctccctaacaaataacaatcattattattgttagttttcatggaagacaataatttactaagtcatacgacttgacatatgtgtagtgtagagtgtaaaatatatatactatgagagtctatggaacactaaccagctcttgggagtgattcttgtttagaagcaagaacaagactgttgcaacgaagaagaagcagaagcaccataaagaacacaaaacccaactgtgaaaaaacctgctttaccattttgctcaatatctatgattctatattggtttttcgtattttttaaagtgttgtgtatatatagagagatagtagacgctgattagagatatggtttattttaataggatttgtttaatgaaagattcgcaatacagagtgacatgataagtaatgagatggacacaaggaatctcacgtgtcctcatcttccaacttgttcttccaatggtgagctcttatcttctataaatctataaaaatatatataatctctttcttaattttgatcttcgaggcttttgatgtagacccgtgaggatagagaaaaaatagttctaagacagagccaaaaggacaccccttttaagtcagtggcacaagattttaagattatttgcaaggttgaccatatacttcattaaacttgagagatcaagtttgtgacatcagtagagtttatacaagaatatgaagaagctgctttcttttcatgcaagaaatattaagtttcatgtcttagatcccgagctgcaaaaaaagagttaaagatgtttgaaattaatgcaatgaagtatccacgagaatctttatagtctcatgcaaatgatgtgaactcaaatctatgttcaaactcactcttgttgttggcggtagtacagagcgaacactctcaacgggtgtgagtatgattcttctgattgacattgcagtaactaacctggttagtgagatcttctgtttcctcttgagacaccatctctatctgcaaaaacatgacacagccaatctttgtgattgaaccaggcttaaaagcatgctcttaaagatattttttgtgatattttgtaccgtcatcattatcagtgagaacttgacctttgggattcaagaaccttcaaagctgcaaaacccaaaaaagaaagaagttgggccactggaagcaaagcccaagcccaatgcgcagcctttgaaagatcctcagcaacggtcatgtccacctgtcaataaagccaaaactgcagtcatcacacagctaagagaacgtacagattcaacgatacctttgaagaaccaatttgagtgtcttggatccggtgatgattgccaagactgacacctgtcattattagggtttaggctacatcaccttgtattcaatataaaaggactttatgatgtaatgtgaaacctaagtcgaaatataagaaagataagttctctatatttcagattacgttcatggtatcagagccatggcaaatcagtccatggagctctattcctatcctgttctaaacatctcaaactgtgttactgttaagcttactgagagaaattacctgctctggaaaactcagtttgagtccttcttgtctggtcagaaccttctcggcttcgtcaatggcgctaccaagagtccagatcctgtctcagctgtcacgaacattgatggtgttgttacagagatcccaaatgctgactacagtgctaggcacagatctgaccaagtggtgaagtcatggatcttaggctctctctctgaagacattctggaagaggtcatcactgaatccactgctcaacaagtctgggaaggtctagccaggtatttcaatcgtgtctctactgctcgcctatttgaactgcaaagaaaacagcagactatgtgtaagcatgatacacctatgatagattacattaagggaataaagaacatttgtgaacaacttgcctctgctggtagtcctgttaaggaacaaatgaaattttttgctgctcttaatggtcttggtcgtgagtatgaacctattaagacatccatagagggtagtatggaatctacacctgctcctactctagatagtatcactcctaggcttacaggctttgctgaccgtctcaagagctatgaagtggtgtctgtcactccccatctagtcttcactgcagatgctcctgatgctggcaactactatcagaccaactacagtggcagagggaatttttctggcaagggaaacagaggcagaggagcatacaacaccaagggacgtggctttcatcagcagaccacaactggctcttccatgtcaggagaaaacagacctgtctgtcagatctgtggaaagctaggccatcctgctctcaaatgttggcacaggttcaacaatagctaccagcatgaagaactgcctagtgccttgacagctatgcacatcacagaagttacagaacacaatggacaagagtggttccctgatacaggagcttcagctcatgtgaccaacagtcatcagcatctgcaacaatcaagaccatacaatggttcagacgctgtgattgtaggaaatggtgaattccttccaatcacccatactggctccacaaacctgtcatcaacctcaggtaaacttccacttaaagatgttttagtctgtcctgacattgcaaaaccattactgtctgtgtccaaacttactagagattacccatgctcctttgaatttgattgtgacggtgtccgtgtacatgataagggaacaaagaggttgctaattctgggaacaagtaaagatggtctttatgtgctgaagaacactcctatccaagccttctattccacaagacaacaagcgacatcagatgaagtatggcatatgaggcttggccatcctaaccctcagattcttcagtacctgtcaaagatcaatgctatcaagatcaataagagctccaagtctatgtgtgaagcgtgtcaacttggaaaaagctcaagattaccattttccctttctacttctgtaaccactaaacctttgcaaaggatccattatgatttgtggggtcctgcacctatagtgtcaggtcagggctttaaatactatgctatcttcattgacaactactcccgtttttgctggttctatccattgaagttaaaatctgatttcttcactgtgttcatcaactttcaagctctagttgagaatcagttttctacaaaaatacaaagctttcagtgtgatggaggaggagagtttaccagtaatcagtttgtcaatcacctacaagcgtcaggaatcaaacaactcatctcttgtccccacacacctcagcaaaacggactagctgaaagaaaacacagacacatcatagagttaggcttatccatgatgtttcaaagcagaatacctcaaaagtattgggttaaagctttcttcacggcaaattttctgagcaatctgcttccctcatctgtcttggatgctcagaaaagtccctatgaagtgttacttggcaatgcacctgattacacttctcttcgcacgtttggttgtgcttgttttccaaccctgcgagactacacacaaaacaagtttgatcctagatctttacagtgtgtgttccttggatacaatgaaaaatataaaggctacagatgcttacttccatcaacaggcagagtctacatcagcagacatgttttgttcgatgaacaagtgtttccctttgcaacactcaacaaagaagtcacttccaacctacaaactccactgatgcaggcttggcagaaaagttttcaagtgttgcctactacctcacctcaaccagcttctccactattttcagaaactgacttcccaccattacctatcagaatacctgaacagtctactgtgaggagtgaagggagatctgggtgtaccacaggcctagatcctgcttctataggcaacagtctctctctcattcctcagaggatggatagttcagaaagtacctcaacatcgtcagaaatcccagaattagcaatcgtcactcagccaactgaagaatcaacagagaatcctgcagcttcaacaacgacttctactcagactgaatcagacactcctgcaacagctcaacatccaatggtaaccaggtcaaagtcaggaataacaaagccaaatccgaggtatgcactactaactcacaaagtgtcttacccggagccaaaaactgttacttctgcacttaaagatcctggctggaatggagcaatgacagaagaaataggcaactgtggtgaagcagaaacctggtcattgactcctagaactccagaaatgcatgttcttggctgcaaatgggtgttcaggactaagttaaacgctgatgtctccttgaataaactgagagccagattggttgctaagggattcaatcaagaagaaggaatcgactatctgaaaacatatagcccagtggttagatctgcaacagtaagaggagtgttacatgtggcaacaataatggaatgggaaataaagcaaatggatgttaaaaatgctttcatgcatggtgatttgacagaaactgtctacatgactcaaccagcaggcttcgtggatccagacaaaccaaatcatgtctgtcatctacacaagtcaatctatggtcttaagcagtctcccagagcctggtttgataagttcagcacattcttactagagttcgggttcacttgcagttatcctgatccatcactattcatctacatcaagaacaaagatgtcattcttctattactctatgtggatgatatggtgataacaggtaacaattcaaaggccttatcgaatctattggcagagttaaataagcagtttcgaatgaaggatttgggtgagctacattacttcttgggaattcaggttcagaatcattcagaagggctattcctatcacagcaaaagtatgcagaagacttacttgttgtggctgccatgtctgactgcagtcctatgccaacacctctccctctgcaaattcataaagagtctgatactgatgacgccttccctgatccttcttacttcagaagtcttgcgggtaaactccaatacttgactctaacaaggccagacatacaatttgcagtgaattttgtttgcaggaagatgcatgctccttctcagttcgatttcagtctgttgagaaggatattgcggtatatcaaaggaacaattacaatgggaataacattcagaaaagacactgattgcacattgagagcttacagtgatagtgatttcggaggctgcaagtcaacagtcagatctacaggtggtttctgtaccttccttggcagtaatttaatctcctggtcatcgcagaagcaggactcagtctctaagagctcaactgaagccgagtacagagcaatgtcagaagcagcttcagaaataacctggttgtgctcattcctgaaggaacttggaattcctcttcatgagaccccaagtctgtactgcgacaacttatcagcagtctatctcacggcaaatccggcgtttcacaatcgaaccaaactcttcctgcgacattatcactatgttcgtgaaagagtagctcttggagcgctgattgtgaagcacatcccgtctcatcatcaaatagctgacatcttcaccaagtctcttcctcacggaccgttcagctcattaaggttcaaactcggtatcgattcaccaccgatcccaagtttgcgggggtatatcagtgagaacttgaccttctggattcaagaaccttcaaagctgcaaaacccaagaaagaaagaagttgggccactggaagcaaagcccaagcccaatgcgcagcctttgaaagatcctcagcaacggtcatgtccacctgtcaacaaagccaaaactgcagtcatcacacagctaagagaacgtacagattcaacgatacctttgaagaaccaatttgagtgtcttggatccggtgatgattgccaagactgacacctgtcattattagggtttaggctacatcaccttgtattcaatataaaaggactctatgatgtaatgtgaaacctaagtcgaaatataagaaagagaagttctctatatttcagattacgttcaatcatgtcgtccagttgtgcagactgcttctgaaattgataactttagcttgtttcctcggtgccatttgctgaatgtatgaaacaaaagagtaaaaaatagttttcaactgaagcaaaacagaactgaagcaagtaaataaacacacaattcaattacttaagagagaacacacaccaaaaatgaaacagtgaaacaaatatgaacagtgtaaaaagttactaattaagcaagaacacacacattcacttaataaactatgagactattcacactcaattacggaaataagaacctagcaaatttctcactccacactatcaggttcaagcacaagtaaagtcaaaggtgttttttttttttttttttttttgcagaatccttctataaaatctagtcccgagtctatagccgacaaatcagtttaccatcatgatgtgaaaatccaaaaaacaagggtagaaatcaaatcttttaccttttagaaacttgtctttttcttgaaaatgttcattatggttattgtcttctctttgagtgcaggaagaattctccaaaccttgtgcttatggttacctaaaccctaattacattctagtagaaagtgaaattgatcaatggagagagagaaaagagataagggtggaaaaaggtgtcctttcatcttattcctgagtagaaatgtttttagctgttaagggctcaaggcaatggcactatggaacttcgccgttacacttaggtcggagtactctcaaattttggtatatctgctatatgatccgactctaatccttaagagtattaaaattaattatctatatttaatttggaaaaataaatacctgataaaaattagtcgatttgctgaataaccgataaaaataaatcgatttgttgactacctgacatattatatttatccatattactacatttagttgatatctaaaattatactattagaaattcaagtctcctaaatgtttcttaagaccatcttcattgaagatgccctaaatataaaagaaaaaatagagatctatattttagagataaaaatagaaattggttagaatgaaatagaaataaaaatagagtataaagttaaaaataaaaatgagttgaaaatgctataaaatgcaattatcacttttaatatgtttcattttttattattactttttttttttttgtgaactcattatttattattatcttactttaatttttctcacatagtaagccaattttattccacgcatgtggtggacaaaggagtcaacttctcctagtgggccaaagagcgtgggtcgaacatcaagccattggctataagaaaagttatattactttctgttgtttttgtcggacttctttttctgttttattactatagttgcatgcgttttattaaagttctttcttttttcaggttaatattagggttgatttactcaataaccatattagatacaagattcacaatcaagaaaagaatataacactatatttataaaataaatcaaaattgtaggtaatcaccttcttcatttgtgtatttacgaagtgcactttgacaagcatcccacaaattttatatgaaatacaaatttcctaaaattcattttttattttgatccttttactagaaagccacgtacgtaacctaatctcgtacacacatttcttacttcttttagataaagacacactcacacacatttctttcttcccttcaatctatatatacatttttgcaaccattttgtgaaataaatcctcaagttggaacttatttacaaagaatgccattggcattaattatcatcaattaattaatattcttaattattagcatttccttatctaatatatctccatcaattctaattacttttaaaaaaaagaaattttaggactttattaatattatattttattaaagataaatattatagttatttaaagtttataaaatatttagaatatttaacgaaaaaacgttaagaatatatattatatatgaaatctataaaattaaataactatttcaaaagaacacttttaaattgatttgaattataaatcttttaataaaaatattattagaacaaaaagtaataatgtttaattttaccgaactggattagatggtgggacatgtttacaatattataatgtatggattttataacaattaaataaccatttgaaataaatttttaaattaatttaaattatagatcttttaaattaaagtattatttaaacaaaaataacagaaacaaaatgtttaatttcactgaacgtggttagatggtaggacgggttttgggtcgacagtaatacgagacggtatagcacgggtgaaatccattagatatgtttagtttcactgaacgggattagatggtaggacgggtttgagtcgatagtaatacgaaacggtataccacgtgtgaagtcctaaatataacaatcaaaatataattatattatcttaaatactaaacaaaacaattataaaataaaaatataattaaattttaaattatttagttataatctagattttaacttaatgaactgtacgttattgttcttatattttaaacagtaaaagttaaacatagtaattgtatactaaataatatacagatataagagttgtatattcagaaaatacaaaatattaaatcatatatttttaatcgactaaacaaattatatttttattcttaaaaaaacaaaatagtctcgcggtgtaccgcgggttaaaacctagttattacattaaaagtgtaaactactttacatcgatgtcagcatatgcatcattttttttagctcgtatctttaaattcttattacattgacatagatgcttaaatacttcattaagggaatattatacgattagattattagttaacgtaagtaggtacgcatctacgttcttcttcccccacagccattctccctctggcagttgaagtaagaggcagccacaggaagaccaagattgtagatctcagcaaactcacgagtgttgaactgttggcgccaccccggtgcataaaccgtttgtcttccgagttgccggaacaataccaacacaatacgatgaattcccgaggggggacgtggactctcgtagcacaccacctcattgcctgataaacaatcataaacacaaatattaattagcccttcctaatttgtccactaggtaagtgttttgtgtcgcttattttatatagattaaagatttgattgttgcaacatacatataaattaagaaggctatataaaaatagatatcttcttaagaatatatatgctccatgctaacactattcaaagcctaagcttggtgatatgagttttatctatcttacctaatgtatctatacagagttacttaaacttaccaaaggcatttccagtggtggcaggtatatcagtcaccaacctgtaacgagagtattatccattaaagttaaagatatggtgcagtgcaacctgcagatagttaactaaattcgactaaaaaacaaagcatgcatcaaagtttttgaaagtttcgtctaaagcatgtagaaaaggtcagactatgaagaatagacgtttgttgcgtgcaagctatgatataacatgacacacacacacactaaaacaaaaactaactctgaccacaaagtcatgttctattcctgtttaaagtctctatgttggatgtatacgtaagacatcttttttcttgacaagttgctgctctcttaaagttgattctgtatgtccccttctattattagtaaaaatctaaaatatcgttttttgtgtgtcacttgagatatgtattgaatctctaaattttaaagtctttttctaattcccatatataccttacctatttgttttctatttatactcgaaaataagtgtgatgcacgatctaaagttaagttaaatgaaatgaagagatatgatacaaaccagtggagatattctcgttggtgagggttgcttggactcggcacatctggatccaccataacctttattaaacccatcaacaaccgtataagagagaagatcgattatgaatatattaaagcaatcaagaaattaaatcatgagtttgattttttttttttaactcttgaaaagtgataacacacattaagacgaagaagttaaccaaaagttaatagaaaaagaagtaaagacgaagaagcttaaattagaaaaaggtaatagtaacattttccattaatataagggtatctaaaaatactggctttactattcagattcaaaagtcgttaaaataagtgtcaattaagatatttatgcttttctaaaggtatgtatcctagaataaaaaaactaaaataaaaataaaagcgaaacaaaatcaagttaaccgtctcttgaaaacgtaatatatataatcgagaaagattcaaaattgatttaaaataataatcaaaccaataacagttatgcatgcaagaagttagaggaaacgcagcaggtatatagatgaggctacgaaagaaaagaatgatcaaatctagttacgcttaaatttggatatatctaaggtttcttcgtcaatatatggagcttacgaaaacgaaagagtgagctacgaggaactaaatcaatgaagataagaggaatgaaggagagaagatcaccaaggtgtagaaatttctgaagtcgtctcctccaatctccactattggtttgttcagaacttgagaaggccttagatccaagccattagtaacctctctatggccataagtgaccttaagagagaccaacctcgtgaaaggatcaagaacatctccaacaacactgccgaccacaagaggatctctacgacttaaagacatatttatcttggatctcaagtatctcaatcaaatgttttgcttcttaccttatgaacccttacttgctattctttatataacgttttgggaattgcaataattagctatttagctttattctctccaatgaaatcattaccagggtcttttcgtgtatagtttcgagaatctacaactcgttcaacgtacgtatatcacttataattcatgttttttttttctttccttttttctaaatttatagtattcttattccaaaacccaccagtataaaacagaaataatcatattccaaattatacatcatccacttgtttcttgctagccactagtatgtaatttattctgacttatcattgtaacttcatgaactatttaaaataatgtcacaagcatataatatgctgcatatttgcgtacgtcacgcattttgcgtcacatgtcactcatttaaatagttaaggacactacattacaccgattatgtatgatgttaatgcattttagaataactccttcaacctaaaccatcatataaaagtatatatgctccagataaattgacgccataattgttcacatatctggttggtgtgtacatacgtactagactcttttttttcttttcttaatgtagtactaaacttaattaataccatcaaaaatatcaatttaacaaaacaaaccagtaaaacttttaaaacaatggagtaaatcaaataaaacaagtaaattaacaaatagacacaaggtaacagaagtataataacgacagaaaagtgaacaattggccaaaaaattcgttttcaaacgtgatttcaaaattgtctccaaatcttaaatgttgataaagtaatttttttaaaattcattatacctttcaaaaacaagtgtattacctaaaagctcaaccgtgtattcttacactccaaacaaatttagttccccaagtttggaagacaaaaatttctaagaaatttctgacaaaacacatgagaaataaaccgataaagacttctaaaaactattgcagaccagtttcatttgctgaccacaaaaagtcatgagaatacaattagctcagtgattcttgatatttctggtacctaacaaaaagaaaagtgtgtgaggttagatggctatgatttttgctctccaatttattgtccatttccccaatttgtaatatgaaatgcgcaaattactcttcttccgatatgaataagcaaacgaaaacatacgtgggacgttatgttcagaacatttgattaaagtttatatgcgattttcatttatttattatgaattttttgtttggcagcatgtacgatttttcatttaacacacaaatattatagaattttcattggttcaaaggggtagacaaaaaataatttaatattattacaccatttgcagaaaattagaaaatatatttttacccataattaattgatctatggacgtatgcttggcataaaaattcatatttaattagcagaagccaatcgctgcgtttgtatatacgcgtttatgaccgagaaaaaaacccttacgcgtcatgtaaaaaaaaaagaagcgtaaattacgaaaaacagagagataaatccgggcattgagattttggagatagagagagagaaaaatcgaaatctattgtctatctcctcaatttggattggattttctgcatatcatcgctctagctttcgcgggttttggattcgattccttacccttctccaatcggtaagaacaagctccaaagtttgttcctttttttcaattttcgccaattctgtaatctcatcattgtccttgtttgtttgtttgattcaacacacaattcttgttttgatttggatgcagaagtttttggctttgaattggatttgggtttcgttccaaaatcagctctttttgttaatcaggtgagtttttaggtatttgaatctccaattgcttccttgcaatgactaagtattgtgaaatgtttagggtttcatctgtgtgggtcttgttttgaagcaatttgtgtgtgtttggatgaaagtagcagatatgcaggaccagctggtgtgtcatggttgtaggaatttattgatgtatcctagaggagcatctaatgtgcgttgtgcgttatgtaacactatcaacatggttcctcctcctcctccacctcacggtatcgatttctttgttgaatttgaattgaggatgaggttaatatgctctgcaattgtattataacttgggttctgattctgaatacagacatggcacacattatatgtggtggttgtagaacaatgcttatgtatacgcgtggggctagtagcgtaagatgctcttgctgtcaaactacgaaccttgtgccaggtatattaataatatcgtgacatccatatcaatccttttaaagaccatgtattatattgctttataaggtcttttagtcctttagaatcttctttcacacttttgtttgataacattgttctgtggagatgatgcttacgtaacgtatttccacttttcccaaagatgtatatgaatctgaattctgaaaatatctgggatttgtaaagcagctgaaagtacttaaaacaaagcttttagatggtcccggtggactaggtaactacttgttagagctagtagggtttattattgttttgtttgatctaccattagattcttatctttaattagcgtctaagctgttgtcatttagctgtatgattatcatttatccatgactgcttaagaacattgctgattacttcgttcattagtatttcttggatttttctagcattaacattgcttgttttctgaatctgtgcgtgtcttttttgaaatcgacagcgcactccaatcaggttgcccatgctccttccagtcaggttgcgcagatcaattgtgggcattgtcggacgaccctcatgtatccttacggtgcatcatccgtcaaatgcgctgtttgtcaattcgtaactaacgttaatgtgattattcctatctattaagccacctctgcatggttgagttaagtatagagatctttctgttggaaattttcatttctgattcattttgcatccttagatgagcaatggaagggtacctctcccaactaaccggccaaatggaacagcttgtcccccctctacatcaactgtgagttatcaaattatgaatttgtaatagttctgtatattcttatggaactggtacttactctgttcatcgatttttcattttaccaacagtcaacaccaccctctcagacccaaaccgttgttgtagaaaaccccatgtccgttgatgaaagcggaaagttggtgagtatttctatcacctgtgttcttcttcttatttaccacattagaggaagatatgacaaagtgactgaaacacacaaattgcaggtgagcaatgttgttgttggagtgacaactgacaaaaagtaatcaagaatgagtgagatcttaaagatcaaatccaaattcttcctctattcctgcgtttggtttgtgcatattacatacgcggaaaaactgtatgttatatatctcttgactcctttttaacccaagagaaaaagcttatcagaatctcttgttactgcattattggggtttattcaaagttgaagacacaaggtttttgctcgaataatttggcattcttttgctccatggaacttgaccttctcttctgtttgttgacttctaaaactccatcggcccttgtggcattgttaatgtatgtatgaatataatctgatacaccaaccaatcattaagatttgggtttgaaatctgtctcttccgtggatgagatatgctacatgtcacaagaactggtcttagctttggtagataagacttgtcttagagcaagtcttgaaatctggaaatctattttgcagtaatcttgtcacaacaaccataacctaatcagtcagtaccctccaagaacattaaagttagatgatccgacaaaacctctcaacaagaccaaactctttccatataaatactctttaacactgacacaaagtttcatcactttctcttgatcactcactgcatcaacaatggccagagagaagattgtggtggctggtggtaccacaaagagctggaaactactcttggggctgagaatatttgcattcatggctactttagctgcagccattgtaatgtcactaaacaaagagacaaagaccttggttgtggccaccattggtactgttcctattaaagccactttaaccgctaagtttcagcacacaccggcttttgtgtaagcgagtaaaaccctatacgaaatcgattcgatacatattgaaagcaaaatgtttttgagttattaacattgattcttggttttacaggttctttgttatagctaatgtaatggtgagcttccacaacttgttgatgattgtggttcagattttcagccggaaactggagtacaaaggtcttcgtctcctctctatcgccattcttgacatggtataaacattggttttcaaatcaatttactggtttgatttcaattgaattagtttgaacgtttggaaaaaaagctaaacggtttcttgataatctaaaaaaacgttggaaaaaaagctaaacgcaacactagtatctgcggctgcaaacgcggcggtgttcgtggcagagctagggaagaacggaaacaagcacgccaagtggaacaaagtctgcgacaggttcaccacttactgtgatcacggcgcaggagcaatcatcgcagcattcgccggagtcattctaatgctcctcgtgtccgccgtctctatttcccgcctcttaatcaattctaaaaacttctccaccaccgccaccacaacctccgtcgtctaaaacatcgtggccaaaaattcagcaacatgtgtgtgaccattttatagatgttgtggcttactttgtgtgtttgtctctcaagtcactagcaaattgtgtaatgcactcctttgttctatcactttcacatttgtattcaagttttcatttctctcttatctttttatataattctaaaatgacaaaaaaaaattcacaaagtatatagtacattgaaacaatgagaaaaatctacaatagatgattagataagaccaattcaagataatttataccttttatttctcaactacttcttctatttatggaaatataattctaatcaattgttagttttttacattaaaatgaattatatcaaccgactaaaaaacaaatcagtattagttctatcgcattgtagttcccatacaacttaatttttgtgttgtaaataatgatcctactgtctctaataaatgtgaatcaataatcataactattgaaatccttttctttttggttagtaaaaatgaagtgtaaatagtataactgtttaatttagttcagatatacaaatcaacaaaactacttaatttgaagattaattcagtttttttttttttttaattttctgtttataaaactactgaattttatttggtataaatggattgaagattttattacaaaacaaaatcacatttggcggcttcttctttttatgttctaaacccttttcttagatcggactccaagaaatctacttgctttaatcgttaacctaataaattcttctctaagttttttttttcttaactcatcaaagaaggaaagaaaaaaaaaaacctctttcacagatatttaaccaaaaggttttagatttatactatacgttacaaataaaattcgagagtcaaattcaatcttgggaaaagcttttgttccgaatcttggccccttcacgaaggtacacttatcatctcactctctatttccagacacaaatctatatgcgttctgggtttttttagggtttcgaaaacggcactgcatttcatcaagtaagggtttgttttttatttaacagatctttgttcttccttaggtcacgggttaaaagtatcgatctttgtgaacttaatctcactgtaaatggatcagcttgcatctctagcagagtctgtggctatggaggtttctcatctttatccttttgcttctttgatttgtgttttttgctttctcctccatttgtaacctctaatttgcatgtttgctagattcaattagcactgttgcagtttctgaatgtggaattgtgtttatttcttgcaggaagattctgagaaacaatcgattaaaggagagagtagtcttgaacctgactctactccttctagtcctaaagtaagttaattgggtttctagcaaagtattggttgggtaaagaggttgatggcttatctatgtgctaaacccgtttgagtctgaaaatccaatcaattctagttttaattaagttcgtggcttttgcttatcagtatcttccttcaaagatctcatctttctgagagtcgttcttattgtatttgttttagattaagcaaaatctatttacttgggtcttaagaatttagcaatctcatctggatcttattagattgtttgttgtgttagctatctgattgtccaagagcagatgaatctgattcatgaatgatatcgttttgttgcgtatttgaagataactgctaggtggaatccatcagaagcttgcaggcctttggttgatgacgctcccatcttttatcccactaatgaggtatttaaaatactcgagttgcaattttggttctgtcttggtagttaaattgttatcttatctgaaaattttgatccttatgatactgcttcatggtcaggattttgatgatccacttggttacatagagaagttgcgctctaaagcagaatcatatggcatatgtcgaattgtgccgcctgttgcatggaggcccccttgccctctgaaggagaaaaaaatatgggagaattctaaatttcccacccggattcagttcattgacttgcttcaaaaccgagaaccgattaaaaaatctactaaaaccaagaagagaaaacggagaagaatctctaaaattggatacacaagaagaaaaagagattcaggctgtgatacggcttcctctggctctagtgatagtgaaggaaaatttggttttcagactgggccagattttaccctggaagaatttcagaagtatgatgaatactttaaggaatgctattttcagtcagaggatcatcctggttccaaagcgtctgaaaataagaaatttaaacctaaggttaaggaccttgaaggtgaatattggcggatagtggagcaggcaactgatgaagtagaggtatgtacatgcagcaatataatgacatatcaactatttgtgtctttcttggtttcaccattttcttttgcatttatttgaatttgatgttcttcgaacttgctactcttgtttttggtcctatgacaggtgtactatggagctgacttggaaacaaagaaatttggaagtggtttcccaaagtataaaccggggtatcctataagtgaagcagatcaatactctcaatgtggttggaacctaaataatttgtcccgtctgcccggatcagttctagcttttgagagctgcgatatctcaggagtcattgtgccatggctttatgttggaatgtgcttttcaactttttgttgggtaagtttcattttcttagggtagactcttgctaattactgaatcgcatgaataatcttttgatatttcctggaaattatatgttgctgaaaaaaagctgatggagttctattaaaacctgttattgaatcaaaattttattacttaaaggatgtcatgcctttgggaccaaagttatggaattgatgcattttttgtgtgctttctaggagctatgtactaaccatctgctatttacccccttactttgtttgaaacagcatgttgaagatcatcacctttattccatgaactacttacacacaggtgatccaaaagtttggtatgggatccctggaaaccatgctgagtcttttgaaaatgtaatgaaaaagcgtcttccagatttgtttgaagaacagcctgacttgctacatcaactggtgaaagtttctcccaattcgtttttcatttcaagctctgctgattaattagaactccttacgtgtgtaattttggagatgatatggcgagagctgtcttttggttaagataatatgtatctcactctgcacctcctattgttatcaggtcactcagttatctccaagaatcttaaaagaggagggagtacctgtctatcgagctgtccagcgcagtggagaattcattctaaccttccctaaggcctatcattctgggtttaattgtggtttcaactgtgcggaagcagtaaatgttgcaccagttgattggctggttcatggacagaatgcagtggaaggctatagcaagcagcggcgaaagagttcattgtcacatgacaagctgcttcttggagctgctatggaagctacttattgcctctgggagctttcactttcaaagaagaagactcctgtgattgcgagatggaaaagggtttgtagtgaggatggattgcttacgaaggcagtcaaggtaattttggttctctgttcttttttctgtgtgcatgcatgtacaatacacactcaaaaaagcataggctatatgttacatttcatagattgacaactatcctctgaagtaatagtgtactagtctacctgatttttgataagattgaaacaaacatcttcaatggcactaacatagctgtggttagcagaagcgtgtgcagatggaagaagaaagactaaatcaccttcaagatggttttagcttgcgaaagatggagggtgatttcgacaataagagagaacgggagtgcttcttgtgcttctatgatttgcatatgtctgcttcaagctgcaagtgttcccccaaccggtttgcatgtcttatccacgctaaggatctgtgttcatgtgaaagtaaggatagatatatcctaattcgccacaccttggatgagttatgggcactggtcagagctctagaaggggatcttgatgccatagacctatgggcaagtaaatgtcgtgaccagtatccttcacagcatccaagagcaagagaatatgcttacctcaagtctgccccatgtataaagagccgtggttcatcaaaagtacagcagcgagaacaaaacaatcttcagttagtgtctgaacgcttacaaagtgatctaacctcaaacaaggaagttcagttgaaacaagatggtgattcagatgtaaatcgccatggtcatgaaagcgaaagaaatcatgtacatgggatcactgataagtcagctgtcacggatgtaaaacttggtgtgggaggtaagtttgatgagaagaagatttcggttgaatctcaaaacccacattcagtttcagatgtagggtgtagcgagctggcgaagaaagtggatggttgtttaggagggaaggaccaaaatgctgcaaccaataggttaagtctctctgttgagcttttgagttctggatctctcgttgttaaaaagctgtggtgcagtaaacaggccatatacccaaaaggtgatgaattgagaattttggatgagctttatactttagtattttattttttatgtcttctgagacttttgcttttgattgtatgttacagggttcaagagccgtgttaagttcttaagtgtgcttgacccaacaaacctaaccaactacatctcagaggttctggatgcagggcttcttggtccattgttcagggtacactaactacgtagtggtttcgagaatataactgaatatctatttatcatgcagaacacatgaaggtggtaagttactgatcaatcagtattatttccaggtctcagtagaagattaccccactgagaatttctcgaatgtatctgctgaaaagtgctggcaaatggtgacacaaaggctcaaactcgaaatcatcaagaaatgtgatcaaccagttagctctttgacctctttacaacctttggagagtataaatgggcttgaaatgtttggatttctctccccgcacgtaattaaggtgacaatcaatttctcatgcatagccataaaactatgatatcctgaatcttcttgcggtggaaagtttttttttttttttttttcttctactttgctggatgagagaagctcccatcttctgtttcagtccccttgagcatctctcttactcgcctacatgaccaaatttccatatgtactttttagcgttttggactgaaagttgaccattgtgcacaggtggttgaggctcttgatccaaagcatcaattggaggagtattggaaccaaaaagcagtgaaactgtttggtgctgaaccaataaaggaaggagaaaaggatgatacagagaaaggaggggcttcagatccctctttggaccgggacacaaggcttctgcgtggactgttgaagaaggcgacacctgaagaattagtaatgatgcatggacttctgtgtggtgagactcgcaacaccgagctcaaggaagagctctctactttggttgataagatggagataagtccttaaggaggagcaagcagataaacacactaacaccctttgaagttgattgtgtttgttgttcctttggttataaactgtatcagtagagaaatctagagaggcaatacaaaagtagacaaaagggttacttcgttgacatgtctttcctttttaccaaaaaagggtttaggattaatgattgtattatactgtgttgcatttgcaatgtaccattgttctctatatttcatttgcttatttgtaacagcttttatgattagtagacgatttcaaacaacaaccagatccaaaattgaaccaacctgtatgagctgttgtaacaagataaaataacatactttagagttttagctgctcgtgttttaagaaaaatacatgcataaattcgaatttagagcctatataatcaatctttcccacagtacttgggacaaacgataatatgttttttttgaatctttggactgaaaagaagccaagtgtaaatatgaatatgtacaaagaggagaaactttaagtgagatcatcctcgtctagatcgtcattagtgttcatctgaattgcagtaacatctccagtgggtagcttcctagccaacttgataatctgcagacaaaatacttatccgtataagattccagtagtttaatgaaacattctgtgatcatatggtgtcacaataaccagcataatgcagaacaaatacattcggaaacacagaaagacataattaggattaggattcgacagatcatttaagtgaattaccatatgatccaaattcgagacagtgcttgcactcgccaccttcttgatttcttcaatgtcaccttcattataggcggtgagaagtctactagcacttcggctctgatcactcttcagaaaggcatcaatcctaaccatgagaagaaaaatattcagacactaatttggtatcacaattcctaaagagttcatgttttcttgttcatagtaacatatatgatccatataaaaagagaaaagtgtactcactgagaacagtcattgtagcatttttctgcctgctgcaggtcgtgagcatacagatataagatgattgcactgagataggcctgaaataacattcagaaaacagttaaatcacaagtcataacaataacattcagagatacaagggaatcggtctgagctaagcagaaagcagcaaggtcgaacagagatggttaggagcacatatactcataccttacactggctatttgtcgcatcacacttatcagcagctacacccaatcttaagaaaaaggttgcagcatctgtgaacctacaaattttaatatttgtgccaatcaattactatatcagatagacggataaaatgttccatgatactaactgatcatatattcatatatctgcaatgtgaaactttaaactcggatgtgtttctaagtaaataataacttacttctcaagcttaatgtagacattagcacaagcacggtacagatcaaaggccatttggtccctcccatcctcttcaagaatttcacaagcatcagtgtatagttggatggcgtcatctggtttgacatcttccaaagcactgcaacacaaaattattggagatgaaacaaagaaaaacggaggaagccacactgactattatcgcatttagataatagatagtaagatacaaatcatgaaatccaatttcttgattattaaagatgtcaacacaaaattaccgggcagcctttccaagagcatctgatgcgggttgtgcccttccacactcaacatacagctccgacgcctttctataaaaatcagcaacttcattccaaatacttagcttctgtgctaaggcagcagcagactccatatgctttgcagcatcccaaggactatttactatcaaggataacattaaagaggatgctatgtcgatgcgacaaaaataaacagcaacaaattataatctttaacggaaagtttggatacgaagcttgcatctcttgtccttttgaagctttctcgagagccactttagctttctcatatttgtttgatgctctaaacccatttgctgtcattcatcaatgaataggagtaaaaggaaagaatcaaaccatgcttttatagtctccaagcttttagagaatagcatttggattctgccatagagcaaaatacactgtgttacccacctgcttgctcatacaactcagtagcacctctccaatcagcactccatctagtaagcgtgagctttgtcctgtaaaaaatgaagaaccaaagatgcttaaaaggatggttaataacagaagcagatcactgaaatgtaggaatgtgaaaacagaacaacacaatttatataagcaagcaaagacgatgttccttatcaaaccaatccaaaatgatttctcaatccttgtcaaactggtaatatattacattgcatactcattattaactcttaattccaattcacaaaaattgcagagaatctcacaactcacaaatttttgaattgaaaatcagactcaaaagaagtgttcttaaactttaagcaaactctcatattaaaatgttcctatgcaacaatacacaagatcctagatccttcttttctcccaacaaaaacctttgatcgaatctcagaatggatcacgagaagtttctcaatcacagtaacaaaagaaaaccctcatatcttaagagcacagtcatctcgatcaaacccaaaatgccctaaagcccaaatcgaattttaatttccaccgatcattaacctctcaaacagagcattcatataaatgagaagagaaaaagcatacattttgtcggctttggacatcattttgtcaggatccgaagacatgactagctccaaatttcagtaaagttcccggcgatttagcaaacttggagatcgatcggcaatatagagagaatcgttttcactatctgatcaaaggaatttgcaaatcttctatttttagttaattttattattgaaattattggactttatcttccagatatataataaaatcaaatattttattttaactccttgaaacattcttattcaaacaaaccaaaccatacttttgttatgtttcaaattacaccatttccacgattctgttctttgtgagattctaattctcataatttagatgaaagttaacaactttctatataaaaatacaaacgttatactaataagcatgttctggttcatcttcacaagtcaagctcatgacaataagcatgattctgaaactatgattttaggtaagaagtagaaatccaacgttgaatctcctacacattctccaaactctacaatctccactctataaattacaacaccatttgactccaaacatcatcgaacaaacaaacaacttcaaaacaaaaagaagaaccatctcttgttaaacactccaaaatcagctacaatgtcaatttcaagagtttatctctgtctaatctttctcacattcgtcagttccccacttgtgctctgctctcgcagcccgaaactcgcagcagcatcagcagcaatagggaagaagcatgggaaagaacatgttcattctccggcaatgcttttttctgaattcccgaaggttgattcatcatcctccatgacacatattgatgagcctgcaacaaagtctgcaatagccggttttttcaggtatagactaccattccagggatggcctttccacaagtatgctcctttcccaatgggtacacctacgaatccttccgttcctgtaacttcaacaccgtcttctggagctgctgctgctgaggaagaggaaaccgagaaggtgccttctgcgccaagcaaaggaaacagagatggaggcaatgcgtaatgaatcaatatgttttctactagaaccttattgtgttttaatgactgtggaatctttcctctagttttacatattgtatcaaataaaatgtaccatgtattataaatgctatgtgacatttacatggaaaaatgaaatgaatacagtttctcttatctaccaagctctgtgtatatattaccagcttcattgtttcgaggcgattttcactgtgacagacaccggaatacgaacaatgtgtcccgcgtttcctagcagcttgatccctccaaaactagaaatagagctgttcctctttgctgtgaggattacactaagtagctttgtctctccactggctatagagaattgagtaggagatacatttatcaaaacatcaaaaggagtaatcaaactgacagtataggtctcatttccagcaatgtttgtcattagtctttggaccgttcgagtgttgttaagcttcgatacagtgatggatggcaaattaaggtcagatccgctgattgttgcattgttccgcaagcaatttgtgccggtgtagttgaataccactggagctgatccattgatgccacaaagaaatgacatatagtcttcaaaacctgcatagaaagaccgttaaaatggtgtctacatttggtaatttgaaaatgtagaaaactgccaaggttatgttaagtgtttaactcactagtatcaaagattaggccaggatccaaagctgcggttgcattcacaaagccattccccatatcaaatggggtagcaggagatatggtttgatcaggattagcataagcacgttgagccattatcgcctcgcctttattgtcaaatagaacagaggttgttgaaagtgcagatgcaatagctgaaggactaaactttctgaatttctgcttgaccaatgcagccacaccagctacatgaggagcagccatactcgtaccagacatcatcgcaaaactttctcctaaaatgagcaaaaggaacacaacagtttaaatgggaatgtcatcaactatatcaatgtcatgctttgtataccttcaaactcagtggattcagtggcagcggaactccaagcgccccaaatggaatttccaggagctacaagatttggtttcaaaatgtcggcgtcgttaaaaaggctgtcttgtggatcaggtcctcttgctgagtagtacataatcttaggagctctgttactgaagttagcattttgtccacctgcaatggctgcaactgctccaaatctaacaatctccttggttgttccatctcttacaagagaagagttatagtacttgagtaaaacctatatatgaattaacatgtcgttattagattgctcttcaagaagaatcaagaaaagaagtgatatgtttctagttatattctcaccttggaatcttctgcggatggaattatgatcccgggcatgtccatcggtgtaggattaatctgaaaaccaagaacataagggtccatgtagaacacaacaccctttgcagatagattcttggcaacagctaaagcttgtttaatagtggaaagcccgaggacgaaacggatagagtagctacatatcagtagattcccacggataacatctttatcgaagctgccatagtcttggcattcacctacatacatgtctttgtctactactgaacttttgttcttcaacgcatcaagagcagagatcattgtgtacttcttgccttcatctgtacgaactagaagaaaacaaaacagaaattacagataagcaaaaactagctgatggtttgaaactgaattaagacttacgtgcaagtcctacgcctggaatagatacattgttgcctaggactatcgagttagagtagtctcgatcgtgagaagcagcaccaacagtgaaaatccatggactgaaggaggacatgctcttaggagaaggacctgtgtttcctgcagcttgtacaacgaatataccggccttaacagcggaaagcatggccatatctaacgggttaaagaacgtggctacaccgggaggacgtcgattaggtgtgatggatagacttaatatgtcaactccatcttgagctgcctaataagattcataaaccaatgaaaaatgtcatggaaagatcgatacattctaattagtcaataaaaggaaaaaggtaaatgatttacctggtctatagcagcaacaacatctgcagcaaatcccccaaaactcttatacaatgccttgtaaacagaaatactggtacattataaaaaatgtcattagtacactcaatgcaatatgaatgataaaaagatgatatctggctaatgtctatttacttactgcgcacgaggagcgattccactagcacttccaaagttatggccagaaactactgctgagacaccatggttacccgctgcgatggaagctgtgtgcctgtttcatcaagataatgatatttagtagcagaatataaagaagacgccaatgtttcaacattaccaagaagttatacttacgtgccatggccatcgccgtcaaaaggtgaagcatagtcttcagatgaattgaaaatccctctagtaatagctgactgcgcgaaatggcgagctccaacaagcttcctattacaggagcctgatggaaaatccggagtaacttcacaaacacctgagaaatgattagggatcggatactgacgctgggaagtgtcagtgccattgaaactagggtgagttggatcaatgccagtgtcgataaacccgataacaattccttctccagcagtttcatatccaccttctttaacccatgcaccttttggtaaacccatgaattgaggtgtataagttgttgccgtcctaacagaaaaatccaacactatgtttgctacttcccttcttcttgaaagagtctcagcctaagagaaaatgaaagaaatttgacataaagatatcataacatagtataagctcatagagattgttatgatcaagattacctgttgtgagctaacaaacacagcaaaaccattgatgagataatggaagctatagagctttatatacttctctcccttcaatgcatttcttagcaaagagtcatgagcttgagcaattgctgatcttcttgatctccaataacgtgaccttgaaatgttcctatataaaaagagaacctaaatcaacatcagaaaagattctacacaacaaaagagtgaacctttatacacaaaatccagtctctattaatgttcaaaagcataatagctgagaaaatcatacaatgcatgtacctaaaagtgaactctttctaattcaatgatacattcattaatcaaaacctgaaattcaagactccaaaggaaaattaaattaccttggttggagttttggtctagtaaacttggaagtgtctccatgtttggattgatctctgacccttttcacttcttctgcttcttgttggaaaaggtgaagagaagaagcttgtctcagggtaacaatgtaaacagccgtagtagagtttatatcagaatcaccaccattatcttgtccaaatgaattcgacaaaaccccaaaacagaacagaagtaaaaccccaaaattcaccattaaaactctcctcattttttcactcagtgataaaactctacgaaacccactaattgcttaaatgagaagataaagaaagaaaaaagctgcaaaagaagaaatcattaagcaaacatggtgaatatcatcaagtggaatctgcagaaaaaaaggaactgccttttatatctttttcgtgttggagacggtgaaaagaagagtgtgctcatatttatacttattaatagtattatatacacaaggtgggatatcttcagaagaaaaaaaacaaaactcacgagaatctgaaacctttttttttggtttcttggattctgtggatatttttgaacgttttaactacaccacagggtcccagaacgaaagaggcaatgaaaaggacgagcacagtgttattgaaaaaccagagttttgcaaaatttagctgttggaacttgtcgtcgggtcccatttctatcctctttatagtttttttacttaattcagttccacagttttgcactgaaattttaaaagaaaacaatgtaacaataacaagtattcgatttttcttgattttaagcatgtatataaaccttatcaataagaaatagtctgatactaaatgaaaactccaatccgtaataatgagtatcataccgaatctccgattaagaaataaacaagtaacgactatatattaacctttaaagttgtcgcagccttgtaatattcttttgatcttttaaaattataaagctgagatttagcaatggtggggttaacgtgaagcatcattaggagtgttaatgggtcacactcacacctatgtttttgacttttttttattacctttcgtacttttgttttgttttctatctttaaccttcaacggcacaattcttacacagccaaacaatcgcagtgtgcagtgtaagtcaacaccatttgtatacgttctcacttgtcaaatcttggttagtgaccaagccttattgaataattgaaagttctgaaaaataattcactataaacaagtattacttaccattcaactaaccacactaattcacaatttcatttcatcaaaattaacatatgtaagaatgtgaaacccaaccaaactgaaccaacagaattttggttagatttgaactatatccaaaattgcaaggtaatgtgacttgttaatctttttatagatcgacgagttcttcatcacaaatagctgaatgtatccacgattcatcacaacatccatagctccctaaacaaggttttgacttctacctaaacaatccataaacaaggacaagagaggtgatcaatagtagaaccgatttagcccttgttcgagtaagattcagatgtgatcactagcttagtttctagctttctaagatgttattaagttcctcgaaatggcgcaagaaagttgctgtttcaacctcaaaagagttagcaatgtaaaacgatcctcaagatagatgtttaccttaagaagacataacaaagtttaatggattcgttcttaaaagaaaacacaagaagataaggcaaagacaactcactcgtcaacaaatctacaaactttgaaagctaagatagatgagaaattgcggctaaagtcaatgaaaggcaacatgatagcacgataccgtaaacctgaggaagttcaatcaaacatcttaaagccttcataatctcaagaaaacagcgacaaaaacagtaaaaagccgagacaagagtcctgttcattcactgctaacctaatcactgctgctgattatgtggtggcatgccaggacgcggtggagcaaaaccaccaggagcaggaggcattccagggcgaggcggaggaggtccttgcattccatgaggtggaggaggaggtcctctcatcataccaccaggaggaggaatcattggcctttgcccatactgaggcggtggtggtccagaaaactgctgtggcggtggcctcataccataaggcggtggaggacctcttcccataggaggaccttgaccaccaaaaggaggcggtggcaacatctgtcccggaggtcgaataatcggaggagctgaaagctgtggtggacgagagatctgaggctgcatcattcccggagcaggtccaccaacaccacgaacaggaccagataaaccaggctgagcttgaactaacggaccagtaggaactccacgcccagcggcacggccaattcctggaccagcaacagcagctgcagagccagctttagcacgagattcttcaggaggaggtggtccttcgacagtcattgagataacttcttcacctctaagcaacactaaacctagcgtacggcgatcttcacgctcttcgttgatcttcttccctttagctggtggaagcttacgaaactcctcgcaatcgccgagaacgaggttcatgtgacggtcaaacgccatgaacttcccaacgagctgtcttccgtcttggatcgtcactcgcatcctgtagttgatgaactgaagcatctttgaactcttcgacatcgacattctcgccgattgaatagtaacactcgctacaagcagagattcggcggcgaaaccgagtatgccggaggatcgaaatcgagcttagggtttcaaaaaactaaatcgagaggccaaaattgggggggtttggctgtgcaaatcgggaagtgggaaatttctagggtttataaatgaatacactcttgtttatgggcttactttcattatgggcccaaacatattggacttgggctgcaattagttgaataggctacaatatttgttagtttgaggctccaagtttcactaagcttattttatggagcaaatcagcaaatgtcaaagtttaatcgggaacaaatgtgtaaagttcaacaagattaaaacaaatctgatacattgaataaggaaatattttgttattcaaaacacacgtgtattcctgaacttggcatgaactagcgtgcatcagggatatgttcaggaccaaagcttgtgctctgttcaagagaactcttggagtccacgtcatgtctccctcctttccttgagttctcagttaagagacactcttgtagttcattagcaacctgggacatatttggtcttccggatgaagatggactgacgcatgacattgctaactcaagagccttccacaatgaactagagtcataatcaccgttcatacttggatccacaatatttttgatatctccattggttaacttaaatcccacccattctcctatgtgagacttctcacgagtttggtcaatcactggctgacttgtgatgatttccagtaatacgactccaaaactgaagacatcactcttctctgtcaaccagtttgttcggtaatatctataatacgaatgaataaaaaatttaccagatggaaagagaaagacacaacttaagttcattaagtattgttatagaccacttactcagggtcaagataacctggagatccagcaacatttgttgacacatgagtttcacttcccaccggaaaagatcttgaaagcccgaaatcaccaagtttggcctggaaattattatcaagaagtatattcatagatttgatatctctatgaatcattggtggtttgcagccgatatgcaagtactccagtcctatataatacaactcataaaaggtttatttcaaaactcaccaagagaagtgaacatctcaaaaaatttgcaatgttatctttttctcaaaacttcaaacgaaccttgtgctgtctctgcagcaattcttagcctattttcccaactcaaaggggacctagaattttctcctgtactcataaagatgtgtgtatgttataagatgacacacgatcattgtgtttagaaacaaattaggtaatcaaggttaccagatagatgttgttttaagtttccattggacatgtactcgtagatgaggaccaagtgttgtccttcgtcacaataaccaacaagagttactaaatttatgtggtgtactctgagaagaaggtctacctagcaaaccacaagtaacccaaaagttggtaaatcatatatatacattttatttgagtatatgaataattaaacttaatgatagtgaaggtacctcagctttaaattgcttatatccttgagctgaggattcagagagcacctttacagccacttgttcgttatcatttacattaccgtggtacacgactccaaatcctccttcgccaagaggtctctcaaaattgtttgtaattaccgcaacctcttcataagtatagcttctcttgttcgccaccattgatgagcgtgaagctattatataccatacattatatacttaagtacaaatttgaagttaatgagttttaattagtcctgagcttacctttggatggcttcttctttctaagtaagagaatgttgacgagaagaagcacagctataataattcccacagaagcagctgatgcaagaataggtactagcaatttctttttgttattcccaggaccagtttcactttcgcatgatggatccaaacagaggttatttccattatacagcaacgttattagcccattcttttccatgttgagaaggctttgaggaattgagccgctaagattgttcccactcaagtttctgtgcaatgtatataaaacgttattagatgcatccatttaaagatttaaaaccaaactattcgttttacttctaggggaacttacatgaatgtcaacaacttcattttggcgagaaattcaggcacctttcccgtcaagttgttatttgacaggtccctataacataaataaatcatgattgtcaaacaaagatatcaaaatagtcaaatagatgttccctctataattatatagggagatatgtatatgagacttacaatttctgtagctggttaagatattgtatatcacttgttatggtcccatttaatccaaagttagaaaagtctctgcatatagaccagggcacatttaaatttccattaaaaagaaagaaaaaaagaattgatttaaacaagaaaacttgagtagtgtaatgatcttacatggaagtgattcttggtggaatagacggaaacatgttgctacagtttaggccagtccatataaactgtataggtacacatggatctccttgccagttcgttttttgtattctataagtggcttgaatgttcttcaatgtagtgactgggaatataaagtttatatgttgttgaatagtttaacctcatgaacaaccaaaaagggttcgtatatctacatagtaattaagtacagttgacaaaccgtcgttttcatctgtttcggtctgaagaagctggagtaacccgaaaacctccatcgcattacaatatggtggaagagttgacgacttagttcttgtgagatctagggagcagaaaccatcgtcaccgcatttactcgaggttcttataggtacagtgtcagccatgaactctagaggactgtagtaatccctaatgattgtgtttttattccacaagatactaaactctctggtatcactgggcttcaaggcttggatctcggcaaagtgaaggtacacgtgaacgtcgtcgtccgggttttgtatcgaccaggttgtgctccatgtatcacttgcaacttggggtatggaagcctttgaaattatagcttgtggcagatcaaaggcattaacagttgtatttacaggggtggtggtgtttatatctgtccattcttcatccgcatggtatacgtcccatagacggtcatggacatcatctggatgtctaacacaacgatgtattatcggtaaacaattcagtggtgaatatgcgtgttaactttttcacttttcacaaactaactaattaaagaaatcataatagaagtttaagagtagttcctacagaatttataaaaacgtaggaacttattatataaaaaaataagttattattataaatattttcacagttttatttgtcaaaccaaaatatttataacagttaatgttttcattttagcaaataactaaaaacgtaaaaaaataagctgctatgtcttttagtctaaaataataatattttgacccaaaaacaaaaagtctaaaaataataatgtatattttttaggagttatttttaatcgccaatcagatcgtgacacgaaaattcagaggctttcaacttccatgatgtatctttctcaaacaaacaaaattaattattttaaattaatttgattatatatttaaatttggaaaaacaaacaaaactaccacattttctccacattttttcaaattctaccttgcctttatctttccatctataccacatttggtttgtatattatctattttatcctcattgttttctttctcttttctctttctttttctctctcttgttctacgtctatcgttcacaaaccaagctttttcgtatgattttttcaaaacacaaattctaaatttgatttattgaaaaatctttctctttcacgttcatgtctacatccttcaatagattccagatttaattccttgattccttgttcctattactatttatcttttttttaataaattaaaataattttttatctttttcgattttggttgtctccagtttttgtgtttcaatttctgaaattattatcataaaactaattcatgtccatgtctcttactagatctacttttagaattatttttactacacttattttaaaatgggggacaagatcccgttcactttctctctccatcaatacctttattttgacacaactctattatgtcactgacgggtaaaatggttcatctgataccacaatccattataatgtggtataaatgaattttttttttgagatgtggtataaatggaaaggaattcttaaaatgtggtactattgaccaaattccatataaaattttaatttggaaagaaaattgaaccattaaatgattgacataccgtatgatggaaccaagaaaattaccgtaagataggatgagttgacttaccgtatgatggattcaagagtggggaaaggcttcctgaaataccagcgggagattagctttagagagccggttgtagtagtataggtgtcatctctcaagggacgtagttccaaggatgatatgaatggcgtcgttgttcctgtcttaaccaaacaaatatccaaattgtttgactttggcatgtggattacctcctctacggtaccatcttgcaaccaaatccgataatagaaaccacccgaaggatcttgcaaatttatagttgtccagaaattggggccaagatatagatcaaattttggtctttgtttgaggtcataatttccatatacgaacacggctctgataagataatgtgtgccctgcatgacagtcagattatagcagtttcgtgctccttcaggaaaatacctaagctgcttatatggctttatgtatttcacgccagaatcagagtcttcggtcttgatggtaccactttttccgctgctaataaaatcagcgtcggatgagaaattcaaaccggtggactcgtcggtataactagactcgttacggggcattccgcaatctaagctgatgaatcctggtagtcatggaaaaaacaaacagatcaaattatatcttgtgcaaatatgcaagtgtaaagattccataatatatatagacacactaaagtttgcaatgtaagtgaacattggttagggtcaaagaaacaacaaaaaaagaagaagaagaaggaaaaatatacatgcagaggattgtataaccgcaaaataccttgttgatcttgagcatcaacgatattagttatcaaaaaaatccatattagggccaagaaaataagcttgtgaataccttccattttcgaaaacttaagataacaagcaagcaactacaaatattctgatataaagctatttataacataacaagaaagaaagaggttattagcttaatgttgaaaatgtcacctgaaggttgacgtgattataaaaaaaaaatacttgcatttgcaaaagaagaggccaaattgggtaaactttaatgatataagatacccctccaggttggtggtgtatagaatttgccccatatatatatacctgccgttcggagtttctagcacgtctctcttattcatgtatgtgtgacactcatactttatgtataaaatgttacatgtgaaatgaacccgtcaaattttggagcttgtgtgatgagaactaaatggtcctgaaactatttatatgttcttgatgttgcagctgtttgattttcaatcggtggtgatatgatgaaatcttcccggtcatagtgttcggagatgttatcctttcactaaaaagacattgtggaatgtggataatgacattacaatatgaagatttgagtttggttacaccattcttatgattacgtctattgaattctgtatccttttatatataaagtcactgattacatcgacaactcttgtaaactgtatcaaattaccataataataatacttattgaactgtaattctgtaataaatcaattctttttctataagctaatctctcaaaaacaattatgtaaaaagtttaaaattaaaacttttttttctttcttggtcgtctttaagaagaagcatatccatggggatgagtcttttgccacttccaagcaacctcaagactttcttgaagattagtgtaacgagcagaccaattaagatctctcagaatctttgctggatcactgtaaacctctgcgtaatctccaggtcttcgaggcaaaaaatctactttgatatctactcctgtcgctttcttacatgcttccacaaactctttcaccgatcttccttttcctgtacctacattgtatattcccacatttctaggcttagctttctcgagagcttttacgtgagcatctacaaggtcagtaacatctatgtagtcacgaacacaagttccatctcctgttttgtagtctgttcctttgacctgtttgaatccattttttcagttataagagttgagtaaaaaagaagcatagagagagttttgagagatgagtgtgttttatttacctgaaggcctggaatcacgccacgagctgcatcgaaacaggcacccgaaatccgtccgtgttcacgtagctcgggctttggagcttctcctagtctaccttctggatctgaacctatcacgttaaagtatctgtggaagtaataaagatcatcagacattgtttggttgaacaaatcagagtcagagacttgttaaggcttcaagaaacgtggagcctgaccttaggatcatgactgccatgtcagagtttttagagaaatccaggatcatatcttcagccatcttcttagcttttccataagggttaatggggacctgaaaatcgataatttccgaatttgaggagacatgatcatactacgaaagagagtgttttctgaaactgtttagaatagtacctgtggagtaacttcaacaataggcatcttgtcaggttctccataagtggcacatgtgcttgaatatatcaacttcttcactttatgtctagccacagcttcaagaactactaatgtgtttgatgtaatgttgtggtaatacctacagaacaaaaatcaacatgagattgattaaccacaaagaactccaatcttgcagaggtgttatgaacagaacagtgggtggagattgtactttagaggatctagagtgctctctccaacatatgctactgcagcaaaatgcataacagcatcaaacgcgttctctgagaagattttatcaacctgaaatgaacaaaactcatacttcatacaatataccaggaaaaaaaatgctcaaaagaatcttagggatatgaagcattacagctttggcatctcctaagtcagcataaataaattgaagcctcccgggttctgggaacaatccttgtaaaaccttgacggcaccaagatttccccgagaaagattgtcctgtttgtgagacaaaatgattagtgttacaaaaccaaacattgcagtttgaaacttctccaatggatcgccaaataccatcaaagaaagaaactttaccacaatggttacacggtatgaatcttttaagagcctcaacgcagcatgtgatccgatatatccagcaccaccagtgactaacacatgagtcacaccttcctcgctacgagagaactgagaaaaccaacaaaccactgatattacaaaaacataaactaaaagaaccatgatgcaagagaaatgttcccagccattaagacaagagtaacatatcaaagattctagcaaataggatcgtggagttaccgcggttggtgatgtgaaactcggtgcgtgcttgagcataaaaatgcataaagcagtaagagaaacaaccaagataatcttgcccattacattgctcttccttttaggttctaagtattccatccctgaattatcaaaatcaaaagaaaatgattgatcatctaaaatgttgcagagactcattatacttaaaatatataaatatcgtgattcaagactaacctcctccaagaggtcttgtgtttcttccttgacttctagctctagagaaacttagcattggagattcagaagaatctgaactcaaatcacctcaaagtctttatggtctttggtattgttgagacaaaactccagacacaaactcaagattcagtagccagcaatcatcaagttagctgcagattgctgtttagagtaaaagatgaatgaatacaaagtcaaaaccatatataagcaaaataaaataatatttggttgggaagtgggaccttaatgaaagaatcaaaaacaaggaaaaagacagacaaaagtttgaattacatttatgaaaaaaataagatcaaagttcaattatttattaatctacatgttaattggaaagagaaaaaaaggcagagagcatgtttgtcacagaacagaacaaaaacagagcaacaaaaatgtagaaagagtctatgttaaagtcatcgactttgatcgaaatttctctgctttatgaaaaacccatctgagaaatcacggatcataagatacccagaaacgctttcaatccccaattttgttattttgatcagaatccgaattcgtttcaaaagtggggcaaaatgcagaaacagaacaaaatcaggttaatgaattgggtaaataggaagagtcaagacatagataagagagagtacctgagaatttgggaaaacacgaattgagagagaggaggaagaagaagagttgtgtgatggttgaaatggagaaaggcgcaacgttattaagggagagacaagaacgtaagagagacttttgggagaaagagaaaaagagagagagagagaaaatagaggagaagcggaagaagaagaagaaagtgaggagcgaagaaagaagaagaaacgtgcaatgcaaaacgaaaccacaactacgagacctggtcaccactctctcctccttccttctattaagctctttcctttttatggaaatgaaaaacttacaaaccagtccttcaactttaactaaattatttttaaacccccaagtatttttgtacatttttaaaccttagtttgtagatatagtggttgtattttttgtttttttttttggttgcaaaatagtggttgtagtagtttcataatcgtgtaataatctcgattcaaatcttttacatgatgtcaaaaaaaaatgttttatacaatgaatgtgaaagattttttactaaaataacgttgactagactacgtaaagcaggttttgataataaaatgactcaatattgagagatgtgactacaatctaagtcaaaacattatgaatttatgatgatgttacattaattaatatgacttcttgaattgtttatccgttttcataaaagacggaataaccaaacatctacacggatttcattagttttatcatgagaatgtcattcaaaaccaaccttgtttctaaattgttaggggtggtgagaatgaaactattagtgagaaaccgtgactataatcaaagtcaaacaaaaacaaagtcgttgttccaatgcatgtcgacactaatgagtttcttccttatatggatattaatttcaattagttttgtaggatgtgcgattgcaatgattgtaatatcaactaatatgcaatcatttgttgccatatcctcattctttaatcaaactatggacaaaaaaaacaatagatggtgatcaaagcagttttgctgcctagttgtagcgactgctttataaccatctaacgtgataggccaacgaatcgatagtaaacaaataattatccagagacatgtcatatataaaagactttgtatatagaatattgctacgtaataatttctcaatatggatacattctttctacgtgagtaataattgaaagtttaaacaaatgcaactttgtttttcattctctcttatacaaagaaaaaatagtcatcaaactgattaacaagagtgtggaaaaaatatcattactaacacaacgaacatttttgcatcaagtttatcaatttgtatattgtgagataatcaaaatggtcaattatatgcatgtttcgttctggtcgaaattaattagaattccttcgacggcctaattatggttgactttgcttttcctttattttttcaaacgaaaggagacgaaaatatagacgtcaatatccttagtcttgtagcgtaattataatagagacccacctaaaacctaaccaaccaaatctaaaagaggcctccttattactcttttagactgctgaattcttttagtcattaggttacctactagtttttgtctcctttagatatattgtaggcttgtagtctcaaaaacacttgcaagctgcgttctattttctccaatttagtttgcttttgagttttgaacttaagtttaaacaataaattcgacgtaagaatgtaatagtagagacgggctctataagcatgtaagatgtgctaatgagtaagcttctaggtttggggaactacataaaagcatccccaatggtttgtgagctaagtgcatttgtgtagagactatgtgacaaaatttccaaattcttttttttttgttactctagggtccaatatatattgttttaaatatttaacctctaattagtgttagacaatagaaagtcttaataattacaaaatattctatgaattttttttatatacttaattaaaaattaatgcatccaaatctaacagcaccacataatgacagtaagtaaaactttaagttaattgactagttgtatcacggggagcctcagctctggcctcctcctcaatttttttgttaacgcatataaacctaatgctgggagccagagctgcgtgcttgcatacagagccagggctacaggggacagtttggaattgaagctgcttgaaaaaagataacatggggtcaagttttaggcaaacaaaaactacaagtagtgagaaagggtaactagttggggtaaaacaaatagtagggcaatgacaaaacaaggctagaatgcttaattaccagttgtgcatgttgtcgagaatagagatgcgtgatgaaactatcaagtcccggccagtaacaagatctggggcagcaaaatgatgacacacagcgcagaaccaggaggctggatcacccatttcactgcacttctcctcctcaagagctactggatctgtggaaaataaaaataaaatagtagagctagttcagcaacagaattcattcaatgaggagaaacacagacctgccagaaggaagtcttcccagaggctgattgcaagagtcaaaggcatttctccgaatggaaacgggaaaatagtgtagcgacccttctcacggtccttgtcacgtatagaagagaagtgtcgaggaatgtaggatggtggacgggatatgaccatcatattagctggaggtggagtacgaagaagagaggactcaaggaaaagagcatacatgtttgtcggacctgttgagaaactagagaattaagagaatcccattaagactctagctatggaataaggatgagaagatactaacttttaatgacctccttaagagagattccagtggaatacactgctttaaggatgtcacgagggacctctgatagtacgccaacggcagtgatggtgataggacctgtgtagcctaacttcctcaaattccgtttgatacacggacccaccagtcgagcatcatagccatcgggaaccggaaacgattttatgtcccagaagaccgatactggggccaaagctgcctcctcgataggcggaggctccatcaccctcatcatcggaaaatcaaaccttaaaaaaaaaagaatcaaattcaattcagtcaaacatcagagaaccgagaggaacacggctgctatagaagttgtagggttcttctatctatgcaatcagtcgatgaattttgcttagaaaatcaaacatcagaaagataaattgaccaccgatcgagagaggtagatatagaggaacacagctgctaatcgtgttctatctatgcaatcagtcgatgaattttcaaagtaacatgatgagataagaaccgagaattttaccttagagatgttagctgcagagttggttggatcgatctcgatatcgtcgtctagggtttcttaattctgaatgaggatattatatcgacgccgcagtatatatactgataatgggcttcgctttaatgggcctacagtgtttgtcatgaatcggcctgtattcgtgtgaaacatttttccttttctttttcaaattttaattgtgaatttcaattagcggaaacttataacggaaaattaatcatttgatcgtctggttaacaaaacttaacatcatgtccgaaatggccaattcaacgaaatttcgccattttatcggaagatcaaactgaattttatgatatttcgaaagtttatatttttcgtcccatatttaaaagttagcgctttaaaaactaaacaaataggaagttcaatcacaaaactatttaatttgaaatcttcctctaatataggaatatactgaaatatagttttatttttaatttttgtatttcatcaaatatcgctctttacttgtttttgaattataatcggcaaaacggatttggtagaatcaacaaggaaagaagacccttttgagcttgactctattctgattttgtgaaatatgtgaaaaagtgtaggataagtgaaaacttcaacgcaaatgaaatgttaatatcatgtatgtttacaatcttacaattatagagcaaaccccagctttttattcaagcaactttgttctctccctttgattatttgtgagctaagagaggagtgaatttgtctaaatcccttagtacaaattcattgtttgattacagaatcaacaattggcgcgccaggtaggggaatataaacaaattttctctacgctcctttaatcaaagcaagcatggttcaaatcgtcatcgaccccgtcattcctccagtcaacgatgatggaacggaatcaagtctcctccacggaggagatccaccatctaccgtcgaagtagcggccaaaacgaccgtgaatcaaccaacacacggggagacccctgtcgacccactatctttctcattggaagacctcaaagccatcctcacaaccgtgacgaaagatctctcagaatcggtcatggagactaatcgccgactcgacgagctggctaaaggaatctcccaacgtccgatctctgaaataaccccgccgcgagtcatccatccgcgtgggcttagcttcgacctcacagatgcacaatccaatagggtgaaccccaggttcccaggttcactccatcctatgaaccaagaaggcagaccgcctatgcctccctcgacgttgtcgggtcatgtctcgagacccgcaaccttagatcacgatggacagttagatgatatctatctgaaactccgagaaatcggatcccaggtccacagagccagcagttcggctccagagatcgaccgaatgatcgaagaaacccaggactcctttcacagatcgggttacacgcacgagaatcctctaagtgaagcttaggattccgatctatgagggcggaagcgatcctaaacagtatgacttctttcataacagtcgctaaagctcacttttcggacgaactccgtgatataggctgctgccagctcttcgtcgagggacttaccggaaacgctttaacctgcttttccagattagaggcgaactcaattgataacttcacccagttgtcaactgccttcctgaaacaataccgggtatttattcagccaggggcctctagttccgatctatggagcatgactcaagaaaatggcgagacactgaacgactacctaggtcgtttcaaagaaatactgtctagttaccatcacggacgaagccgcggtggctgcttttaggaaggggctgctccaaggatcccgctgagaaaagacctcgcaataagagaaccgcgagatctcgatgacgccctccatagagcttcacgatatgctttcctggaggaggaagacgcaaagttggcgagcaaatcccaaccgccaaaggccaaggaaaaggcgcggggagattatcaagaaccgcgtcaacactatgacccaaaggcaaacaagcgaggaacgatcgtcgccgcagtcgattcggaagaccgacctcaacagccggcggaggacattccactgaagagtgtaaacatcttctgaatatcctcggaaaatataaatccggcgaagtagaggcggtctaccatcccaagaatgggaaaaataaacgcaagagcggctccaaacagtcccaggcgggaccaacgcatgaagaacaacacgtggatcaccgactgctcctcgaggacgatcgtgtggaggaggcgagggtcccggagaacgaactccccggtcccccgaagagatggagaggacagcaaccgcagcgagctccagaccatccccgcggaaggatctccatgattatggccggactatctgacgatgaggattcagtctcggctttaaagaagcgagctcgacaagtatgcagcgttagggttgccccagaagccgagccattaagccaggaacccatcatctttacttcggaggatgcgagcgggattcagcatcctcataacgatgcattggtcatcaaactggtaatggaggacttcgacgtagaacgaatcctaatcgataccggcagctcggtcaatctgatgttcctgaagaccctttttaaaatgggaatctctgaaagcaaaataatgcctaagatccgccctatgacgggatacgacggcgaggcaaaaatgtcaataggagagatcaaactccaggtccaagtgggcggcatcacacaaaagaccaagttcgtcgtcatcgactcggaaccaatctacaatgccattctggggagtccttggatctattcgatgaaggcgatcccctcgacgtaccacctttgcttgaagttcccgataaacacaggaatcttcatactatacggcaaccagaaggtctcacggacatgttacgtgatcgagaagaagcagcgaaagaaggaaatcttatagcaattaaaggacgaagagcgagctgcaccgtcggagcgaccagctcgcgagtcaatgaaggcgccaagttgcaagattatccaggtcaacatcgacgagtcggatccatctcggacggttggtatcggaagcgaactaggagagaaaggaagagctgatcgccttcttgaaatcgaggtcgtcatcttttgcttggtctacgaaagatatgacaggaaacgctccggaggtaacctgtcataagctcaacacggatccaaccttcgaaccagttcgcaacaagcgaaggcgcctggggtcagaccgcgccaaagctgtccaagacgaggtcgagcgccaaagcaatcagagttcggaagtactgcagctcgcggcattgatccccatgcagaaatccgacctgagcaatcaaagcaacgaaattcttaaaaatcatcccgatatcgaaaacacgaaccaaagcaatccttacctggttaacaaagttctgacactccgtggtatcagcatcagtagcggctggcccaagatagaacagagaaggcgtcctgggaatgaagtccccatcagcaatgattgttggattcttctcctttgaggcggcagcagcatctcgatcacagtcctcacaatatgacaaaagaatgtccggcatcggagccagaagctgaaaaccattcttgagccaatggcgaggatgcgactctctctagcatagccatttttcgagcgatatcagactttcgttcgtcatagtacctcaacatctcgcggtattccttatgtcttgactcgacacatgacaagaaaccctcggcttcacgtctttccttcgagctcgcctggaaaagaagagtccagggaactcgaaggttattgaagaacggcatcccacgttcaatcgcctcagcattcgagaaagtcggaacatttttgccaacaaaggaagacgatccagcactctccatcttgcaaataggaggaaaagtccggtgaagcaattgttgatcaacaaagaagtatttatagaagcaaatacagaaatcgaattgggaattttcttaaatgcgatctggaaattctctttccttttccgagaaacactaatatttgcattttctccaaaactgggaaaatgggaatttacttgattacgggttgacttccctcaatttccttttccaaaaaaatgacaaagctcataaatggaaaacatagagaaaatactattctgcctcggaaacaggcaagatggaaaatcatcgaaaatagaagttaaaagtaaaacaccgccccgaaagtgggtccacggttaaatatgagttttgaaatcgccccgaaagttgggtccacgatcgatgtatcaaaataaattacaaagacgatctgaatcccctcaatttccttttccaaaaaaatgacaaagctcataaatggaaaacatagagaaaatactattctgcctcggaaacaggcaagatggaaaatcatcgaaaatagaagttaaaagtaaaacaccgccccgaaagtgggtccacggttaaatatgagttttgaaatcgccccgaaagttgggtccacgatcgatgtatcaaaataaattacaaagacgacctattcagatcgtctggctcgcctcttcatcgcttacacgtcgaatatcactaccgcaaacaaggtcgacattcgagccgtgctggtccgccactggagcaacttgagaggtttgcctcgaaaaaccaagctgatctggagacatgttcaggtcttcatccccaagctcgatgacgttcaaagcattgacttcgtcggacgcccttttggttaactccttaaggctgctgagttcggatgccgcaatcttcgcgcctctctgcatcagaatacctactatctcctcagcacctttggcctgattctcagcatccacctttggcccgacaaggtcctcttgctccttgagataagcctttactctatcaagacgagcttgggctttctttgtagtacgggtgaccttagaagctcgatcattccgcagtctgttgcactcccgctccccgtgctccttcgcagcaaccaacgcgacttgaagatcgctgatctctttctgaagagcagcttctcgaccattgagcctgttgacctcgtcgttcaacgagctcatctccgccttgtgtggctccggagatcgcccgctcacttacatgattcccggagaaaatgagcgtccatggaatccccctcgagggtacgtctgtatgtatgaagcctacttcagacaatgtcacctctggtttccaattccgtctctgatcatctcctttctgagtcgccgtcatatggcgttcccccagcttactccggcggcgatctgcaattttgttgccgctctgacctttggcgctgaagaaggttacctggtaaacgttcgttgttttgaggaaatgacgacgttgaaagctatcaggtcgcccggctattgggtggtgaacaaccgcccaaagcataactttcttcccggtcccaaagtcagtaacttcaagaactgggaagaatattacttctacgtcaggtccgacctcgaatcgtatgagcgtccgttctcggggaggaaaaggatgtggacggagtttcctggtagatttcttttaaatagatagggtaaagacatgtcgatccgtactagattctcatagccgtttcttttgttgcagatcggtacaggcctagtccggagtttcccgttgagttcgaaggagttttagaggcaatctaccgagctcgacatcacgaggtcgcgcgtcaacaggataatggggaaggtccggaaatccttcattagctttgctgccgggcttttaaatatgccacctcccccagctcccatcgaagagactcggcctttggacggagaggcggctacgtcaaatcctcccattaatgccggcccttccggtgttgatcaggtctcccgtgagacggtcaatccggattctcaagacaggatgtgttttgaaggggccggcgtcgttccagctcaagagatcgccaagtgcgatcaaaatcaatctgttcaggtcgtcgaacctgaagttcaaagtgttaccggcgaccgctccgtcgtcgtttatgccgccgcgtcagcgagcgaagaggtcaacgcgggcctaactatccttgatcaagacaaggatgaaaccgttgcggagctcgggatttccaggaggtcccgtgaggagaaagggaaacgagtggctacccaatccaagaagaggtcagcttctgaagccggtttagatgaaactgctgctccgaaaacattccgcctgtcgcgaggtgagactctcaactccgaccagtttacgttcaagtattctggcgagaaattccttgagagagatcaggaggccgccagtcatctttggcgtaatttgatgctccccgggacgaaagattttcctaatcccgacgacggcccttccggtgttgatcaggtctcccatgagacggtcaatccggattctcaagacaggctgtgtcttgaaggggacggcgtcgttccagctcaagagatcgccgagggcgatctaaatcaatctgttcaggtcgtcgaacctgaagttcaaagtgttagcggcgaccgctccgtcgtcgtttatgccgccgcgccagcgagcgaagaggtcaacgcgggcctaactatccttgatctagacaaggatgaaaccgttgcggagctcgggatttccaggaggtcccgtgagggaagtcaacccgtaatcaagtaaattcccattttcccagttttggagaaaatgcaaatattagtgtttctcggaaaaggaaaatgagaatttccagatcgcatctgcagacgagcagttagctaggcgaagtgcagacgagctgggagctaggaaagctacagtcgaactgggagctaggaaggtcggttgacttatgtcgaccactcttatctttcagacttttatatttgaataaaatgtttgtccttaagaacaagttcatgttttttttttttttgtgaacctccgtcggttgattacgtattaaccatatcggattcccaatcttgaaattaggttttaaatcgactaaattataagccatctgcaagctttgagctcggctttcgaccgattttttctgtctaagttcgggttagatgttaagtgcgagactgagctcggctttataaataaaagtattcggcgtgtactgggcgagagacgtctctcggcttatgcccagtaggcctatgtataatttaaagaggcggactcagcatattagttgtggagcgagatgctgggctcggcttactccccgtagagcatctgttcggcagatcgcgaaatacagggttcggcttatatttctgtccgaaccagagcttaagtgcgagaaaactggtctcggctatccctattagaaaaattaagtttctaatagggcgtggattatttcaccactgcatccatgtgagacgcgcatcgaacacctggccagggtgccgagagttgatttattacagatcttaaagcgaattccgtattgagaatgcaaactttaattttattaagtggtatagctgcatccttacgaaggattgcctagttagggatcaagccattcatagttcgagttctaatggagaggtcggattaccgagctcgtgtttttttttttttttttttttttttttgcatagacgagtgtttcgaaaatctatgcaaaaaaatacagataatgcatgtatatgattgagtgatgtttgttagattataatcgataacacttatctcagcggtttggagatggagatgatgacatcaacgatatggacgatctgaatatccgaaattgtaaacgtcgatggatgaaaatctacatttgagatgttcgttagagaagatctcatctttgcgtagaaagagaaaagcaatgatgaaagctagtgatataagcgaaaatgtcaatcaagcttaactaatatgtaagaaagtaattgaacttatcttttatgtgggaggtcgtcgagacggagacagaattggagatcgcatcattgatgaatgagtggaagccttgagcgattgctagtgatgatccattgtctgtacttccttttgctgatttgtagaagaactgataacttccgtttgaaccgttaaattattgatcccaccgttgaatctttagctgatagtcgcacgaagattttgtccgaattttagtcagatcggatattgcctgaggcttctaccgtcttatgaagttgctgtgacagtttatttttcttcctttggctgattcggagatgcattaataactttattctgaaccgttgatttctcgatcccaccgttgaatcattatctagtagcgtcaagaatcactgtaaatttatagcttgatcggacgtcgtatgtatcttccatgatcctctgaagtcgctacgacaaagtcgttttttcttgatttctgcagtttggatgattctgggccaactttgaaggtgatttgcagatggagattaacacgaattggtaatccgcttacgggaaatgattccttgtagtgagatcttcgctaagagtacttagttagaccttaggtctttctgatgcgtcgggaaaatgtctcgcaaaagctctagttgcacatcaaattttgtttcagactaggcacattgaggactattccaattgtttcttgtacaggaagcaagatgaataacttcttgatcttgagtccgtttgacgaacagtcaggtgtggtggactatcggattgatagtggtcacgttggagcctttgtatcgggttttcgaccttatctccggcgccggagagcttctcaacctaccatctccactctgcttttaaattccttcctttgctatatttgtttttggtttcggttgctccggtagcaacatacgatcctcagtgaatataggaggcagtatccagtgatgcttactctttggctgacttctggtgatctttcttctttacttctctttcctttgaattttcattacacgacatgattttgtgagatctgaacaacgtcttgtgattaaggaagataaagcagaagctctccaaggcgaggaagggacgatttttcttagatatatgttgcgttctatgcctctgacacatggtccgtggtgatgaggcgtggcgatgacgtgaagctttttaaattgaagaccatcggtgacgaggtgaagacgtgaagcctaagatgggaatgttggtggaatcgtcctggaaacgacgatggacgtaaaatcggtcacaaaggtggctgatctgatagccgcagacatgcatctttgggctacagccaggacgtgcttgtcgcagaaaaacagtaataactcttgttaaacgtaatcaattgaggcaaggatgaatccgttagaaagataagccttgtagcttcaaaatgatgtgcagatcggctcctggttccttttagatcgccgggaaatcgatctgaaagcagacagatcgggtgtagacggatctgtgtctcgataaacaacgcatgcttgagagagaaacctataactctcggaagacagcaccaaatggagcaaaatcgatcttgttggaaagataagcctcagagcttcatgatgatattaagatgggctcttgatgttttctgaatcgttgggagtttgctttctaagccacagttcgaatctgcgatttgacaggtgtcatatgtttcattgaaacagtgataacgcttagtaaacagctcggaattggatgaggtcggtctctattgaaagataagcctcggggctcagttgacacttagatcgcctcgtgatgccttttagatcgccgggaatttgattccgaggtcaacagatcggatatagctcgatctgtattttatcagtcttctgcagataaacggcagtatctccgagaaaacagaccctaacgaagtgagctggggcttgttaaaaagaggagcctcagcctatgcaatgtgcttttcaagatcatcactaagacgatggtagagcgtctgaaacctttaatgacaaatctgattggtccggctcaagctagttttatccccgggagagtaagtacggataatatagtgttcgttcaagaagcagtccattccatgagaagaaaaaaaggggtaaagggctggatgcttttgaagttggatttggagaaggcttatgataggatccgatgggattatctggaggatacacttatttctgcggggttccccgaagtttgggtaagatggataatgtgctgtgtgtcgggcccggagatgagtttgttgtggaatggagagagaacagactccttcaagccgttacaaggtcgacattcgagccgtgctggtccgtcactggagcaacttgagaggtttgcctcgaaaaaccaagctgatctggagacatgttcaggtcttcatccccaagctcgatgacgttcaaagcattgacttcgtcggacgcccttttggttaactccttaaggctgctgagttcggatgccgcaatcttcgcgcctctctgcatcagaatacctactatctcctcagcacctttggcctgattctcagcatccacctttggcccgacgaggtcctcttgctccttgagataagcctttactctatcaagacgagcttgggctttctttgtagtacgggcgaccttagaagctcgatcattccgcagtctgttgcactcccgctccccgtgctccttcgcagcaaccaacgcgacttgaagatcgctgatctctttctgaagagcagcttccggagatcgcccggagcacgtttggtgcaaggagggttgctcctgaagtgggtcgtgcggatgcttctaaacgaccgcgggtaagcgaccatagatggggctttcgttacgacgatatggctgctccctttacttctaattctgttgcttgtgctgagcttcttcgtgaaattggtcgtggctcgggtattccttcgatgcccttagacttgaaggaggagaaagttttcgccggagcggccaggaagtcgatcgaggtatgctcaccttctgggtttgattccaattttttctttgaattgcattcgcttgacacgctctttgtccaggcgatcgccgaatgggatcgtttgacttatttgtacgagcgttgtgttcggagcctttccgtagaggctactaacgcgaaagatgcccatgaggctttggccgttgaaaaggaaaaagtagctcaggcgctggccgacctggcaaggtctcaagacgacgccaaggagatgaagaggaaatatgacgagttagctggtcgcgctctttcggagatgaagaggcttcgagaacgtcgacttgaatatgctgaatttgtccggagatcggcccttgataagatggcggagctcgttcagaagcgattggatcgtattaaagctcatattgacgatacgaaggcggcagaaccaaagtttcttgaattcaaccaagtatctgggaatatcaagactctcgaggcgttggtcgaaggtggcgaagtggagatgaagtcggatgacagatgttaagattggtagcggatgcagaggaattggaggccgaggtgaaagcttttggtatcaccgatcttatggacggcgacttcgatgttcgtactttatttgccgagctgagtcctgataatcgtaattccgttccaccgccgactgaaggggaagatctcgcggatggacgaggtgagtgcgaaggccaagctggtgaaagaatcgttggtcaaactgaagttcgagacgagatcgcggatgctagagactgatattccaggaggctaagccaaagggaagaagcggagctcagatgcctaaagagatcccaatatggcaaaacaaaaaatattctaaaaactgaataatcaacgaattttatattatgtgaccaaaaaatgaaaacagaaactatgtaacaatcatcaaatacagtgttttcagcatttatttttttctaaattttccagcaacatacaaacataacgttactactagacataaaaatactccctctgttccaagttatttgatggtttggatttttttatttgttccataagattgatgttttgtaaaaattaaatatgattattaatcttgtttgttgccaatagtgaaaggagagaggtaatagtaatattattaaactattaaaatagtaattaaaattaaatagaaaagttactttttcttaatttatgtgcgaaacttaaaacatcaaacttacagagagagtaatatataacatgatatgagatgaaactgtacggtgtcgttgcataattacataaactagttataaactcacacactgccttcatttcaggtcgagacagaacttattgtgtgatttaaatcagacaaaccttcgaactttgactttttcatcgcctcctgtcccttcgccgcaaaatactagtctaaacgctcaactcctctctcctgtcttataaacttttttttttagaaaatgagatgatcaatcgaattttgttgtgtgtgacctcaaactgacaacttccagtaattgtaatattaccaattttttttatcaaaaagatgaacttcactttagagcaatagcaatccctcgagtctcccctatataaagattccaactccttaacgattcatctaatgaaaaaacacacacaccaaaaatatcagatatctcaaacaatgtcttcagtttttggatctgtccatatcttggccatgatagccatacaactcctccttacacacagtgtttcatctctgaaccttaccaatgcgtatctgcaccacaaatgcagcaacactcaaggaaaatataagcaggggagcgcgttcgagaaaaatctcaacttagtcctcagtaccatcacctcgattggaaattttcgtgacggtttccgctacaccgaagaaggtgaggatcccaataacgtctttgtcatgttccagtgtcgcggcgactcctactggtccaagtgccccccttgcattagcaccgccgtctctggggtaattgtgacttcaatattataaattagcagtcatatagttacatgtaaaaattacgatgagcacacacgtcggttaattttttctgtcaaatcttaaatatgtgggcaatgatcctgatactttatataaatgattgaattgagacaaaactgatagacattaaaggctagttaaaaaatactgattaaacaatgcaatattgttcttgatatatatatgtacgtatatgtatgtgacagcttcgtaggagatgtccaagaaataagggagcaataatatggtatgaccaatgtcttttaaagatatcttcagttgcctccttcaataagatagattatgagaacgatttctatttgtccaacccaaacaacatgagtgatcgggggttgttcaacaaggagacgtcggctctcctggagaagctggcatataaagcctccgatagaaacaacttggatggtaaacaattggtgttgtacgcagcaggggagaagagaattgggacaaagaaggtgtatgcaatggtgcagtgtacgaaagacttaatatttacaaagtgctttgagtgtttggaagggattttgaggaagtttccacagtgttgtgacggtaaacgaggagggagagttttcggtacgagctgtaactttaggtatgagttatatccttttcttagaaactaacagcaacaacagtacaatgagagctccatattaaatgaaagggttctagagataaacagtcttataatatacactgtgttgcattttagtacgtgaacttgagcgaataaatgtactttcctctttgtgatttttgttttttttttgtgaacttgagttattaagaggaaatcttcaagtaaagaatttatctaatagtatatacatcccacatagaataccaaatagctcagctcatacaaactctctcataatgagagaaaaaaatcctgaaataagggtaagaaaaactcttatgcctcaaggttttagtaaatctcataattttggccgaaccacaaaaagagacgtgcgaaacaaaatagtagaaaattgatttcccgaatcgacaaacatggactaaactatatgtatgatacataactggtcgtacttacaatgatgatacttggtttcacgaagacgagggagcctggagatgaatgatggtgataaggccatgtgtcatcaccaaaaggagggttgctcctgaagttttcgccggagcggccaggaagtcgatcgaggtatgctcaccttctgggtttgattccaattttttctttgaattgcattcgcttgacacgctctttgtccaggcgatcgccgaatgggatcgtttgacttatttgtacgagcgttgtgttcggagcctttccgtagaggctactaacgcgaaagatgcccatgaggctttggccgttgaaaaggaaaaagtagctcaggcgctggccgacctggcaaggtctcaagacgacgccaaggagatgaagaggaaatatgacgagttagctggtcgcgctctttcggagatgaagaggcttcgagaacgtcgacttgaatatgctgaatttgtccggagatcggcccttgataagatggcggagctcgttcagaagcgattggatcgtattaaagctcatattgacgatacgaaggcggcagaaccaaagtttcttgaattcaaccaagtatctgggaatatcaagactctcgaggcgttggtcgaaggtggcgaagtggagatgaagtcggatgacagatgttaagattggtagcggatgcagaggaattggaggccgaggtgaaagcttttggtatcaccgatcttatggacggcgacttcgatgttcgtactttatttgccgagctgagtcctgataatcgtaattccgttccaccgccgactgaaggggaagatctcgcggatggacgaggtgagtgcgaaggccaagctggtgaaagaatcgttggtcaaactgaagttcgagacgagatcgcggatgctagagactgatattccaggaggctaagccaaagggaagaagcggagctcagatgcctaaagagatcccaatatggcaaaacaaaaaatattctaaaaactgaataatcaacgaattttatattatgtgaccaaaaaatgaaaacagaaactatgtaacaatcatcaaatacagtgttttcagcatttatttttttctaaattttccagcaacatacaaacataacgttactactagacataaaaatactccctctgttccaagttatttgatggtttggatttttttatttgttccataagattgatgttttgtaaaaattaaatatgattattaatcttgtttgttgccaatagtgaaaggagagaggtaatagtaatattattaaactattaaaatagtaattaaaattaaatagaaaagttactttttcttaatttatgtgcgaaacttaaaacatcaaacttacagagagagtaatatataacatgatatgagatgaaactgtacggtgtcgttgcataattacataaactagttataaactcacacactgccttcatttcaggtcgagacagaacttattgtgtgatttaaatcagacaaaccttcgaactttgactttttcatcgcctcctgtcccttcgccgcaaaatactagtctaaacgctcaactcctctctcctgtcttataaacttttttttttagaaaatgagatgatcaatcgaattttgttgtgtgtgacctcaaactgacaacttccagtaattgtaatattaccaattttttttatcaaaaagatgaacttcactttagagcaatagcaatccctcgagtctcccctatataaagattccaactccttaacgattcatctaatgaaaaaacacacacaccaaaaatatcagatatctcaaacaatgtcttcagtttttggatctgtccatatcttggccatgatagccatacaactcctccttacacacagtgtttcatctctgaaccttaccaatgcgtatctgcaccacaaatgcagcaacactcaaggaaaatataagcaggggagcgcgttcgagaaaaatctcaacttagtcctcagtaccatcacctcgattggaaattttcgtgacggtttccgctacaccgaagaaggtgaggatcccaataacgtctttgtcatgttccagtgtcgcggcgactcctactggtccaagtgccccccttgcattagcaccgccgtctctggggtaattgtgacttcaatattataaattagcagtcatatagttacatgtaaaaattacgatgagcacacacgtcggttaattttttctgtcaaatcttaaatatgtgggcaatgatcctgatactttatataaatgattgaattgagacaaaactgatagacattaaaggctagttaaaaaatactgattaaacaatgcaatattgttcttgatatatatatgtacgtatatgtatgtgacagcttcgtaggagatgtccaagaaataagggagcaataatatggtatgaccaatgtcttttaaagatatcttcagttgcctccttcaataagatagattatgagaacgatttctatttgtccaacccaaacaacatgagtgatcgggggttgttcaacaaggagacgtcggctctcctggagaagctggcatataaagcctccgatagaaacaacttggatggtaaacaattggtgttgtacgcagcaggggagaagagaattgggacaaagaaggtgtatgcaatggtgcagtgtacgaaagacttaatatttacaaagtgctttgagtgtttggaagggattttgaggaagtttccacagtgttgtgacggtaaacgaggagggagagttttcggtacgagctgtaactttaggtatgagttatatccttttcttagaaactaacagcaacaacagtacaatgagagctccatattaaatgaaagggttctagagataaacagtcttataatatacactgtgttgcattttagtacgtgaacttgagcgaataaatgtactttcctctttgtgatttttgttttttttttgtgaacttgagttattaagaggaaatcttcaagtaaagaatttatctaatagtatatacatcccacatagaataccaaatagctcagctcatacaaactctctcataatgagagaaaaaaatcctgaaataagggtaagaaaaactcttatgcctcaaggttttagtaaatctcataattttggccgaaccacaaaaagagacgtgcgaaacaaaatagtagaaaattgatttcccgaatcgacaaacatggactaaactatatgtatgatacataactggtcgtacttacaatgatgatacttggtttcacgaagacgagggagcctggagatgaatgatggtgataaggccatgtgtcatcaccaaaaggagggttgctcctgaagttttcgccggagcggccaggaagtcgatcgaggtatgctcaccttctgggtttgattccaattttttctttgaattgcattcgcttgacacgctctttgtccaggcgatcgccgaatgggatcgtttgacttatttgtacgagcgttgtgttcggagcctttccgtagaggctactaacgcgaaagatgcccatgaggctttggccgttgaaaaggaaaaagtagctcaggcgctggccgacctggcaaggtctcaagacgacgccaaggagatgaagaggaaatatgacgagttagctggtcgcgctctttcggagatgaagaggcttcgagaacgtcgacttgaatatgctgaatttgtccggagatcggcccttgataagatggcggagctcgttcagaagcgattggatcgtattaaagctcatattgacgatacgaaggcggcagaaccaaagtttcttgaattcaaccaagtatctgggaatatcaagactctcgaggcgttggtcgaaggtggcgaagtggagatgaagtcggatgacagatgttaagattggtagcggatgcagaggaattggaggccgaggtgaaagcttttggtatcaccgatcttatggacggcgacttcgatgttcgtactttatttgccgagctgagtcctgataatcgtaattccgttccaccgccgactgaaggggaagatctcgcggatggacgaggtgagtgcgaaggccaagctggtgaaagaatcgttggtcaaactgaagttcgagacgagatcgcggatgctagagactgatattccaggaggctaagccaaagggaagaagcggagctcagatgcctaaagagatcccaatatggcaaaacaaaaaatattctaaaaactgaataatcaacgaattttatattatgtgaccaaaaaatgaaaacagaaactatgtaacaatcatcaaatacagtgttttcagcatttatttttttctaaattttccagcaacatacaaacataacgttactactagacataaaaatactccctctgttccaagttatttgatggtttggatttttttatttgttccataagattgatgttttgtaaaaattaaatatgattattaatcttgtttgttgccaatagtgaaaggagagaggtaatagtaatattattaaactattaaaatagtaattaaaattaaatagaaaagttactttttcttaatttatgtgcgaaacttaaaacatcaaacttacagagagagtaatatataacatgatatgagatgaaactgtacggtgtcgttgcataattacataaactagttataaactcacacactgccttcatttcaggtcgagacagaacttattgtgtgatttaaatcagacaaaccttcgaactttgactttttcatcgcctcctgtcccttcgccgcaaaatactagtctaaacgctcaactcctctctcctgtcttataaacttttttttttagaaaatgagatgatcaatcgaattttgttgtgtgtgacctcaaactgacaacttccagtaattgtaatattaccaattttttttatcaaaaagatgaacttcactttagagcaatagcaatccctcgagtctcccctatataaagattccaactccttaacgattcatctaatgaaaaaacacacacaccaaaaatatcagatatctcaaacaatgtcttcagtttttggatctgtccatatcttggccatgatagccatacaactcctccttacacacagtgtttcatctctgaaccttaccaatgcgtatctgcaccacaaatgcagcaacactcaaggaaaatataagcaggggagcgcgttcgagaaaaatctcaacttagtcctcagtaccatcacctcgattggaaattttcgtgacggtttccgctacaccgaagaaggtgaggatcccaataacgtctttgtcatgttccagtgtcgcggcgactcctactggtccaagtgccccccttgcattagcaccgccgtctctggggtaattgtgacttcaatattataaattagcagtcatatagttacatgtaaaaattacgatgagcacacacgtcggttaattttttctgtcaaatcttaaatatgtgggcaatgatcctgatactttatataaatgattgaattgagacaaaactgatagacattaaaggctagttaaaaaatactgattaaacaatgcaatattgttcttgatatatatatgtacgtatatgtatgtgacagcttcgtaggagatgtccaagaaataagggagcaataatatggtatgaccaatgtcttttaaagatatcttcagttgcctccttcaataagatagattatgagaacgatttctatttgtccaacccaaacaacatgagtgatcgggggttgttcaacaaggagacgtcggctctcctggagaagctggcatataaagcctccgatagaaacaacttggatggtaaacaattggtgttgtacgcagcaggggagaagagaattgggacaaagaaggtgtatgcaatggtgcagtgtacgaaagacttaatatttacaaagtgctttgagtgtttggaagggattttgaggaagtttccacagtgttgtgacggtaaacgaggagggagagttttcggtacgagctgtaactttaggtatgagttatatccttttcttagaaactaacagcaacaacagtacaatgagagctccatattaaatgaaagggttctagagataaacagtcttataatatacactgtgttgcattttagtacgtgaacttgagcgaataaatgtactttcctctttgtgatttttgttttttttttgtgaacttgagttattaagaggaaatcttcaagtaaagaatttatctaatagtatatacatcccacatagaataccaaatagctcagctcatacaaactctctcataatgagagaaaaaaatcctgaaataagggtaagaaaaactcttatgcctcaaggttttagtaaatctcataattttggccgaaccacaaaaagagacgtgcgaaacaaaatagtagaaaattgatttcccgaatcgacaaacatggactaaactatatgtatgatacataactggtcgtacttacaatgatgatacttggtttcacgaagacgagggagcctggagatgaatgatggtgataaggccatgtgtcatcaccaaaaggagggttgctcctgaagttttcgccggagcggccaggaagtcgatcgaggtatgctcaccttctgggtttgattccaattttttctttgaattgcattcgcttgacacgctctttgtccaggcgatcgccgaatgggatcgtttgacttatttgtacgagcgttgtgttcggagcctttccgtagaggctactaacgcgaaagatgcccatgaggctttggccgttgaaaaggaaaaagtagctcaggcgctggccgacctggcaaggtctcaagacgacgccaaggagatgaagaggaaatatgacgagttagctggtcgcgctctttcggagatgaagaggcttcgagaacgtcgacttgaatatgctgaatttgtccggagatcggcccttgataagatggcggagctcgttcagaagcgattggatcgtattaaagctcatattgacgatacgaaggcggcagaaccaaagtttcttgaattcaaccaagtatctgggaatatcaagactctcgaggcgttggtcgaaggtggcgaagtggagatgaagtcggatgacagatgttaagattggtagcggatgcagaggaattggaggccgaggtgaaagcttttggtatcaccgatcttatggacggcgacttcgatgttcgtactttatttgccgagctgagtcctgataatcgtaattccgttccaccgccgactgaaggggaagatctcgcggatggacgaggtgagtgcgaaggccaagctggtgaaagaatcgttggtcaaactgaagttcgagacgagatcgcggatgctagagactgatattccaggaggctaagccaaagggaagaagcggagctcagatgcctaaagagatcccaatatggcaaaacaaaaaatattctaaaaactgaataatcaacgaattttatattatgtgaccaaaaaatgaaaacagaaactatgtaacaatcatcaaatacagtgttttcagcatttatttttttctaaattttccagcaacatacaaacataacgttactactagacataaaaatactccctctgttccaagttatttgatggtttggatttttttatttgttccataagattgatgttttgtaaaaattaaatatgattattaatcttgtttgttgccaatagtgaaaggagagaggtaatagtaatattattaaactattaaaatagtaattaaaattaaatagaaaagttactttttcttaatttatgtgcgaaacttaaaacatcaaacttacagagagagtaatatataacatgatatgagatgaaactgtacggtgtcgttgcataattacataaactagttataaactcacacactgccttcatttcaggtcgagacagaacttattgtgtgatttaaatcagacaaaccttcgaactttgactttttcatcgcctcctgtcccttcgccgcaaaatactagtctaaacgctcaactcctctctcctgtcttataaacttttttttttagaaaatgagatgatcaatcgaattttgttgtgtgtgacctcaaactgacaacttccagtaattgtaatattaccaattttttttatcaaaaagatgaacttcactttagagcaatagcaatccctcgagtctcccctatataaagattccaactccttaacgattcatctaatgaaaaaacacacacaccaaaaatatcagatatctcaaacaatgtcttcagtttttggatctgtccatatcttggccatgatagccatacaactcctccttacacacagtgtttcatctctgaaccttaccaatgcgtatctgcaccacaaatgcagcaacactcaaggaaaatataagcaggggagcgcgttcgagaaaaatctcaacttagtcctcagtaccatcacctcgattggaaattttcgtgacggtttccgctacaccgaagaaggtgaggatcccaataacgtctttgtcatgttccagtgtcgcggcgactcctactggtccaagtgccccccttgcattagcaccgccgtctctggggtaattgtgacttcaatattataaattagcagtcatatagttacatgtaaaaattacgatgagcacacacgtcggttaattttttctgtcaaatcttaaatatgtgggcaatgatcctgatactttatataaatgattgaattgagacaaaactgatagacattaaaggctagttaaaaaatactgattaaacaatgcaatattgttcttgatatatatatgtacgtatatgtatgtgacagcttcgtaggagatgtccaagaaataagggagcaataatatggtatgaccaatgtcttttaaagatatcttcagttgcctccttcaataagatagattatgagaacgatttctatttgtccaacccaaacaacatgagtgatcgggggttgttcaacaaggagacgtcggctctcctggagaagctggcatataaagcctccgatagaaacaacttggatggtaaacaattggtgttgtacgcagcaggggagaagagaattgggacaaagaaggtgtatgcaatggtgcagtgtacgaaagacttaatatttacaaagtgctttgagtgtttggaagggattttgaggaagtttccacagtgttgtgacggtaaacgaggagggagagttttcggtacgagctgtaactttaggtatgagttatatccttttcttagaaactaacagcaacaacagtacaatgagagctccatattaaatgaaagggttctagagataaacagtcttataatatacactgtgttgcattttagtacgtgaacttgagcgaataaatgtactttcctctttgtgatttttgttttttttttgtgaacttgagttattaagaggaaatcttcaagtaaagaatttatctaatagtatatacatcccacatagaataccaaatagctcagctcatacaaactctctcataatgagagaaaaaaatcctgaaataagggtaagaaaaactcttatgcctcaaggttttagtaaatctcataattttggccgaaccacaaaaagagacgtgcgaaacaaaatagtagaaaattgatttcccgaatcgacaaacatggactaaactatatgtatgatacataactggtcgtacttacaatgatgatacttggtttcacgaagacgagggagcctggagatgaatgatggtgataaggccatgtgtcatcaccaaaaggagggttgctcctgaagttttcgccggagcggccaggaagtcgatcgaggtatgctcaccttctgggtttgattccaattttttctttgaattgcattcgcttgacacgctctttgtccaggcgatcgccgaatgggatcgtttgacttatttgtacgagcgttgtgttcggagcctttccgtagaggctactaacgcgaaagatgcccatgaggctttggccgttgaaaaggaaaaagtagctcaggcgctggccgacctggcaaggtctcaagacgacgccaaggagatgaagaggaaatatgacgagttagctggtcgcgctctttcggagatgaagaggcttcgagaacgtcgacttgaatatgctgaatttgtccggagatcggcccttgataagatggcggagctcgttcagaagcgattggatcgtattaaagctcatattgacgatacgaaggcggcagaaccaaagtttcttgaattcaaccaagtatctgggaatatcaagactctcgaggcgttggtcgaaggtggcgaagtggagatgaagtcggatgacagatgttaagattggtagcggatgcagaggaattggaggccgaggtgaaagcttttggtatcaccgatcttatggacggcgacttcgatgttcgtactttatttgccgagctgagtcctgataatcgtaattccgttccaccgccgactgaaggggaagatctcgcggatggacgaggtgagtgcgaaggccaagctggtgaaagaatcgttggtcaaactgaagttcgagacgagatcgcggatgctagagactgatattccaggaggctaagccaaagggaagaagcggagctcagatgcctaaagagatcccaatatggcaaaacaaaaaatattctaaaaactgaataatcaacgaattttatattatgtgaccaaaaaatgaaaacagaaactatgtaacaatcatcaaatacagtgttttcagcatttatttttttctaaattttccagcaacatacaaacataacgttactactagacataaaaatactccctctgttccaagttatttgatggtttggatttttttatttgttccataagattgatgttttgtaaaaattaaatatgattattaatcttgtttgttgccaatagtgaaaggagagaggtaatagtaatattattaaactattaaaatagtaattaaaattaaatagaaaagttactttttcttaatttatgtgcgaaacttaaaacatcaaacttacagagagagtaatatataacatgatatgagatgaaactgtacggtgtcgttgcataattacataaactagttataaactcacacactgccttcatttcaggtcgagacagaacttattgtgtgatttaaatcagacaaaccttcgaactttgactttttcatcgcctcctgtcccttcgccgcaaaatactagtctaaacgctcaactcctctctcctgtcttataaacttttttttttagaaaatgagatgatcaatcgaattttgttgtgtgtgacctcaaactgacaacttccagtaattgtaatattaccaattttttttatcaaaaagatgaacttcactttagagcaatagcaatccctcgagtctcccctatataaagattccaactccttaacgattcatctaatgaaaaaacacacacaccaaaaatatcagatatctcaaacaatgtcttcagtttttggatctgtccatatcttggccatgatagccatacaactcctccttacacacagtgtttcatctctgaaccttaccaatgcgtatctgcaccacaaatgcagcaacactcaaggaaaatataagcaggggagcgcgttcgagaaaaatctcaacttagtcctcagtaccatcacctcgattggaaattttcgtgacggtttccgctacaccgaagaaggtgaggatcccaataacgtctttgtcatgttccagtgtcgcggcgactcctactggtccaagtgccccccttgcattagcaccgccgtctctggggtaattgtgacttcaatattataaattagcagtcatatagttacatgtaaaaattacgatgagcacacacgtcggttaattttttctgtcaaatcttaaatatgtgggcaatgatcctgatactttatataaatgattgaattgagacaaaactgatagacattaaaggctagttaaaaaatactgattaaacaatgcaatattgttcttgatatatatatgtacgtatatgtatgtgacagcttcgtaggagatgtccaagaaataagggagcaataatatggtatgaccaatgtcttttaaagatatcttcagttgcctccttcaataagatagattatgagaacgatttctatttgtccaacccaaacaacatgagtgatcgggggttgttcaacaaggagacgtcggctctcctggagaagctggcatataaagcctccgatagaaacaacttggatggtaaacaattggtgttgtacgcagcaggggagaagagaattgggacaaagaaggtgtatgcaatggtgcagtgtacgaaagacttaatatttacaaagtgctttgagtgtttggaagggattttgaggaagtttccacagtgttgtgacggtaaacgaggagggagagttttcggtacgagctgtaactttaggtatgagttatatccttttcttagaaactaacagcaacaacagtacaatgagagctccatattaaatgaaagggttctagagataaacagtcttataatatacactgtgttgcattttagtacgtgaacttgagcgaataaatgtactttcctctttgtgatttttgttttttttttgtgaacttgagttattaagaggaaatcttcaagtaaagaatttatctaatagtatatacatcccacatagaataccaaatagctcagctcatacaaactctctcataatgagagaaaaaaatcctgaaataagggtaagaaaaactcttatgcctcaaggttttagtaaatctcataattttggccgaaccacaaaaagagacgtgcgaaacaaaatagtagaaaattgatttcccgaatcgacaaacatggactaaactatatgtatgatacataactggtcgtacttacaatgatgatacttggtttcacgaagacgagggagcctggagatgaatgatggtgataaggccatgtgtcatcaccaaaaggagggttgctcctgaagttttcgccggagcggccaggaagtcgatcgaggtatgctcaccttctgggtttgattccaattttttctttgaattgcattcgcttgacacgctctttgtccaggcgatcgccgaatgggatcgtttgacttatttgtacgagcgttgtgttcggagcctttccgtagaggctactaacgcgaaagatgcccatgaggctttggccgttgaaaaggaaaaagtagctcaggcgctggccgacctggcaaggtctcaagacgacgccaaggagatgaagaggaaatatgacgagttagctggtcgcgctctttcggagatgaagaggcttcgagaacgtcgacttgaatatgctgaatttgtccggagatcggcccttgataagatggcggagctcgttcagaagcgattggatcgtattaaagctcatattgacgatacgaaggcggcagaaccaaagtttcttgaattcaaccaagtatctgggaatatcaagactctcgaggcgttggtcgaaggtggcgaagtggagatgaagtcggatgacagatgttaagattggtagcggatgcagaggaattggaggccgaggtgaaagcttttggtatcaccgatcttatggacggcgacttcgatgttcgtactttatttgccgagctgagtcctgataatcgtaattccgttccaccgccgactgaaggggaagatctcgcggatggacgaggtgagtgcgaaggccaagctggtgaaagaatcgttggtcaaactgaagttcgagacgagatcgcggatgctagagactgatattccaggaggctaagccaaagggaagaagcggagctcagatgcctaaagagatcccaatatggcaaaacaaaaaatattctaaaaactgaataatcaacgaattttatattatgtgaccaaaaaatgaaaacagaaactatgtaacaatcatcaaatacagtgttttcagcatttatttttttctaaattttccagcaacatacaaacataacgttactactagacataaaaatactccctctgttccaagttatttgatggtttggatttttttatttgttccataagattgatgttttgtaaaaattaaatatgattattaatcttgtttgttgccaatagtgaaaggagagaggtaatagtaatattattaaactattaaaatagtaattaaaattaaatagaaaagttactttttcttaatttatgtgcgaaacttaaaacatcaaacttacagagagagtaatatataacatgatatgagatgaaactgtacggtgtcgttgcataattacataaactagttataaactcacacactgccttcatttcaggtcgagacagaacttattgtgtgatttaaatcagacaaaccttcgaactttgactttttcatcgcctcctgtcccttcgccgcaaaatactagtctaaacgctcaactcctctctcctgtcttataaacttttttttttagaaaatgagatgatcaatcgaattttgttgtgtgtgacctcaaactgacaacttccagtaattgtaatattaccaattttttttatcaaaaagatgaacttcactttagagcaatagcaatccctcgagtctcccctatataaagattccaactccttaacgattcatctaatgaaaaaacacacacaccaaaaatatcagatatctcaaacaatgtcttcagtttttggatctgtccatatcttggccatgatagccatacaactcctccttacacacagtgtttcatctctgaaccttaccaatgcgtatctgcaccacaaatgcagcaacactcaaggaaaatataagcaggggagcgcgttcgagaaaaatctcaacttagtcctcagtaccatcacctcgattggaaattttcgtgacggtttccgctacaccgaagaaggtgaggatcccaataacgtctttgtcatgttccagtgtcgcggcgactcctactggtccaagtgccccccttgcattagcaccgccgtctctggggtaattgtgacttcaatattataaattagcagtcatatagttacatgtaaaaattacgatgagcacacacgtcggttaattttttctgtcaaatcttaaatatgtgggcaatgatcctgatactttatataaatgattgaattgagacaaaactgatagacattaaaggctagttaaaaaatactgattaaacaatgcaatattgttcttgatatatatatgtacgtatatgtatgtgacagcttcgtaggagatgtccaagaaataagggagcaataatatggtatgaccaatgtcttttaaagatatcttcagttgcctccttcaataagatagattatgagaacgatttctatttgtccaacccaaacaacatgagtgatcgggggttgttcaacaaggagacgtcggctctcctggagaagctggcatataaagcctccgatagaaacaacttggatggtaaacaattggtgttgtacgcagcaggggagaagagaattgggacaaagaaggtgtatgcaatggtgcagtgtacgaaagacttaatatttacaaagtgctttgagtgtttggaagggattttgaggaagtttccacagtgttgtgacggtaaacgaggagggagagttttcggtacgagctgtaactttaggtatgagttatatccttttcttagaaactaacagcaacaacagtacaatgagagctccatattaaatgaaagggttctagagataaacagtcttataatatacactgtgttgcattttagtacgtgaacttgagcgaataaatgtactttcctctttgtgatttttgttttttttttgtgaacttgagttattaagaggaaatcttcaagtaaagaatttatctaatagtatatacatcccacatagaataccaaatagctcagctcatacaaactctctcataatgagagaaaaaaatcctgaaataagggtaagaaaaactcttatgcctcaaggttttagtaaatctcataattttggccgaaccacaaaaagagacgtgcgaaacaaaatagtagaaaattgatttcccgaatcgacaaacatggactaaactatatgtatgatacataactggtcgtacttacaatgatgatacttggtttcacgaagacgagggagcctggagatgaatgatggtgataaggccatgtgtcatcaccaaaaggagggttgctcctgaagttttcgccggagcggccaggaagtcgatcgaggtatgctcaccttctgggtttgattccaattttttctttgaattgcattcgcttgacacgctctttgtccaggcgatcgccgaatgggatcgtttgacttatttgtacgagcgttgtgttcggagcctttccgtagaggctactaacgcgaaagatgcccatgaggctttggccgttgaaaaggaaaaagtagctcaggcgctggccgacctggcaaggtctcaagacgacgccaaggagatgaagaggaaatatgacgagttagctggtcgcgctctttcggagatgaagaggcttcgagaacgtcgacttgaatatgctgaatttgtccggagatcggcccttgataagatggcggagctcgttcagaagcgattggatcgtattaaagctcatattgacgatacgaaggcggcagaaccaaagtttcttgaattcaaccaagtatctgggaatatcaagactctcgaggcgttggtcgaaggtggcgaagtggagatgaagtcggatgacagatgttaagattggtagcggatgcagaggaattggaggccgaggtgaaagcttttggtatcaccgatcttatggacggcgacttcgatgttcgtactttatttgccgagctgagtcctgataatcgtaattccgttccaccgccgactgaaggggaagatctcgcggatggacgaggtgagtgcgaaggccaagctggtgaaagaatcgttggtcaaactgaagttcgagacgagatcgcggatgctagagactgatattccaggaggctaagccaaagggaagaagcggagctcagatgcctaaagagatcccaatatggcaaaacaaaaaatattctaaaaactgaataatcaacgaattttatattatgtgaccaaaaaatgaaaacagaaactatgtaacaatcatcaaatacagtgttttcagcatttatttttttctaaattttccagcaacatacaaacataacgttactactagacataaaaatactccctctgttccaagttatttgatggtttggatttttttatttgttccataagattgatgttttgtaaaaattaaatatgattattaatcttgtttgttgccaatagtgaaaggagagaggtaatagtaatattattaaactattaaaatagtaattaaaattaaatagaaaagttactttttcttaatttatgtgcgaaacttaaaacatcaaacttacagagagagtaatatataacatgatatgagatgaaactgtacggtgtcgttgcataattacataaactagttataaactcacacactgccttcatttcaggtcgagacagaacttattgtgtgatttaaatcagacaaaccttcgaactttgactttttcatcgcctcctgtcccttcgccgcaaaatactagtctaaacgctcaactcctctctcctgtcttataaacttttttttttagaaaatgagatgatcaatcgaattttgttgtgtgtgacctcaaactgacaacttccagtaattgtaatattaccaattttttttatcaaaaagatgaacttcactttagagcaatagcaatccctcgagtctcccctatataaagattccaactccttaacgattcatctaatgaaaaaacacacacaccaaaaatatcagatatctcaaacaatgtcttcagtttttggatctgtccatatcttggccatgatagccatacaactcctccttacacacagtgtttcatctctgaaccttaccaatgcgtatctgcaccacaaatgcagcaacactcaaggaaaatataagcaggggagcgcgttcgagaaaaatctcaacttagtcctcagtaccatcacctcgattggaaattttcgtgacggtttccgctacaccgaagaaggtgaggatcccaataacgtctttgtcatgttccagtgtcgcggcgactcctactggtccaagtgccccccttgcattagcaccgccgtctctggggtaattgtgacttcaatattataaattagcagtcatatagttacatgtaaaaattacgatgagcacacacgtcggttaattttttctgtcaaatcttaaatatgtgggcaatgatcctgatactttatataaatgattgaattgagacaaaactgatagacattaaaggctagttaaaaaatactgattaaacaatgcaatattgttcttgatatatatatgtacgtatatgtatgtgacagcttcgtaggagatgtccaagaaataagggagcaataatatggtatgaccaatgtcttttaaagatatcttcagttgcctccttcaataagatagattatgagaacgatttctatttgtccaacccaaacaacatgagtgatcgggggttgttcaacaaggagacgtcggctctcctggagaagctggcatataaagcctccgatagaaacaacttggatggtaaacaattggtgttgtacgcagcaggggagaagagaattgggacaaagaaggtgtatgcaatggtgcagtgtacgaaagacttaatatttacaaagtgctttgagtgtttggaagggattttgaggaagtttccacagtgttgtgacggtaaacgaggagggagagttttcggtacgagctgtaactttaggtatgagttatatccttttcttagaaactaacagcaacaacagtacaatgagagctccatattaaatgaaagggttctagagataaacagtcttataatatacactgtgttgcattttagtacgtgaacttgagcgaataaatgtactttcctctttgtgatttttgttttttttttgtgaacttgagttattaagaggaaatcttcaagtaaagaatttatctaatagtatatacatcccacatagaataccaaatagctcagctcatacaaactctctcataatgagagaaaaaaatcctgaaataagggtaagaaaaactcttatgcctcaaggttttagtaaatctcataattttggccgaaccacaaaaagagacgtgcgaaacaaaatagtagaaaattgatttcccgaatcgacaaacatggactaaactatatgtatgatacataactggtcgtacttacaatgatgatacttggtttcacgaagacgagggagcctggagatgaatgatggtgataaggccatgtgtcatcaccaaaaggagggttgctcctgaagttttcgccggagcggccaggaagtcgatcgaggtatgctcaccttctgggtttgattccaattttttctttgaattgcattcgcttgacacgctctttgtccaggcgatcgccgaatgggatcgtttgacttatttgtacgagcgttgtgttcggagcctttccgtagaggctactaacgcgaaagatgcccatgaggctttggccgttgaaaaggaaaaagtagctcaggcgctggccgacctggcaaggtctcaagacgacgccaaggagatgaagaggaaatatgacgagttagctggtcgcgctctttcggagatgaagaggcttcgagaacgtcgacttgaatatgctgaatttgtccggagatcggcccttgataagatggcggagctcgttcagaagcgattggatcgtattaaagctcatattgacgatacgaaggcggcagaaccaaagtttcttgaattcaaccaagtatctgggaatatcaagactctcgaggcgttggtcgaaggtggcgaagtggagatgaagtcggatgacagatgttaagattggtagcggatgcagaggaattggaggccgaggtgaaagcttttggtatcaccgatcttatggacggcgacttcgatgttcgtactttatttgccgagctgagtcctgataatcgtaattccgttccaccgccgactgaaggggaagatctcgcggatggacgaggtgagtgcgaaggccaagctggtgaaagaatcgttggtcaaactgaagttcgagacgagatcgcggatgctagagactgatattccaggaggctaagccaaagggaagaagcggagctcagatgcctaaagagatcccaatatggcaaaacaaaaaatattctaaaaactgaataatcaacgaattttatattatgtgaccaaaaaatgaaaacagaaactatgtaacaatcatcaaatacagtgttttcagcatttatttttttctaaattttccagcaacatacaaacataacgttactactagacataaaaatactccctctgttccaagttatttgatggtttggatttttttatttgttccataagattgatgttttgtaaaaattaaatatgattattaatcttgtttgttgccaatagtgaaaggagagaggtaatagtaatattattaaactattaaaatagtaattaaaattaaatagaaaagttactttttcttaatttatgtgcgaaacttaaaacatcaaacttacagagagagtaatatataacatgatatgagatgaaactgtacggtgtcgttgcataattacataaactagttataaactcacacactgccttcatttcaggtcgagacagaacttattgtgtgatttaaatcagacaaaccttcgaactttgactttttcatcgcctcctgtcccttcgccgcaaaatactagtctaaacgctcaactcctctctcctgtcttataaacttttttttttagaaaatgagatgatcaatcgaattttgttgtgtgtgacctcaaactgacaacttccagtaattgtaatattaccaattttttttatcaaaaagatgaacttcactttagagcaatagcaatccctcgagtctcccctatataaagattccaactccttaacgattcatctaatgaaaaaacacacacaccaaaaatatcagatatctcaaacaatgtcttcagtttttggatctgtccatatcttggccatgatagccatacaactcctccttacacacagtgtttcatctctgaaccttaccaatgcgtatctgcaccacaaatgcagcaacactcaaggaaaatataagcaggggagcgcgttcgagaaaaatctcaacttagtcctcagtaccatcacctcgattggaaattttcgtgacggtttccgctacaccgaagaaggtgaggatcccaataacgtctttgtcatgttccagtgtcgcggcgactcctactggtccaagtgccccccttgcattagcaccgccgtctctggggtaattgtgacttcaatattataaattagcagtcatatagttacatgtaaaaattacgatgagcacacacgtcggttaattttttctgtcaaatcttaaatatgtgggcaatgatcctgatactttatataaatgattgaattgagacaaaactgatagacattaaaggctagttaaaaaatactgattaaacaatgcaatattgttcttgatatatatatgtacgtatatgtatgtgacagcttcgtaggagatgtccaagaaataagggagcaataatatggtatgaccaatgtcttttaaagatatcttcagttgcctccttcaataagatagattatgagaacgatttctatttgtccaacccaaacaacatgagtgatcgggggttgttcaacaaggagacgtcggctctcctggagaagctggcatataaagcctccgatagaaacaacttggatggtaaacaattggtgttgtacgcagcaggggagaagagaattgggacaaagaaggtgtatgcaatggtgcagtgtacgaaagacttaatatttacaaagtgctttgagtgtttggaagggattttgaggaagtttccacagtgttgtgacggtaaacgaggagggagagttttcggtacgagctgtaactttaggtatgagttatatccttttcttagaaactaacagcaacaacagtacaatgagagctccatattaaatgaaagggttctagagataaacagtcttataatatacactgtgttgcattttagtacgtgaacttgagcgaataaatgtactttcctctttgtgatttttgttttttttttgtgaacttgagttattaagaggaaatcttcaagtaaagaatttatctaatagtatatacatcccacatagaataccaaatagctcagctcatacaaactctctcataatgagagaaaaaaatcctgaaataagggtaagaaaaactcttatgcctcaaggttttagtaaatctcataattttggccgaaccacaaaaagagacgtgcgaaacaaaatagtagaaaattgatttcccgaatcgacaaacatggactaaactatatgtatgatacataactggtcgtacttacaatgatgatacttggtttcacgaagacgagggagcctggagatgaatgatggtgataaggccatgtgtcatcaccaaaaggagggttgctcctgaagttttcgccggagcggccaggaagtcgatcgaggtatgctcaccttctgggtttgattccaattttttctttgaattgcattcgcttgacacgctctttgtccaggcgatcgccgaatgggatcgtttgacttatttgtacgagcgttgtgttcggagcctttccgtagaggctactaacgcgaaagatgcccatgaggctttggccgttgaaaaggaaaaagtagctcaggcgctggccgacctggcaaggtctcaagacgacgccaaggagatgaagaggaaatatgacgagttagctggtcgcgctctttcggagatgaagaggcttcgagaacgtcgacttgaatatgctgaatttgtccggagatcggcccttgataagatggcggagctcgttcagaagcgattggatcgtattaaagctcatattgacgatacgaaggcggcagaaccaaagtttcttgaattcaaccaagtatctgggaatatcaagactctcgaggcgttggtcgaaggtggcgaagtggagatgaagtcggatgacagatgttaagattggtagcggatgcagaggaattggaggccgaggtgaaagcttttggtatcaccgatcttatggacggcgacttcgatgttcgtactttatttgccgagctgagtcctgataatcgtaattccgttccaccgccgactgaaggggaagatctcgcggatggacgaggtgagtgcgaaggccaagctggtgaaagaatcgttggtcaaactgaagttcgagacgagatcgcggatgctagagactgatattccaggaggctaagccaaagggaagaagcggagctcagatgcctaaagagatcccaatatggcaaaacaaaaaatattctaaaaactgaataatcaacgaattttatattatgtgaccaaaaaatgaaaacagaaactatgtaacaatcatcaaatacagtgttttcagcatttatttttttctaaattttccagcaacatacaaacataacgttactactagacataaaaatactccctctgttccaagttatttgatggtttggatttttttatttgttccataagattgatgttttgtaaaaattaaatatgattattaatcttgtttgttgccaatagtgaaaggagagaggtaatagtaatattattaaactattaaaatagtaattaaaattaaatagaaaagttactttttcttaatttatgtgcgaaacttaaaacatcaaacttacagagagagtaatatataacatgatatgagatgaaactgtacggtgtcgttgcataattacataaactagttataaactcacacactgccttcatttcaggtcgagacagaacttattgtgtgatttaaatcagacaaaccttcgaactttgactttttcatcgcctcctgtcccttcgccgcaaaatactagtctaaacgctcaactcctctctcctgtcttataaacttttttttttagaaaatgagatgatcaatcgaattttgttgtgtgtgacctcaaactgacaacttccagtaattgtaatattaccaattttttttatcaaaaagatgaacttcactttagagcaatagcaatccctcgagtctcccctatataaagattccaactccttaacgattcatctaatgaaaaaacacacacaccaaaaatatcagatatctcaaacaatgtcttcagtttttggatctgtccatatcttggccatgatagccatacaactcctccttacacacagtgtttcatctctgaaccttaccaatgcgtatctgcaccacaaatgcagcaacactcaaggaaaatataagcaggggagcgcgttcgagaaaaatctcaacttagtcctcagtaccatcacctcgattggaaattttcgtgacggtttccgctacaccgaagaaggtgaggatcccaataacgtctttgtcatgttccagtgtcgcggcgactcctactggtccaagtgccccccttgcattagcaccgccgtctctggggtaattgtgacttcaatattataaattagcagtcatatagttacatgtaaaaattacgatgagcacacacgtcggttaattttttctgtcaaatcttaaatatgtgggcaatgatcctgatactttatataaatgattgaattgagacaaaactgatagacattaaaggctagttaaaaaatactgattaaacaatgcaatattgttcttgatatatatatgtacgtatatgtatgtgacagcttcgtaggagatgtccaagaaataagggagcaataatatggtatgaccaatgtcttttaaagatatcttcagttgcctccttcaataagatagattatgagaacgatttctatttgtccaacccaaacaacatgagtgatcgggggttgttcaacaaggagacgtcggctctcctggagaagctggcatataaagcctccgatagaaacaacttggatggtaaacaattggtgttgtacgcagcaggggagaagagaattgggacaaagaaggtgtatgcaatggtgcagtgtacgaaagacttaatatttacaaagtgctttgagtgtttggaagggattttgaggaagtttccacagtgttgtgacggtaaacgaggagggagagttttcggtacgagctgtaactttaggtatgagttatatccttttcttagaaactaacagcaacaacagtacaatgagagctccatattaaatgaaagggttctagagataaacagtcttataatatacactgtgttgcattttagtacgtgaacttgagcgaataaatgtactttcctctttgtgatttttgttttttttttgtgaacttgagttattaagaggaaatcttcaagtaaagaatttatctaatagtatatacatcccacatagaataccaaatagctcagctcatacaaactctctcataatgagagaaaaaaatcctgaaataagggtaagaaaaactcttatgcctcaaggttttagtaaatctcataattttggccgaaccacaaaaagagacgtgcgaaacaaaatagtagaaaattgatttcccgaatcgacaaacatggactaaactatatgtatgatacataactggtcgtacttacaatgatgatacttggtttcacgaagacgagggagcctggagatgaatgatggtgataaggccatgtgtcatcaccaaaaggagggttgctcctgaagttttcgccggagcggccaggaagtcgatcgaggtatgctcaccttctgggtttgattccaattttttctttgaattgcattcgcttgacacgctctttgtccaggcgatcgccgaatgggatcgtttgacttatttgtacgagcgttgtgttcggagcctttccgtagaggctactaacgcgaaagatgcccatgaggctttggccgttgaaaaggaaaaagtagctcaggcgctggccgacctggcaaggtctcaagacgacgccaaggagatgaagaggaaatatgacgagttagctggtcgcgctctttcggagatgaagaggcttcgagaacgtcgacttgaatatgctgaatttgtccggagatcggcccttgataagatggcggagctcgttcagaagcgattggatcgtattaaagctcatattgacgatacgaaggcggcagaaccaaagtttcttgaattcaaccaagtatctgggaatatcaagactctcgaggcgttggtcgaaggtggcgaagtggagatgaagtcggatgacagatgttaagattggtagcggatgcagaggaattggaggccgaggtgaaagcttttggtatcaccgatcttatggacggcgacttcgatgttcgtactttatttgccgagctgagtcctgataatcgtaattccgttccaccgccgactgaaggggaagatctcgcggatggacgaggtgagtgcgaaggccaagctggtgaaagaatcgttggtcaaactgaagttcgagacgagatcgcggatgctagagactgatattccaggaggctaagccaaagggaagaagcggagctcagatgcctaaagagatcccaatatggcaaaacaaaaaatattctaaaaactgaataatcaacgaattttatattatgtgaccaaaaaatgaaaacagaaactatgtaacaatcatcaaatacagtgttttcagcatttatttttttctaaattttccagcaacatacaaacataacgttactactagacataaaaatactccctctgttccaagttatttgatggtttggatttttttatttgttccataagattgatgttttgtaaaaattaaatatgattattaatcttgtttgttgccaatagtgaaaggagagaggtaatagtaatattattaaactattaaaatagtaattaaaattaaatagaaaagttactttttcttaatttatgtgcgaaacttaaaacatcaaacttacagagagagtaatatataacatgatatgagatgaaactgtacggtgtcgttgcataattacataaactagttataaactcacacactgccttcatttcaggtcgagacagaacttattgtgtgatttaaatcagacaaaccttcgaactttgactttttcatcgcctcctgtcccttcgccgcaaaatactagtctaaacgctcaactcctctctcctgtcttataaacttttttttttagaaaatgagatgatcaatcgaattttgttgtgtgtgacctcaaactgacaacttccagtaattgtaatattaccaattttttttatcaaaaagatgaacttcactttagagcaatagcaatccctcgagtctcccctatataaagattccaactccttaacgattcatctaatgaaaaaacacacacaccaaaaatatcagatatctcaaacaatgtcttcagtttttggatctgtccatatcttggccatgatagccatacaactcctccttacacacagtgtttcatctctgaaccttaccaatgcgtatctgcaccacaaatgcagcaacactcaaggaaaatataagcaggggagcgcgttcgagaaaaatctcaacttagtcctcagtaccatcacctcgattggaaattttcgtgacggtttccgctacaccgaagaaggtgaggatcccaataacgtctttgtcatgttccagtgtcgcggcgactcctactggtccaagtgccccccttgcattagcaccgccgtctctggggtaattgtgacttcaatattataaattagcagtcatatagttacatgtaaaaattacgatgagcacacacgtcggttaattttttctgtcaaatcttaaatatgtgggcaatgatcctgatactttatataaatgattgaattgagacaaaactgatagacattaaaggctagttaaaaaatactgattaaacaatgcaatattgttcttgatatatatatgtacgtatatgtatgtgacagcttcgtaggagatgtccaagaaataagggagcaataatatggtatgaccaatgtcttttaaagatatcttcagttgcctccttcaataagatagattatgagaacgatttctatttgtccaacccaaacaacatgagtgatcgggggttgttcaacaaggagacgtcggctctcctggagaagctggcatataaagcctccgatagaaacaacttggatggtaaacaattggtgttgtacgcagcaggggagaagagaattgggacaaagaaggtgtatgcaatggtgcagtgtacgaaagacttaatatttacaaagtgctttgagtgtttggaagggattttgaggaagtttccacagtgttgtgacggtaaacgaggagggagagttttcggtacgagctgtaactttaggtatgagttatatccttttcttagaaactaacagcaacaacagtacaatgagagctccatattaaatgaaagggttctagagataaacagtcttataatatacactgtgttgcattttagtacgtgaacttgagcgaataaatgtactttcctctttgtgatttttgttttttttttgtgaacttgagttattaagaggaaatcttcaagtaaagaatttatctaatagtatatacatcccacatagaataccaaatagctcagctcatacaaactctctcataatgagagaaaaaaatcctgaaataagggtaagaaaaactcttatgcctcaaggttttagtaaatctcataattttggccgaaccacaaaaagagacgtgcgaaacaaaatagtagaaaattgatttcccgaatcgacaaacatggactaaactatatgtatgatacataactggtcgtacttacaatgatgatacttggtttcacgaagacgagggagcctggagatgaatgatggtgataaggccatgtgtcatcaccaaaaggagggttgctcctgaagttttcgccggagcggccaggaagtcgatcgaggtatgctcaccttctgggtttgattccaattttttctttgaattgcattcgcttgacacgctctttgtccaggcgatcgccgaatgggatcgtttgacttatttgtacgagcgttgtgttcggagcctttccgtagaggctactaacgcgaaagatgcccatgaggctttggccgttgaaaaggaaaaagtagctcaggcgctggccgacctggcaaggtctcaagacgacgccaaggagatgaagaggaaatatgacgagttagctggtcgcgctctttcggagatgaagaggcttcgagaacgtcgacttgaatatgctgaatttgtccggagatcggcccttgataagatggcggagctcgttcagaagcgattggatcgtattaaagctcatattgacgatacgaaggcggcagaaccaaagtttcttgaattcaaccaagtatctgggaatatcaagactctcgaggcgttggtcgaaggtggcgaagtggagatgaagtcggatgacagatgttaagattggtagcggatgcagaggaattggaggccgaggtgaaagcttttggtatcaccgatcttatggacggcgacttcgatgttcgtactttatttgccgagctgagtcctgataatcgtaattccgttccaccgccgactgaaggggaagatctcgcggatggacgaggtgagtgcgaaggccaagctggtgaaagaatcgttggtcaaactgaagttcgagacgagatcgcggatgctagagactgatattccaggaggctaagccaaagggaagaagcggagctcagatgcctaaagagatcccaatatggcaaaacaaaaaatattctaaaaactgaataatcaacgaattttatattatgtgaccaaaaaatgaaaacagaaactatgtaacaatcatcaaatacagtgttttcagcatttatttttgggaaatttactagagtaacccatattttatacataatgacccaaaaggaatgctaaaaatatgagttatttgagtaataattatacctaaattatccttgttttcctttgcagagaaaaacaatattacagaaatgccattactatttaattccagcaaggcaataaaaccacatttatttacgaaaatgccatcgtcgtttttggtaaatctgtggctcttgttgcgacggatttgttatcgatcacagatttgttggtcaaccacagattttttacaacagacttgttttgtaccacagactttactttgttatgttacgccagattttttttttttcgcagattttttaaccgtgactgatttgtttcatatagtctccacagattttatttaaatttcaaaagtaagaatgttgaaaccaaatctgtcactgatttgttttccggaccacagatttttctttatggtggcaacagattttctatttgcacccaaaaatctgttgtgttataacagatttgttaacctcgaaaaatgttatataggcatgacagagttgttttgtgtaatcacagatttaattaacttgttaacaaatctggtgttttacaacagatttttgttaaaaaataaaattactacacagtcacatagtgataacagatttgtttttagtgatgacagttttgtttttcagtgtcaaagcataacagatttactcatgtcaatgttatggccgatttgtttatgactagaataacctttttagtaataacagactttttatggcagatttatttttaaaatttcgaaattttttgttatatgagatttattagctagccctcaattaaattatttccggtctgattgtatgttaaatccggtttgactgaattttttttttttttgaaaaagaaataacgttacgacagacttttattaatgtcggcagatttttacataatattgtcatatttgaattttaatgaattttattagtcatgataaattctccaagggttttcataaccgttttttttcttcttctattcctaccatcaaatcaattatttgtgaattgatacatgtcaaaatattattggtaagctaaaacaagtcaatttatcaaaattaaattgtttttctttagtatttttaaaatcaaaaacgaaatatgtgaagaagattcttctttatctaaattttgttcaaaattattcttttaaaaaaagtttgttctcacgttaactggattttcgtttttgttttaattatataatataggttttggttttcttttttatccacgatttcttttttgattttataattctgttgaaaaataatttggttttgctgatttgtcaaaattttattggtggagtgacttgtgttttaaaatataaaagatttgttttattttttattttttgttttaatttgattacaattaatcattaaggttatttcgtctttttaccaaagatatgggttactacagtttttgaaaccaaacgtgtgtcatttaagttatttatgttaagagttgagtcaatctaagcaaatcttactttatttttttctaaattttccagcaacatacaaacataacgttactactagacataaaaatactccctctgttccaagttatttgatggtttggatttttttatttgttccataagattgatgttttgtaaaaattaaatatgattattaatcttgtttgttgccaatagtgaaaggagagaggtaatagtaatattattaaactattaaaatagtaattaaaattaaatagaaaagttactttttcttaatttatgtgcgaaacttaaaacatcaaacttacagagagagtaatatataacatgatatgagatgaaactgtacggtgtcgttgcataattacataaactagttataaactcacacactgccttcatttcaggtcgagacagaacttattgtgtgatttaaatcagacaaaccttcgaactttgactttttcatcgcctcctgtcccttcgccgcaaaatactagtctaaacgctcaactcctctctcctgtcttataaacttttttttttagaaaatgagatgatcaatcgaattttgttgtgtgtgacctcaaactgacaacttccagtaattgtaatattaccaattttttttatcaaaaagatgaacttcactttagagcaatagcaatccctcgagtctcccctatataaagattccaactccttaacgattcatctaatgaaaaaacacacacaccaaaaatatcagatatctcaaacaatgtcttcagtttttggatctgtccatatcttggccatgatagccatacaactcctccttacacacagtgtttcatctctgaaccttaccaatgcgtatctgcaccacaaatgcagcaacactcaaggaaaatataagcaggggagcgcgttcgagaaaaatctcaacttagtcctcagtaccatcacctcgattggaaattttcgtgacggtttccgctacaccgaagaaggtgaggatcccaataacgtctttgtcatgttccagtgtcgcggcgactcctactggtccaagtgccccccttgcattagcaccgccgtctctggggtaattgtgacttcaatattataaattagcagtcatatagttacatgtaaaaattacgatgagcacacacgtcggttaattttttctgtcaaatcttaaatatgtgggcaatgatcctgatactttatataaatgattgaattgagacaaaactgatagacattaaaggctagttaaaaaatactgattaaacaatgcaatattgttcttgatatatatatgtacgtatatgtatgtgacagcttcgtaggagatgtccaagaaataagggagcaataatatggtatgaccaatgtcttttaaagatatcttcagttgcctccttcaataagatagattatgagaacgatttctatttgtccaacccaaacaacatgagtgatcgggggttgttcaacaaggagacgtcggctctcctggagaagctggcatataaagcctccgatagaaacaacttggatggtaaacaattggtgttgtacgcagcaggggagaagagaattgggacaaagaaggtgtatgcaatggtgcagtgtacgaaagacttaatatttacaaagtgctttgagtgtttggaagggattttgaggaagtttccacagtgttgtgacggtaaacgaggagggagagttttcggtacgagctgtaactttaggtatgagttatatccttttcttagaaactaacagcaacaacagtacaatgagagctccatattaaatgaaagggttctagagataaacagtcttataatatacactgtgttgcattttagtacgtgaacttgagcgaataaatgtactttcctctttgtgatttttgttttttttttgtgaacttgagttattaagaggaaatcttcaagtaaagaatttatctaatagtatatacatcccacatagaataccaaatagctcagctcatacaaactctctcataatgagagaaaaaaatcctgaaataagggtaagaaaaactcttatgcctcaaggttttagtaaatctcataattttggccgaaccacaaaaagagacgtgcgaaacaaaatagtagaaaattgatttcccgaatcgacaaacatggactaaactatatgtatgatacataactggtcgtacttacaatgatgatacttggtttcacgaagacgagggagcctggagatgaatgatggtgataaggccatgtgtcatcaccaaaaggagggttgctcctgaagttttcgccggagcggccaggaagtcgatcgaggtatgctcaccttctgggtttgattccaattttttctttgaattgcattcgcttgacacgctctttgtccaggcgatcgccgaatgggatcgtttgacttatttgtacgagcgttgtgttcggagcctttccgtagaggctactaacgcgaaagatgcccatgaggctttggccgttgaaaaggaaaaagtagctcaggcgctggccgacctggcaaggtctcaagacgacgccaaggagatgaagaggaaatatgacgagttagctggtcgcgctctttcggagatgaagaggcttcgagaacgtcgacttgaatatgctgaatttgtccggagatcggcccttgataagatggcggagctcgttcagaagcgattggatcgtattaaagctcatattgacgatacgaaggcggcagaaccaaagtttcttgaattcaaccaagtatctgggaatatcaagactctcgaggcgttggtcgaaggtggcgaagtggagatgaagtcggatgacagatgttaagattggtagcggatgcagaggaattggaggccgaggtgaaagcttttggtatcaccgatcttatggacggcgacttcgatgttcgtactttatttgccgagctgagtcctgataatcgtaattccgttccaccgccgactgaaggggaagatctcgcggatggacgaggtgagtgcgaaggccaagctggtgaaagaatcgttggtcaaactgaagttcgagacgagatcgcggatgctagagactgatattccaggaggctaagccaaagggaagaagcggagctcagatgcctaaagagatcccaatatggcaaaacaaaaaatattctaaaaactgaataatcaacgaattttatattatgtgaccaaaaaatgaaaacagaaactatgtaacaatcatcaaatacagtgttttcagcatttatttttttctaaattttccagcaacatacaaacataacgttactactagacataaaaatactccctctgttccaagttatttgatggtttggatttttttatttgttccataagattgatgttttgtaaaaattaaatatgattattaatcttgtttgttgccaatagtgaaaggagagaggtaatagtaatattattaaactattaaaatagtaattaaaattaaatagaaaagttactttttcttaatttatgtgcgaaacttaaaacatcaaacttacagagagagtaatatataacatgatatgagatgaaactgtacggtgtcgttgcataattacataaactagttataaactcacacactgccttcatttcaggtcgagacagaacttattgtgtgatttaaatcagacaaaccttcgaactttgactttttcatcgcctcctgtcccttcgccgcaaaatactagtctaaacgctcaactcctctctcctgtcttataaacttttttttttagaaaatgagatgatcaatcgaattttgttgtgtgtgacctcaaactgacaacttccagtaattgtaatattaccaattttttttatcaaaaagatgaacttcactttagagcaatagcaatccctcgagtctcccctatataaagattccaactccttaacgattcatctaatgaaaaaacacacacaccaaaaatatcagatatctcaaacaatgtcttcagtttttggatctgtccatatcttggccatgatagccatacaactcctccttacacacagtgtttcatctctgaaccttaccaatgcgtatctgcaccacaaatgcagcaacactcaaggaaaatataagcaggggagcgcgttcgagaaaaatctcaacttagtcctcagtaccatcacctcgattggaaattttcgtgacggtttccgctacaccgaagaaggtgaggatcccaataacgtctttgtcatgttccagtgtcgcggcgactcctactggtccaagtgccccccttgcattagcaccgccgtctctggggtaattgtgacttcaatattataaattagcagtcatatagttacatgtaaaaattacgatgagcacacacgtcggttaattttttctgtcaaatcttaaatatgtgggcaatgatcctgatactttatataaatgattgaattgagacaaaactgatagacattaaaggctagttaaaaaatactgattaaacaatgcaatattgttcttgatatatatatgtacgtatatgtatgtgacagcttcgtaggagatgtccaagaaataagggagcaataatatggtatgaccaatgtcttttaaagatatcttcagttgcctccttcaataagatagattatgagaacgatttctatttgtccaacccaaacaacatgagtgatcgggggttgttcaacaaggagacgtcggctctcctggagaagctggcatataaagcctccgatagaaacaacttggatggtaaacaattggtgttgtacgcagcaggggagaagagaattgggacaaagaaggtgtatgcaatggtgcagtgtacgaaagacttaatatttacaaagtgctttgagtgtttggaagggattttgaggaagtttccacagtgttgtgacggtaaacgaggagggagagttttcggtacgagctgtaactttaggtatgagttatatccttttcttagaaactaacagcaacaacagtacaatgagagctccatattaaatgaaagggttctagagataaacagtcttataatatacactgtgttgcattttagtacgtgaacttgagcgaataaatgtactttcctctttgtgatttttgttttttttttgtgaacttgagttattaagaggaaatcttcaagtaaagaatttatctaatagtatatacatcccacatagaataccaaatagctcagctcatacaaactctctcataatgagagaaaaaaatcctgaaataagggtaagaaaaactcttatgcctcaaggttttagtaaatctcataattttggccgaaccacaaaaagagacgtgcgaaacaaaatagtagaaaattgatttcccgaatcgacaaacatggactaaactatatgtatgatacataactggtcgtacttacaatgatgatacttggtttcacgaagacgagggagcctggagatgaatgatggtgataaggccatgtgtcatcaccaaaaggagggttgctcctgaagttttcgccggagcggccaggaagtcgatcgaggtatgctcaccttctgggtttgattccaattttttctttgaattgcattcgcttgacacgctctttgtccaggcgatcgccgaatgggatcgtttgacttatttgtacgagcgttgtgttcggagcctttccgtagaggctactaacgcgaaagatgcccatgaggctttggccgttgaaaaggaaaaagtagctcaggcgctggccgacctggcaaggtctcaagacgacgccaaggagatgaagaggaaatatgacgagttagctggtcgcgctctttcggagatgaagaggcttcgagaacgtcgacttgaatatgctgaatttgtccggagatcggcccttgataagatggcggagctcgttcagaagcgattggatcgtattaaagctcatattgacgatacgaaggcggcagaaccaaagtttcttgaattcaaccaagtatctgggaatatcaagactctcgaggcgttggtcgaaggtggcgaagtggagatgaagtcggatgacagatgttaagattggtagcggatgcagaggaattggaggccgaggtgaaagcttttggtatcaccgatcttatggacggcgacttcgatgttcgtactttatttgccgagctgagtcctgataatcgtaattccgttccaccgccgactgaaggggaagatctcgcggatggacgaggtgagtgcgaaggccaagctggtgaaagaatcgttggtcaaactgaagttcgagacgagatcgcggatgctagagactgatattccaggaggctaagccaaagggaagaagcggagctcagatgcctaaagagatcccaatatggcaaaacaaaaaatattctaaaaactgaataatcaacgaattttatattatgtgaccaaaaaatgaaaacagaaactatgtaacaatcatcaaatacagtgttttcagcatttatttttttctaaattttccagcaacatacaaacataacgttactactagacataaaaatactccctctgttccaagttatttgatggtttggatttttttatttgttccataagattgatgttttgtaaaaattaaatatgattattaatcttgtttgttgccaatagtgaaaggagagaggtaatagtaatattattaaactattaaaatagtaattaaaattaaatagaaaagttactttttcttaatttatgtgcgaaacttaaaacatcaaacttacagagagagtaatatataacatgatatgagatgaaactgtacggtgtcgttgcataattacataaactagttataaactcacacactgccttcatttcaggtcgagacagaacttattgtgtgatttaaatcagacaaaccttcgaactttgactttttcatcgcctcctgtcccttcgccgcaaaatactagtctaaacgctcaactcctctctcctgtcttataaacttttttttttagaaaatgagatgatcaatcgaattttgttgtgtgtgacctcaaactgacaacttccagtaattgtaatattaccaattttttttatcaaaaagatgaacttcactttagagcaatagcaatccctcgagtctcccctatataaagattccaactccttaacgattcatctaatgaaaaaacacacacaccaaaaatatcagatatctcaaacaatgtcttcagtttttggatctgtccatatcttggccatgatagccatacaactcctccttacacacagtgtttcatctctgaaccttaccaatgcgtatctgcaccacaaatgcagcaacactcaaggaaaatataagcaggggagcgcgttcgagaaaaatctcaacttagtcctcagtaccatcacctcgattggaaattttcgtgacggtttccgctacaccgaagaaggtgaggatcccaataacgtctttgtcatgttccagtgtcgcggcgactcctactggtccaagtgccccccttgcattagcaccgccgtctctggggtaattgtgacttcaatattataaattagcagtcatatagttacatgtaaaaattacgatgagcacacacgtcggttaattttttctgtcaaatcttaaatatgtgggcaatgatcctgatactttatataaatgattgaattgagacaaaactgatagacattaaaggctagttaaaaaatactgattaaacaatgcaatattgttcttgatatatatatgtacgtatatgtatgtgacagcttcgtaggagatgtccaagaaataagggagcaataatatggtatgaccaatgtcttttaaagatatcttcagttgcctccttcaataagatagattatgagaacgatttctatttgtccaacccaaacaacatgagtgatcgggggttgttcaacaaggagacgtcggctctcctggagaagctggcatataaagcctccgatagaaacaacttggatggtaaacaattggtgttgtacgcagcaggggagaagagaattgggacaaagaaggtgtatgcaatggtgcagtgtacgaaagacttaatatttacaaagtgctttgagtgtttggaagggattttgaggaagtttccacagtgttgtgacggtaaacgaggagggagagttttcggtacgagctgtaactttaggtatgagttatatccttttcttagaaactaacagcaacaacagtacaatgagagctccatattaaatgaaagggttctagagataaacagtcttataatatacactgtgttgcattttagtacgtgaacttgagcgaataaatgtactttcctctttgtgatttttgttttttttttgtgaacttgagttattaagaggaaatcttcaagtaaagaatttatctaatagtatatacatcccacatagaataccaaatagctcagctcatacaaactctctcataatgagagaaaaaaatcctgaaataagggtaagaaaaactcttatgcctcaaggttttagtaaatctcataattttggccgaaccacaaaaagagacgtgcgaaacaaaatagtagaaaattgatttcccgaatcgacaaacatggactaaactatatgtatgatacataactggtcgtacttacaatgatgatacttggtttcacgaagacgagggagcctggagatgaatgatggtgataaggccatgtgtcatcaccaaaaggagggttgctcctgaagttttcgccggagcggccaggaagtcgatcgaggtatgctcaccttctgggtttgattccaattttttctttgaattgcattcgcttgacacgctctttgtccaggcgatcgccgaatgggatcgtttgacttatttgtacgagcgttgtgttcggagcctttccgtagaggctactaacgcgaaagatgcccatgaggctttggccgttgaaaaggaaaaagtagctcaggcgctggccgacctggcaaggtctcaagacgacgccaaggagatgaagaggaaatatgacgagttagctggtcgcgctctttcggagatgaagaggcttcgagaacgtcgacttgaatatgctgaatttgtccggagatcggcccttgataagatggcggagctcgttcagaagcgattggatcgtattaaagctcatattgacgatacgaaggcggcagaaccaaagtttcttgaattc

SEQ ID NO: 603 - DNA, 69563 bp, Arabidopsis thaliana
aaccaagtatctgggaatatcaagactctcgaggcgttggtcgaaggtggcgaagtggagatgaagtcggatgacacgatgttaagattggtagcggatacagaggaattggaggccgaggtgaaagcttttggtatcaccgatcttatggacggcgacttcgatgttcgtactttatttgccgagctgagtcctgataatcgtaattccgttccaccgccgactaaaggggaagatctcgcggatggacgaggtgagtgcgaaggccaagctggtgaaagaatcgttggtcaaactgaagttcgagacgagatcgcggatgctagagactgatattccaggaggctaagccaaagggaagaagcggagctcagatgcctaaagagatcccaatatggcaaaacaaaaaatattctaaaaactgaataatcaacgaattttatattatgtgaccaaaaaatgaaaacagaaactatgtaacaatcatcaaatacagtgttttcagcatttatttttttctaaattttccagcaacatacaaacataacgttactactagacataaaaatactccctctgttccaagttatttgatggtttggatttttttatttgttccataagattgatgttttgtaaaaattaaatatgattattaatcttgtttgttgccaatagtgaaaggagagaggtaatagtaatattattaaactattaaaatagtaattaaaattaaatagaaaagttactttttcttaatttatgtgcgaaacttaaaacatcaaacttacagagagagtaatatataacatgatatgagatgaaactgtacggtgtcgttgcataattacataaactagttataaactcacacactgccttcatttcaggtcgagacagaacttattgtgtgatttaaatcagacaaaccttcgaactttgactttttcatcgcctcctgtcccttcgccgcaaaatactagtctaaacgctcaactcctctctcctgtcttataaacttttttttttagaaaatgagatgatcaatcgaattttgttgtgtgtgacctcaaactgacaacttccagtaattgtaatattaccaatttttttataaaaaagatgaacttcactttagagcaatagcaatccctcgagtctcccctatataaagattccaactccttaacgattcatctaatgaaaaaacacacacaccaaaaatatcagatatctcaaacaatgtcttcagtttttggatctgtccatatcttggccatgatagccatacaactcctccttacacacagtgtttcatctctgaaccttaccaatgcgtatctgcaccacaaatgcagcaacactcaaggaaaatataagcaggggagcgcgttcgagaaaaatctcaacttagtcctcagtaccatcacctcgattggaaattttcgtgacggtttccgctacaccgaagaaggtgaggatcccaataacgtctttgtcatgttccagtgtcgcggcgactcctactggtccaagtgccccccttgcattagcaccgccgtctctggggtaattgtgacttcaatattataaattagcagtcatatagttacatgtaaaaattacgatgagcacacacgtcggttaattttttttgtcaaatcttaaatatgtgggcaatgatcctgatactttatataaatgattgaattgagacaaaactgatagacattaaaggctagttaaaaactactgattaaacaatgcaatattgttcttgatatatatgtacgtatatgtatgtgacagcttcgtaggagatgtccaagaaataagggagcaataatatggtatgaccaatgtcttttaaagatatcttcagttgcctccttcaataagatagattatgagaacgatttctatttgtccaacccaaacaacatgagtgatcgggggttgttcaacaaggagacgtcggctctcctggagaagctggcatataaagcctccgatagaaacaacttggatggtaaacaattggtgttgtacgcagcaggggagaagagaattgggacaaagaaggtgtatgcaatggtgcagtgtacgaaagacttaatatttacaaagtgctttgagtgtttggaagggattttgaggaagtttccacagtgttgtgacggtaaacgaggagggagagttttcggtacgagctgtaactttaggtatgagttatatccttttcttagaaactacagcaacagtacaatgagagctccatattaaatgaaagggttctagagataaacagtcttataatatacactgtgttgcattttagtacgtgaacttgagcgaataaatgtactttcctctttgtgatttttgttttttttttgtgaacttgagttattaagaggaaatcttcaagtaaagaatttatctaatagtatatacatcccacatagaataccaaatagctcagctcatacaaactctctcataatgagagaaaaaaatcctgaaataagggtaagaaaaactcttatgcctcaaggttttagtaaatctcataattttggccgaaccacaaaaagagacgtgcgaaacaaaatagtagaaaattgatttcccgaatcgacaaacatggactaaactatatgtatgatacataactggtcgtacttacaatgatgatacttggtttcacgaagacgagggagcctggagatgaatgatggtgataaggccatgtggcatcatgtcttgtgccggagtcgatgtatgtagaagtcggaagaaatagtaaattcacatttatcagcttcatgataacttcatttgccaacaatttttagtatatgctaacattaatacgcttggatgtatatattcatcatttgtttacaaaaaaataaaaatccacaagacataaattagtgtttgatagaaaccaaatagtaaataattacaatattcttagtcacttagaaatctatgtaatatgcctaaattaatcttttactctcttctcgtagcattatactttttattttattttagactctgagatgaaagacaatgctattacagtgtcgaaatcacattatcttgaatagtctaattcttttgaatgcaaccatgctctacgtgaagtagagttacaatatctttggattaaaaaatatgagctaattgcaatggaaatgagataactacaattgaaaattaaccttctttcacagggacactacgcatgaaagttaaaacatcttagcccaaaatccccagagccaaaattctattgctcctgtacaaaaccagcggtgcactacaagtttggtatgattctattttctcagagttttaacttagtaaagtatttgaactttgactttttcatatgctctccacatccctcgccgaaaataccaaactcctctctcttggttgttacagacgaaaaacaaaatcttctccaaactaaaatgatcaaatccagttttgtataaggtaaccaaaaaggaattgaataccgtcttgaaaaactagtgaccaaaatattgaagccaatcagctaaaattcttcctagtctcctgtatatataaacatcacaccttaacgcttcatttatactaaaaaacaaaaaacacccgactcttgaaaaaaataagcaaaacaaaatacaatatgtacccttcatgttctcttttacaacgtctcgtttggttccctttcttagccttggtggccacacaactcctatttatacgcaatgtttcgtccctgaacctgaccaatgagtatctgcatcacaaatgtctcgttagtgaagggaaatataaaccaggaagcaagtacgagtatatccttaacgatcacatccgttttctcgcagccggaaattttcgctcaggttccatgcacatgacaagtggtctaaaacccaatgctgtaaccatcctctaccagtgccgcggtgactcctataattctaagtgccgctcttgctatgctgccggcatctccggggtaacattacttactctcttcatatcatattaaatgttattttagccaaaacaaattgttttaaataagaaatattatgttctgtgattatttgtatacaacaatttatgtttgattcaagattttcttgtgcccaacagccctcaaggcttttaagtctgtccatcgcgaccaattcaatgaccctagcgtacaatttatcaaattaggtaaataggaagggtaatgaatggtattgtttttttatgtctaacagattcttcattcacattttcaacttatgaaagcctattttctaatacagattcatgaattagttagaaagcacaaacgcacaatgattgtttcttatatatttatatttatttaataatattttagctattatttcataatttaatgtattaattattttaacacgtcaaaacatgaattaattatgtaaaatgtaaatgacagcttcgtaggcgatgtccgagaaacaaaggtgggataatatggttcgatcagtgttttgttgagattacttcaatcagtgtcatcgacttcaacatctcaaagatcaattacgagaacaatttccccttacacaacccgaacagggtaagtggcgatataaagtcattcaacaatgagacaatggctctcctcaaagagttggcgttgaaagcaaataataaagacaacatggacaatggcaagatggcactgtacgcatcaggggagaagagggtcgggacaaagaaggtgtacgcaatggttcagtgtatgagagatctagttaagcctaagatgtgtaaggagtgtttggaaagcattataaaggagtttcccgagtgttgcgacggtaaacaaggagggaggattttgggtacgagctgtgattttaggtatgaactttacccttttctaaggacttcagattcaaaaactgtttgatgacgatgcacaacacattctcttgacaccttacttattttacttcagttccggttttttgagctttttactagtttttatttatattgtttattcttggatttccctttgtgctggtttagatcacatgtgcctatgactaagatcccaagctgtgtttttcctcactctttatttggttattaattacagttgttggctatgaataagaagctctattattcttgacatcttaaatttgttaacatagaactccgttttctaatttattgttggcgactaaatagcgtcacgtgtagttaatttagacgaatatttccgcgtcattgcttaatctgagtcatgatcctacaatttccaagtcattcaacgggtaaaactactccctgattgacaagataattttgtgattatccgtagctctatcaaacctgtaattaagataatgcaaacttctaacaagcaagaaatatttaaccgatcataaagattatgtactggatataagcgtcagttatggtgaatatatattcagcataaataatttttcatcacccatattatgtcgttcaagaagattcatgatgtatttccgttgtgttacgtttatcctattgaaaaaatctgtgatgtcaaatgtatttggatcaacgaatcctcgtagcgttagaaagtttccactctatcgcaatgcatgggttttagctaatttccatggaacattttcttttttaaaggaagtctacgttactatacgtatgaaagttaaaacagcttcacaaatcacaagatcccaacacccaaaatcatcctgctccttgcacaaaaccggccagtgcgtatcctatgattatgttttctaaaagttttaatttagtaaaaggcgttgaactttgattttttcatctgccctccccatccctcgccgaaaattctaaaatcctctctcatttctgttacagctgttgatgcacgaatcacacaagtacgaaaatgggatctctagggaaggaagaagaatctttctattaatgacgagcccgcgacttaggcgaattggacggattacaaaggatgatttcttcaacaagcataaatagagtaagaacgagccgattgtagatgaaagacgagcttgaggccggaagacgatcttgatatccgaggaagaatagagtttattcgttttatagctgaaccttgtaaaaggctgcctacgtacccttagaaagggatcaagccacacgtagttcatatcgcgataaacgagctaggccattactggaggaaggtcgtatgtcgagttaggcagttttagggatgatccggcggataagtgacgagttgaatagcttcttgagacgtgcgagtaggttagttactttgggcgggcaagtcggcgagacacttcggacggacgagtaaacgagctactcaagatagatgggcaaacgaggtacttcggacgggtgagctgacgagctgcttgagacgggcgatctgataagctgcttgagacgggccggctggcgagatacttcggacgggtgagctgacgagctgcttgagacgggcgggctgatgagctacttgagacggaccggctgacgagatgcttcagacgggtgagatgacgagctggttgagacgggcgatctgacgagttggtctttgtctctaagtgtcctcgcggaatcccccccctttgacaagacatgctattccgtatttatagccttctgcgtgtagggcactcctccagggttttgacgagcctaccctcttgacttaacattctgcttaggcctttgacttggatttgggccttgggccaagcaagcccaaatctaacccctaacagttgccccccaatcctgatgcactgttgatgacgtggatcaggatttcaagtgttcgactcttaaccgaaggaaacgaaaggtcgcgcatggggaaaacgcgatgtccagctttcttttgcatttttcgaggctccaatatctaggcgttgcatggccgttgtggcataggtgatcattacaacgctattcccataggcgtaatgagcttgtctcgggaattgcttatgcgtcttctataagtactgtcctcctttgatcgtttcacccttcaatcgctttagcagaggtacgagttctttctctcttttgtcttgttttgattcgttatttctttggtttcgatgtcgttgggttcgaattcttctcggctcgtccccggtcggactcatactggcgccctgggcgattcgtcgactcgatcggccaagtgtgaagacgacggctcgtcgttcgtctagaggtcgatctcgtcagaatttaggtacgcacttcatcaaatgagacttcacttctattacgatgctgtggcttatccgccgttgtcttttcctttgcttatagcgactcgttggaagatgggaaggataaacctagacgcgatccccaactactcgaggaaatacaaggagaagagagccgtttcggagactccgcagccgtctctttccgagggacaacagattgcagaagctacaaggagaagcctcttggatcaggtcggtcgtcgtgtgtttgagccgggatgttcgaatcctactggaatggcttctgagaagacgcgagaagaggttgaggttgtcgtcccttccgagatgcgaggcgatggtcaggttgcaaggagggagctcgtacttggtcttcagaattcgtctggcacgtttggtgcaaggagggttgctcctgaagtgggtcgtgcggatgcttctaaacgaccgcgggtaagcgaccatagatggggctttcgttacgacgatatggctgctccctttacttctaattctgtcgcttgtgctgagcttcttcgtgaaattggtcgtggctcgggtattccttcgatgcccttagacttgaaggaggagaaagttttcgccggagcggccaggaagtcgatcgaggtatgctcaccttctgggtttgattccaattttttctttgaattgcattcgcttgacacgctctttgtccaggcgatcgccgaatgggatcgtttgacttatttgtacgagcgttgtgttcggagcctttccgtagacgctactaacgcgaaagatgcccatgaggctttggccgttgaaaaggaaaaagtagctcaggcgctggccgacctggcaaggtctcaagacgacgccaaggagatgaagaggaaatatgacgagttagctggtcgcgctctttcggagatgaagaggcttcgagaacgtcgacttgaatatgctgaatttgtccggagatcggcccttgataagatggcggagctcgttcagaagcgattggatcgtattaaagctcatattgacgatacgaaggcggcagaaccaaagtttcttgaattcaaccaagtatctgggaatatcaagactctcgaggcgttggtcgaaggtggcgaagtggagatgaagtcggatgacatgatgttaagattggtagcggatgcagaggaattggaggccgaggtgaaagcttttggtatcaccgatcttatggacggcgacttcgatgttcgtactttatttgccgagctgagtcctgataatcgtaattccgttccaccgccgactgaaggggaagatctcgcggatggacgaggtgagtgcgaaggccaagctggtgaaagaatcgttggtcaaactgaagttcgagacgagatcgcggatgctagagactgatattccaggaggctaagccaaagggaagaagcggagctcagatgcctaaagagatcccaatatggcaaaacaaaaaatattctaaaaactgaataatcaacgaattttatattatgtgaccaaaaaatgaaaacagaaactatgtaacaatcatcaaatacagtgttttcagcatttatttttttctaaattttccagcaacatacaaacataacgttactactagacataaaaatactccctctgttccaagttatttgatggtttggatttttttatttgttccataagattgatgttttgtaaaaattaaatatgattattaatcttgtttgttgccaatagtgaaaggagagaggtaatagtaatattattaaactattaaaatagtaattaaaattaaatagaaaagttactttttcttaatttatgtgcgaaacttaaaacatcaaacttacagagagagtaatatataacatgatatgagatgaaactgtacggtgtcgttgcataattacataaactagttataaactcacacactgccttcatttcaggtcgagacagaacttattgtgtgatttaaatcagacaaaccttcgaactttgactttttcatcgcctcctgtcccttcgccgcaaaatactagtctaaacgctcaactcctctctcctgtcttataaacttttttttttagaaaatgagatgatcaatcgaattttgttgtgtgtgacctcaaactgacaacttccagtaattgtaatattaccaattttttttatcaaaaagatgaacttcactttagagcaatagcaatccctcgagtctcccctatataaagattccaactccttaacgattcatctaatgaaaaaacacacacaccaaaaatatcagatatctcaaacaatgtcttcagtttttggatctgtccatatcttggccatgatagccatacaactcctccttacacacagtgtttcatctctgaaccttaccaatgcgtatctgcaccacaaatgcagcaacactcaaggaaaatataagcaggggagcgcgttcgagaaaaatctcaactaagtcctcagtaccatcacctcgattggaaattttcgtgacggtttccgctacaccgaagaaggtgaggatcccaataacgtctttgtcatgttccagtgtcgcggcgactcctactggtccaagtgccccccttgcattagcaccgccgtctctggggtaattgtgacttcaatattataaattagcagtcatatagttacatgtaaaaattacgatgagcacacacgtcggttaattttttctgtcaaatcttaaatatgtgggcaatgatcctgatactttatataaatgattgaattgagacaaaactgatagacattaaaggctagttaaaaaatactgattaaacaatgcaatattgttcttgatatatatatgtacgtatatgtatgtgacagcttcgtaggagatgtccaagaaataagggagcaataatatggtatgaccaatgtcttttaaagatatcttcagttgcctccttcaataagatagattatgagaacgatttctatttgtccaacccaaacaacatgagtgatcgggggttgttcaacaaggagacgtcggctctcctggagaagctggcatataaagcctccgatagaaacaacttggatggtaaacaattggtgttgtacgcagcaggggagaagagaattgggacaaagaaggtgtatgcaatggtgcagtgtacgaaagacttaatatttacaaagtgctttgagtgtttggaagggattttgaggaagtttccacagtgttgtgacggtaaacgaggagggagagttttcggtacgagctgtaactttaggtatgagttatatccttttcttagaaactaacagcaacaacagtacaatgagagctccatattaaatgaaagggttctagagataaacagtcttataatatacactgtgttgcattttagtacgtgaacttgagcgaataaatgtactttcctctttgtgatttttgttttttttttgtgaacttgagttattaagaggaaatcttcaagtaaagaatttatctaatagtatatacatcccacatagaataccaaatagctcagctcatacaaactctctcataatgagagaaaaaaatcctgaaataagggtaagaaaaactcttatgcctcaaggttttagtaaatctcataattttggccgaaccacaaaaagagacgtgcgaaacaaaatagtagaaaattgatttcccgaatcgacaaacatggactaaactatatgtatgatacataactggtcgtacttacaatgatgatacttggtttcacgaagacgagggagcctggagatgaatgatggtgataaggccatgtgtcatcaccaaaaggagggttgctcctgaagttttcgccggagcggccaggaagtcgatcgaggtatgctcaccttctgggtttgattccaattttttctttgaattgcattcgcttgacacgctctttgtccaggcgatcgccgaatgggatcgtttgacttatttgtacgagcgttgtgttcggagcctttccgtagaggctactaacgcgaaagatgcccatgaggctttggccgttgaaaaggaaaaagtagctcaggcgctggccgacctggcaaggtctcaagacgacgccaaggagatgaagaggaaatatgacgaattagctggtcgcgctctttcggagatgaagaggcttcgagaacgtcgacttgaatatgctcaatttgtccggagatcggcccttgataagatggcgagctcgttcagaagcgattggatcgtattaaagctcatattgacgatacgaaggcggcagaaccaaagttttttgaattcaaccaagtatctgggaatatcaagactctcgaggcgttggtcgaaggtggcgaagtggagatgaagtcggatgacacgatgttaagattggtagcggatgcagaggaattggaggccgaggtgaaagcttttggtatcaccgatcttatggacggcgacttcgatgttcgtactttatttgccgagctgagtcctgataatcgtaattccgttccaccgccgactgaaggggaagatctcgcggatggacgaggtgagtgcgaaggccaagctggtgaaagaatcgttggtcaaactgaagttcgagacgagatcgcggatgctagagactgatattccaggaggctaactaggagagaaaggaagagctgatcgccttcttgaaatcgaggtcgtcatcttttgcttggtctacgaaagatatgacaggaatcgctccggaggtaacctgtcataagctccggaggtaacctgtcataagcatccgcacgacccacttcaggagcaaccctccttgcaccaaacgtgctccgggcgatctccggagccacacaaggcaaatacttccgcgactgactcagttgttgaaagtgtctttttcgcggtgatctcggtgttccagctaaccactgggtcgaggtcaaattcaacatgatcctcatgaagtaatcgcgcattaacttcagcctctgtatactgcggctgcttgttataagcatcctccaggtcgatgagtgggtcgaactgagctaataagtgagcgggcgatctccgtagccacacaaggcaaatacttccgcgactgactcagttgttgaaagggtctttttcgcggtgatctcggtgttccagctaaccactgggtcgaggtcaaattcaacatgatcctgatgaagtaatcgcgcattaacttcagcctgtatactgcggctgcgtgttataagcatcctccaggtcgatgagtgggtcgaactgagctaagaaatccaccggatcttcaggagctgcgagatgtccaccggaaccttcccgatagctcatcaagcaacgtcggaatctcgatccggttagatcgactagactgagcttcgttacttggattcccggttaaccgagagtttcggcgaactaatgacacttcgctcccggaggaagaagaggacggagagacaagaacaaccttacccattgccggaaaaatcgataaagaatcgagagtacaaaataattcgcagaggagagagcgagagctaccttagattcttcttgcaagcggcggaaaatgatttcccgagggtttaatctaatataaatagagtcgaatgggcggcaaacctacgaggtcatcattaaacccacgagacgcttcggttcctgagcttcacgcgcgcgtacagacgcggcgatttgacacgtgtcagatacgttcgaaatacgaatcgattcggaaatctaatgattaattcacgctttccaagatttaaatcgaaattcaatttctaagttcggaaatttcgaattaagcaactcggattctccgaactggggggggactaattgttggtgcaggaattagcacctccgacaataccaatttaaaccaaggaataacgtgaataaaatcgagaattcgattgaaccggggaatcccggctagcccgttaatgggcctaagtcatgagctcgccagaagatttgggtcgacaatcgagatcctcataggcggcttctcaggtcgtgtaaaggaaaacttccatttaagaaaggaggatctcatgaagaatggaagtaatgaagatttagacctaggataattagaatatcatattttgatacgttcaacccattgtataaatagggggggtcaaactccccaaggacccatcttgaaccaagaagagactacaattatagagcaaaccctagcttttatttcaagcaactttgttctttccctttgattatttgcgagctaagagaggagtgaatttgtctaaatcccttagtacaaattcattgtttgattacagaatcaacagtagagacgggctctataagcatgtgagatgtgctattttcccaaaatgatagatgttcaaggtgtgtttttttatttgtacaatgagattaataaatcatttatttttagtcaagaagcatcgaagcaagagaacgaaccatttgaaagactcataaaccaaattgagtcaaaggaatttcaaagaagtagtttggtatggacggatctggtaaaccggtttcggtacgattgtctggttatttttggtttaaaattgattgggtatgttgcagaagctttgcctcagatggcaggtctctccaaattgatcatccttcgatattattattgatacagaggaggaagactcagaatcttcatcctcaaaccctagattccttaacgaaatggcgatggagatctcggtagatctgataaaccaactcaaggtctcgcttcgaaaggaggccaagctcacctccgtcgacgattgctcggactcatccttccccagccttcccacatccgaggaggctatcgcagaacttgatgcttcagctccctaccttcgttgccgaaactgcaaaggaaaacttttacgaggaatcgagtctctgatctgtgtcttctgtggaaatcagcaacgcacgagtgataatcctcctgatcccatcaaatttacttccacttctgcttacaaatggtttctcacctctcttaatctcgatggatcggtaaaagtcgatacctttctcactaatttgtaattacttgttttcctagctgattgtgtattagtcagatgtagaatgtggtgtgttgtgtcttcaaaaaaacgaacttttcatctgtaggagatggtagagccactaaaggaaacggatgggtcaagcagaggagctactaaggcaccgccttcaaaaggaattgctttgtctaagtttcttgatttggaaatacaatggtctgcattagaggagaagtctgatgatggacaatcagtacagaagaaaaaccctctgaatctaggcgggattaatcttgatgattatttcgttgagcggagaggagatctttccaaagtggagcaggcagagagtaaacctgtggaggatgatgattttaaggatccacgtagtcttagcttattcgatagtgtaaagagtcagggagttgttggatcgcaacagcatgataatgttggtttgtttgataaaaaagatgcacctaagagtgttgtttcttctggggaacatgagaatcttagtttgtttgctggacgagatgcgcaggaaagtgtttctttcgcagcgcagggaaactttgggttctttgaggagaaagatgctcggaactcttttaaagaggatgaaaaccttagtttgtttgagggtaaagaagatgctcagagaactagttcttctaaagtggatgaaagttttggtttctttgagggtaaagatgctcagagaactagttcttctaaagacgatgagagttttggtatgtttgaaggtaaaaaagatgctcagagaaatagttcttctaaagaggatgagagttttggtatgtttgaaggtaaagaagatgctcagagaaatagttcttctaaagagaatgaaaattttggtttctttgagggtgcaccattatcaaatgctgaccttaagtcttttgatgacaagattgttgctgcttcttctgattgggactctgactttcaatctgctgatcaaaatctttctcagaaaaagattgatggtgacccatttgtaagttctccagttgatttggctgctcatatggattctgtctttggttccggaaaagatttactctatgcacaaccggcagattcttcaactgcttatgtttcaaaagctggcgattggttgcaagatgatttatttggtaatgtcactggtgaggcccaaaccaacgactcagccgtccatgacaagaatgagggacagattgtcggtggcaatggaaattcatccatggatattgattggatcggagatgatctatggcaaaccaatgaaaaaaaatccattgagaagacccctacagatgttaatgatgatgatgacgatgactggaatgattttgcaagctcggctaactccaagactcctaataatccactttctcaaaccatggaaagttcccaatttgagattttttatggacatgcgcaagataagaacggtgttaaagaacagagcgtggatgagaagcagaatactgatacaagcgtgatgtctgacataggcaaatgtcaagaagatgatctctttgggacttgggatagtttcacatcctcaaccattctgcagacatctctgcagcctcccaccattcatgcgaatccctctggtgaaaaaaatccggaaatgaacttgtttggggaaaataacaataacagagaccttgattttgatagcatctcacgttctgatttcttttctgaaagtagtggcggcaaaaccaactcagaggaagtcaaagtcataccttctggaacctcaaccttagacaggtttcttattttctagtcgattccttattctctaaactctctaaataaccttcatttcatgcttacaaggagctttagtaacatgttccggattttttttgtgtttttcgcttttgatttcagaccgagtgatcctgatggtagtaaagatcaaacagttgatcttgttgtaggcacaacgacaacagttcccaagtcaaagagtgatgttgcggaggagctgatgtcacagatgcatgatctctcatttatgctcgagaccaaactttcagtgcctccaatctccaagacagagtaatattatcacagtgtactctctatctctcttgcgctctcttgtttttcctggggcttggagattgcttgttttcatgtatatatatttcattttcaataacttcaaggatccaattttacttactctgtaaccccaagtggttgttagtctagtagtattgttcattgggttacatccattgatattggccacatgtggatacacacataacaactgagacttcaagaacttgttcggactctgagtcaatccagagtctcttgtgttttccatttttttggataaccaagatgttggtttttggtgataggtccataatctcttgtagtcgtcactagtcataaccaaagcaagttaattaccgatattcgaccttgtaactttgagaactcttttttctttctgaatggctaacattaaatcaaagaatggacagtttttgttcttctagaacatatatattaaaaattaagttaggctgtgtaatgtatgtatataagcatgacacacaacacaagtgatttgcttgtttttgggaaaccacttaatttgattattacaagattagtaacttataagccacgcattatattatgtttctaaaactaattagtttcccatcattctttgtttctgatcctcaaatctcttttgtacggtacctcgaaaattacaaccgtataactactcataattaaggtggtaatcaatacttatttttatttacacaattgcgctagcttagtaatataaaccaccaaatgaattagtgtgatttgtgacgagtatttggttccaacttttctaaacaacacttgttaataaatactcactcagatactttaatagatatttttgtaaaagattaatatacatgtaatcatatgaaatgattcgtttgggatttcactggctggggcgtattatttaatggataattcacaacctcaaattatagactgacaatttttcggccacgtagggttttgagtgtaatcgatgactgatgctgtatttgtaatgtagtaacgtcctataactgaaaattctgacagaaaaaccacttgttgtgaacagttggttttttgtacaatgaatagttgtatgtactacattaacattactttaaatcaatacattttctatgccaacctccaaaactccaacataaaagtttaagtttggtaaacagaaaccatctcatcttaagggtagcattaatcacggtcgagccacattgccataaatggaattgaatcatcttcttttgtgcaagttcacatttatatgtacgtagcgctagctatgttccatctatttgtttcttttaataatattttcaaatctgctattcgtcacttgtcatgttacaacgtacagtagtacttaattaaactcaaatgcaaatccgtattcagactttatatatatgtcaaatgatcgattaagtaattgtatcaaaaaaaattgtgattttttctgacaaaagtggtgtggtgattaagtttatcgtttctattaattatgttgattgtcgaccttaattgtttcataagtctgcaaatcaataaaccagtagtagtggccatttatactaaccgaaatataacaaaagattcatctactaaattgcagaaacatgcatgattgaaatacatagttgttcattttcacatatagaagagagaagatataagttacttatgtcatactctttgatattgacatctaaagttcgtactttgaagcaacaaaaacgctctattttgccttaaccatgcgtaacagacttcgtctttaacttatatttgtttatatatttatttctgattgacacaaatcaaacatgtgtgttggtgccggaattagcacctccgacaataccggcttaaaccaaaggaactacgaattagactgagatttcaatcaaaccggggtatcccggtttagcctgttaatgggccaaaataaggaggtcatttgccgactttagcccgaagtagggagaccgtctagccgacttcctaattcgaagaaaaagaagttttctcctttgaaaataggaagtctttggagataaaggaaattagaagattcaatcctcgaagaaatagaagtttaacaaatcttttaaccatcttaatagtgtataaatagaggggtttgtcctctattctaaggatccgaaatttaatactaaaaaccctagttttcttcattgttcttgggcaaaaccctaactttgtctctaagcaaccttgttcttcttttcattgaatctttggtcactgaatagcgagagagttaagtaaatttgtttaccccctttaaacaaatttattgtgtgattttcagaatcaacaattggcgcgccaggtagggggacacaaacaactctcttcgcatattactcatccaagttttcggtgaacgctcatcaagccaagataatccaatccgtttatttgctcggcgatttcccgtcaggttccaatgaaccgggtgacgtgtaacgtgttcccggattgccccggagatcagctttccagggagtctaaccatggttcaatcggatatctattctgagagttatcaccgtatttgtaaagccgatgctgtctgtttcaacacagatccgtctgaatagaccagtcaacctgaggaccgatttcccgatatgtcgcaacgactcttgcatcaaataatatgttcacggattgccccggttgttagctttccagggaatctaactacccttcgatccgatatctcatccgagaattatctccatgtttctgcagaggatgcaatctcgtttgacatagaatcctttcttaagaagactagtcatcttagggatcaattcccccacaagtctcaacgattctcgaaactagtagcacatctatggattttccagcgagtcaggtgtccctagaagctgacctcacttccatcggagctgtctatcgaatgttatccctgctatccagaagatgcgatctttagaactacgaatccgtctgaataatccagctcaccacggggccgaattcccgacaaatcacagggaatctcgtaagggttaatacatctacggatcgcccagagagtcgtcttttcggagaagttgacctcgccttaatcgaagatatatgctgagagatataaacgtttacctcaagcaagtgcaaccagtcatgagacccaactctataaaaccagtcagcttcgggatcgttttccttgaaaatcctgatgaactaggcagtgatatacctatctacagatcgccccaagagtcagctttctaaagaagccgacctcgcctcgatccgagctgtctattaggagagatcatcacttctctgcactagacacaatttccctgacaaatccgcagctgtcggaacagccaacttacgaatcaaactccaagcgacctggaaagaaacaagatacaatctacgcgacaacggaaagcttcgagttttatagagacctatctcatctctataggtgaattctttcgatgaatatcgctgattttctactgataagcctctaggtcagagattcagttgtcaaaacggttgacttggaagagagtttcacggcgagttaaagagagaggagtcaatctacgtgtcgatttgaagccctgagctttatctttccaacgaatctaacctagatccaatcgaagcaatcttccaagcgatattggcgtttctttcaagcgcagattcgtctctatccgaccagccgaactcaggctcaatttcccagtgatctagagagactcaggagacgatctacagatcaatttaaagccctgaggctcctcttttttttttttttggtgattcaccgggagacggaagctcccggaatattattaaaaaagaaataaaacaaagcttacaaccggactcgtcttggtcgcgttgacccaagactatcctcatgcaaaatcacctctaaatcatccggaacatcaataagagaatgaaaacctaatggtaaagaaaatgcatagttagctagaccgtcggctagacgattagcctccctatacacgcgagtgattcggacaatccagtccttcgataataagccatggcacaaccgcaccaggaacgacagcggatgttgatcaccgatccctgtcttgagaaaaccaactaccaactccgaatcaacttcgagctccacacgagtcaacgccttagtccaagctaggtaaagtccataataaaccccccacagctccgctaaaggcgctgagcatctcccgatattaagcgcaaagcctccacaccaatttccagctccatcccgtatcacaccacccgccgtcgctaaccccgggtttccacgagaagcaccgtctgtgttcaccttataccaacccgtacttggtgcgacccatccaatctgcctctccactcttgtcggaatcccgttaagcactgtagcccttgcattcgccacaaatacttccttcgcgacatccttgatgaactgaactctatccctgcatttccttttctcaccaaaaatgttaccgcatctccacttccatccccaccaaaccgccatagcaaacaccgtggaccaagagctctcttgaaaaggggtttcttcgtgcagattatcaaacacccattcaaacaaagtcttgtcgaagaacgcacgccgcttcctctgaggcacaattctagtccagatccctgacatagctggacaatctctgagaatgtgtaaagtggtctctactccccctttacaaatctgacaaatctccgactcaccgatatgccttcgataacgctctgcatctgtcataatcccttgattgaccactaaccagaagaaagctctcacacgttctggaaccttaactctccatatccgattaaagaatttctccatattaggtcgtggactatcatcccaactcagcatattataagcggacgatacactgaattggccattctgactctcattccaggagattctgtctctcgccactgtctcatgatccaatacgattgcccgtagctctagacatcggctctctgaaacatacggactgatcctactgatatcccagccactatcgtccttccacaaactccgcactgactctgtctccaagttcgccggaaccacgccctgcccatcttcccataagggtttccctgagacccaaatatctcgccaaaaacgaatatgatgtccatcaccaggaacccagcaagtcccccgcgatatcacatccacaagccctgttacaatgcttctccaagttgatgaccaagtccccttcttacgcagccactgacaatcccggagatcgccaattttatacttttttctgaagacctcagcccaaagactcgactggtcctgcagcagacgccaaccaaccttagcaataagagccttgttcatcaatttcgcattgcgaatgcccaaacccccatctttcttaggtaagcagacctttttccaagacaccaagtgttgttttctcttctcagccgtgcttccccaaagaaaggaacgagaagctttgtccaatcgagtaatagtcgattgtggtagcgcaatagaactcattgtatggaccggtatagatgataatacagctttggtaagcgtcatccgtcccgcaaaactcaaagttctctccttccaacccgacaaacgggaagagaccttctccaaaagttcactgaaagtatccttattgatgcgtttatgaagtactggcatcccaagatatttacccaagtcgtttgttgctttaatcccgctctcctcacttatcagtttgctcggatcacgtgagacattccctgaaaaaaatatttttgacttctccaggctaatcttttgaccagaggctatacaaaatgtctccagcaccttccgaatcactcttatctgcattactgaagcctccgcaaataaaattagatcgtcagcaaaacagatatgagataacttgggaccgccttgagacaaactaatgggcttccactgtttgttatcaatcgatcgctcaatcaagtgacaaagcctctccatacatagcacaaacaaatacggagataagggatcaccctggcggaggccccgtaacggcttgaaggagtctgttctctctccattccacaacaaactcatctccgggcccgacacacagcacattatccatcttacccaaacttcggggaaccccgcagaaataagtgtatcctccagataatcccatcggatcgtatcataagccttctccaaatccaacttcaaaagcatccagccctttacccctttttttcttctcatggaatggactgcttcttgaaccaacactatattatccgtacttactctcccggggataaaactagcttgagccggaccaatcagatttgtcattaacggtttcagacgctctaccatcgtcttagtgatgatcttgaaaagcacattgcataggctgaggctcctctttttaacaagccccagctcacttcgttagggtctgttttctcggagatactgccgtttatctgcagaagactgacaaaatacagatcgatctatatccgatctgttgacctcggaatcaaattcccggcgatctaaaaggcatcacgaggcgatctaagtatcaactgagccccgaggcttatctttcaatagagaccgacctcatccaattccgagctgtttactaagcgttatcactgtttcaatgaaacatatgacacctgtcaaatcgcagattcgaactgtgggagcaactggattagaaagcaaactcccaacgattcagaaaacatcaagagcccatcttaatatcatcatgaagctctgaggcttatctttccaacaagatcgattttgctccatttggtgctgtcttccgagagttataggcttttctctcaagcatgcgttgtttatcgagacacagatccgtctacacccgatctgtctgctttcagatcgatttcccggcgatctaaaaggaaccaggagccgatctgcacatcattttgaagctacaaggcttatctttctaacggattcatccttgcctcaattgattacgtttaacaagagttattactgtttttctgcgacaagcacgtcctggctgtagcccaaagatgcatgtctgcggctatcagatcagccacctttgtgaccgattttacgtccatcgtcgtttccaggacgattccaccaacattcccatcttaggcttcacgtcttcacctcgtcaccgatggtcttcaatttaaaaagcttcacgtcatcgccacgcctcatcaccacggaccatgtgtcagaggcatagaacgcaacatatatctaagaaaaatcgtcccttcctcgccttggagagcttctgctttatcttccttaatcacaagacgttgttcagatctcacaaaatcatgtcgtgtaatgaaaattcaaaggaaagagaagtaaagaagaaagatcaccagaagtcagccaaagagtaagcatcactggatactgcctcctatattcactgaggatcgtatgttgctaccggagcaaccgaaaccaaaaacaaatatagcaaaggaaggaatttaaaagcagagtggagatggtaggttgagaaactctccggcgccggagataaggtcgaaaacccgatacaaaggctccaacgtgaccactatcaatccgatagtccaccacacctgactgttcgtcaaacggactcaagatcaagaagttattcatcttgcttcctgtacaagaaacaattggaatagtcctcaatgtgcctagtctgaaacaaaatttgatgtgcaactagagcttttgcgagacattttcccgacgcatcagaaagacctaaggtctaactaagtactcttagcgaagatctcactacaaggaatcatttcccgtaagcggattaccaattggtgttaatctccatctgcaaatcaccttcaaagttggcccagaatcatccaaactgcagaaatcaagaaaaaacgactttgtcgtagcgacttcagaggatcatggaagatacatacgacgtccgatctagctataaatttacagagtgattcttgacgctactagataatgattcaacggtgggatctagaaatcaacggttcagaataaagttattaatgcatctccgaatcagccaaaggaagaaaaataaactctgtcacagcaacttcataagacggtagaagcctcaggcaatatccgatctgactaaaattcggacaaaatcttcgtgggactatcagctaaagattcaacggtgggatcaataatttaacggttcaaacggaagttatcagttcttctataaatcagcaaaaggaagtacatacaatggatcatcactagcaatcgctcaaggcttccactcattcatcaatgatgcgatctccaattctgtctccgtctccacgacctcccacataaaagataagttcaattactttcttacatattagttaagcttgattgacattttcgcttatatcactagctttcatcattgcttttctctttctacgtaaagatgagatcttctctaacgaacatctcaaatgtagattttcatccatcgacgtttacaatttcggatattcagatcgtccatatcgttgatgtcatcatctccatctccaaaccgctgagataagtattatcgattataatctaacaaacatcaatcaatcatatacatgcattatctgttatatttttttgcatagattttcgaaacactcgtctatgcaaaaaaaaaaaaaaaaaaaaaaaaaaaaaaacacgagctcggtaatccgacctctccgttagaactcgaactacgaatggcttgatccctaactaggcaatccttcgtaaggatgcagctataccacttaataaaattaaagtttgcattctcaatacggaattcgctttaagatctgtaataaatcaactctcggcaccctggccaggtgttcgatgcgcgtctcacatggatgcagtggtgaaataatccacgccctattagacacttaatttttctaatagggatagccgagaccagttttctcgcacttaagctctggttcggacagaaatataagccgaaccctgaatttcgcgatctgccgaacagatgctctacggggagtaagccgagcccagcatctcgctccccaactaatatgctgagtccgcctcacttattttttatacagagcccagaactccctctttaaattatacataggcctactgggcataagccgagagacgtctcgcgcccagtacacgccgaatacttttattataaagccgagctcagtctcgcacttaacatctaacccgaacttagacagaaaaaatcggctgtgacgttaggtgaaaaccagcccgcccgaaagccgagctcaaacttgcagatgacttataatttagtcgatttaaaacctaatttcaagattgggtatccgatatggttaatacgtaatcaacggccggaggttcacaaaaaaaaaaaaaacatgaacttgttcttaaggacaaacactttattgaaatataaaagtctgaaagataagagtggtcgacataagtcaaccgaccttcctagctcccagttcgtctgtagctttcctagctcccagctcgtctgcacttcgcctagctaactgctcgtctgcagatgcgatctggaaattctcattgtccttttccgagaaacactaatatttgcattttctccaaaactgggaaaatgggaatttacttgattacgggttgacttccctcaatttccttttccaaaaaaatgacaaagctcataaatggaaaacatagagaaaatactattctgcctcggaaacaggcaagatggaaaatcatcgaaaatagaagttaaaattaaaacaccgcccctttacgtgggtccacggttaaatatgagttttgagaacgccccgaaagttgggtccacgatcgatgtatcaaaataaattacaaagacgacctattcagatcggctggctcgcctcttcaacgcttacgtcgaatatcacttccgcaaacaaggtcgacattcgagccgtgctggtccgccactggagcaacttgagaggtttgcctggaaaaaccaagctgatctggagacatgttcaggtcttcatccccaagctcgatgacgttcaaagcattgacttcgtcggacgcccttttggttaactccttaaggctgctgagttcggatgccgcaatcttcgcgcctctctgcatcagaatacctactatctcctcagcacctttggcctgattctcagcatccacctttggcccgacgaggtcctcttgctccttgagataagcctttactctatcaagacgagcttgggctttctttgtagtacgggcgaccttagcagctcgatcattccgcagtctgttgcactcccgctccccgtgctccttcgcagcaaccaacgcgacttgaagatcgctgatctctttctgaagatcagcttctcgaccattgagcctcttgacctcgtcgttcaacgagctcatctccgccttatgaatctcggcagcatctttcaatgcagccatttccttcatgtctttggcatagatggctttggcctggtctgcgcacttcttcaagttatcgaaggcctctctgtcggcgagcttcagcttcaatttgcgatcatatgtcgcgatcagatcattggccagggcggcggtctggaaaaagagacggttaaagccgaaatacaaagatattgagccacaagaaaacatgtaactagcgtgtacctcaagtgatgacctggcgaacttctgatatccttctttcagaaccaggtcgtcgggattaggaaaatctttcgtcccggggagcatcaaattacgccaaagatgactggcggcctcctgatctctcacaaggaatttctcgccagaatacttgaacgtaaactggtcggagttgagagtctcacctcgcgacaggcggaatgttttcggagcagcagtttcatctaaaccggcttcagaagctgacctcttcttggattgggtagccactcctttccctttctcctcacgggacctcctggaaatcccgagctccgcaacggtttcatccttgtcttcatcaaggatagttaggcccgcgttgacctcttcgctcgctggcgcggaggcataatcgacgacggagcggtcgccggtaacactttgaacttcaggttcgacgacctgaacagattgattttgatcgcactcggcgatctcttgagctggaacgacgccgtccccttcaagacacatcctgtcttgagaatccggattgaccgtctcatgggagacctgatcaacaccggaagggccagcattaacgggaggatttgacgtagccgcctctccgtccaaaggccgagtctcttcgatgggagctgggggaggtggcatatttaaaagcccggccgcaaagctaatgaaggatttccggaccttccccattatcctgttgacgcgcgacctcgtgatgtctttccacgcgcgacgccgagctcggaagattgcctctaaaactccttcgaactcaacgggaaactccggactaggcctgtaccgatctgcaacaaaagaaaaggctatgagaatctagtacggatcgacatgtctttaccctatctatttaaaagaaatctaccaggaaactccgtccacatccttttcctccccgagaacggacgctcatacgattcgaggtcgaccctgacgtagaagtaatattcttcccagttcttgaagttactgactttgggaccgggaagaaagttatgctttgggcggttgttcaccacccaatagccgggcgacctgatagctttcaacgtcgtcatttcctcaaaacaacgaacgtttaccaggtaaccttcttcagcgccgaaggtcagagcggcaacaaaattgcagatcgccgccggagtaagctgggagaacgccatatgacggcgattcagaaaggagatgatcagagacggaattggaaaccagaggtgacattgtctgaagtaggcttcatacatacagacgtaccctcgagggggattccatggacgcttattttctccgggaatcatgtaagtgagcgggcgatctccggagccacacaaggcaaatacttccgcgactgactcagttgttgaaagggtctttttcgcggtgatctcggtgttccagctaaccactgggtcgaggtcaaattcaacatgatcctcatgaagtaatcgcgcattaacttcagcctctgtatactgcggctgcgtgttataagcatcctccaggtcgatgagtgggtcgaactgagctaagaaatccaccggatcttcaggagctgcgagatgtccaccggaaccttcccgatctggatcatcaagcaacgtcggaatctcgatccggttagatcgactagactgagcttcgttacttggattcccggttaaccgagagtttcggcgaactaacgacacttcgctctcggaggaagaagaggacggagagacaagaacaaccttacccattgccggaaaaatcgataaagaatcgagagtacaaaataattcgcagaggagagagcgagagctaccttagattcttcttgcaagcggcggaaaatgatttcccgagggtttaatctaatataaatagaggcgaatgggcggcaaacctacgaggtcatcattaaacctacgagacgcttcggttcctgagcttcacgcgcgcgtacagacgcggcgatttgacacgtgtcagatacgttcgaaatacttgagggtttaaaaataaatttagtcaaattttatttttaaaccctcaagtatttttgtacatgtttaaaccttagtttgtagatatagtggttgtattttttttttttttctctttttttgggtgcaaaatagtggttgtagtttcataatcgtgtaaatctcgattcaaatcttttacatgatgtcaaaaaaaaaaaaaggttttgataatgacgtttgactagactaaatgacgtttgactagactagataaagaaggttttgataatgaaatgactcaatattgataaatgtgactacaatctaagtcaaaagattaggaattatgatgatgtttatattaatgaatatgaccttcttgaatagtttatccgttttcatctcccaataaacagatggaataaccaaacatctacacgaacttcattagttttatcatgagaatgtcattcaaaaccaaccttgtttctaaattgttaagggcggctataatcaaagtcaaacaaaaacaaagtcgttattccaatgcatgtcgacactaatgagtttcttccttatatggatattaatttcaattagttttttaggatgtgcgattgcaatgattgtattgtaatttcaactaaaaatgcaatcatttgttgctatattctcatttctttaatcaaattatggacaaaaaaaaacaatagatggtgatcaaagcagtttcgctgcctagttgtagcgactgccttataaccatctaacgtgataagccaacgaatggatagcaaacaaataattatccagagacatgtcatatataaaagactttgtataactacgtaataatttctctatatgcatacattctttctacgtgagtaataattgagagtttaaacaaatgcaactttgttttctttctctcatatacaaagaaaaaatagtcagagcaactttgttttctttgcttttcctttattttttcaaacgaaaggagacgaaaataaagacgtcagtatccttcttgtagcgtaattataatagagacccacctaagacctaaccaccttagactgctgaattctttgtgcacaaaaagaaaaaaaaaacaaaaaaagactgctgaattcttttagtcattaggtttaccagcaaaaaaaaaaattttttagatatattgttggcttgtagtctcaaaaacacttgcttttcagttttgaacttaagtttaaatattaaattcgacgtaagaatgtaattttagagacgggctctataagcatgtgagatgtgctaatgagtaagcttctaggtttggggtttggttaaccaaaccggaactacataagtgcatttgtgtagagactatgtgacagaatttccaaattctttattttgttactctagggagtagggtccaaatatgaaatatactgtatattgttttaaatatttttagcctataactactgttagacaatagacggtcttaaaactttttttttttctttatatacttaattagaaattaatgcagccaaatccaactacatttaacctattttgtaccttaaactgtacctaatcgagatcaaacccgaaaaatatttactgtagttctagtcaagttcaagttcaaacttgtacattaattcaaaaataaaataaaatcgatttgaatcaaagcaaactaataaaccgggtttccaccaatagtccaatactccaaccgaaatctgaccgaattgaacttaatcgtagtattatacatttaagattagtatatagtaatacacaagagcgagaagaaacaagaaaagaagtatagaaaccctagaaaagaaaagaaaaaaaataaccacaccgcagaaaccgcccgccgcatattattcatcttctttctttatttccagattacttatccgtacacgtgtatcgcaatgaagagaggaagaagagttaaaaaggtaacttttataattcgaattttgggattttctaatcgggaaaaatgtcaaaaaaatcatcactttgccaaaagtggtgaaacaaagcaccaattgggtctggtgaaattctcaattttggttgaattttcttttaaattattaactttcgttgactttgccaaataagacatatcgttaagtcaactaacggactaatttaacggagttagagtcaacgttaacttttttcgttaagttctgaaacgacgtcgttttgagtatttttctaaaaaattaaaatcattacaaatcaagctcactggtaagattcgaacaagggaactgacaacgtatagcgtagtagtcaaccatcaagctaaagtatttattagctaattgacacacaaatatacatatattaatcatatacaagtatttattcacttaaaggtataatgattgatgttttttgtgataacatgttcctctagtccactatattaatccattacggagagaactatctaaaaattgtataatcgcaattgtaaattgcaaatctattaacaaaactaagatgtgttcacatgcacacttcgataaacattcttccatatatcttttgtgttaaggcatgttttaaatgatcaaatcacatattgattttatttgaaagtatatcaatataataaactgtttagaagatgttttgccaaaaaagaaaaagatgttttgttcttcttggaagtgtttgttaaagcccaagagagacttcaagctcacaatttctcaaagatccattaatactgggccttagttagatatccatattacatgttaaggcttcacgggttcgaatccagttggtgttcttttttgaacagatttttgtttttttttgtttttaaacataaaacgacgtcgtttctaaaaattaataaaaaaatagaaacgttgactctaactctgttaaattggtctgttagttgacttaacgacatgtcttatttggcaaagttaacgaaagttaatgatttaaaagaaaattcaactaaagttgagaatttaattcaccagacccaaagttggtgttttatttcaccacttttggcaaactgatgatttttatgacatttttcccttttctaatccgagttttcgagtttgattttgaatttgcatacaattttttttaggtcgtcagagattatagaagaatctgggttttctggaattatgagaatgctcagctacctaggggattcaatcgaacgtatgttgttcggatgttccgtaattttatgaggagtagaggttattttggacaaataagcatactaatggttgtttcagaggttattccttctaagatctcttatcaaacgtatgaagccctatacgcacaatctttgatcgataaccacttaattgttgagaatctggatgaccgtaagtctctctctcttctttatgttaaaattgtttcatattcttttgtaaattgtttgaattttttcagctaaagagcaagcttccgatgaatttctttacgacgagatgagacatttggaaatggataatgacgctagttcgaatgttctagaatttactaagaagtagaggttatttcagagaaataaccataataatggttgtgtctgaggtgattcttactaagatctcgtatgaaacgtatgaagccctctatgaagaatctttgatagataaccatctaatagttaaggatctggatgaacgtaagtctctctttcttctttatgttaaattgtttgagattcttttgtaaattgtttgagattctttaatatttttgagctgatgaagagcaaacttatgaaattattaacaaaaatattaattttgtactatttttgtttcaaaaattaacaaattgttaatataaaattgtcaatataattgaaaacaatatatattcatgtacaatttaatgggattccaaaatgagtacataggtttaaatgagcaatcttaatagaccttaaaattaaaattatatgggtttaaatgggatgagttttaaatggaacatggggtgggcatgcccacataaacattactaatacaaatacattcaccatttatgatgtgacacgtatgagattcaaaccattgtctaaaattccaattttggatctgagtctattggtttttggcaactttgatttacttttcggatatttagacttagatctcccgttgaaaatggtcaaaagactcttcgttggaaatggtctgagattctaagaaatatttaatttttctttgagcaaattaaaatatgggaatgccataagtgataccttctctcactttgaatagtgcttccggcgtatggaggtgaaaagggacacttccactagcatattctgaatctttagttcttcagttgctccattgcatagttctccgtaatcatactgtgttaatggtctcgtattattcttagatgcatcaaactgagcagagcttgaatgagcttctttgaagtaatcttcattgctttaaaaaacatgacaaactccttgcacacatattaatgaaatggatggttctttcaaacattcacttatgtgtttctgcaagttagtagacgggaattacaagagcatggtgctttgtgacagattctgactatgtgttttacatgaaaattggatgtcctaacctaggaaaaggaagagcaatttagaggctatattcattctgaacattacagcttaaaattacacattcgttatgacgtttgtttgctaagttttttattcttcttcgtaaatctgagtttttgatgataacttatatatccattaatcaattacgagtaacaaatgcagagaagaagcaggttcaatgaaaaaggtcttactatctccaataacaatatctacacatatcatccttcataaaacgggattcaaattatcaatatgaaattaaaaacgtggaggagccatcaattaactaagtgaccttaaggagacacacaaaaagacacaaagcataatgataaacatcaagcagaataagattttacaatcgaatattcaaactttagtgattaatatttttttacggtgccacattatgcgatcatttgaaacataataatatgtccgatctccataacttaataaaaaaatcagttaacgcaacaattgcctaaggcataacctattttgtaccttaaactgaacctaatcgagaatcttcagatcaaaccagaaaaatatttactgtagtcaagttcaagttcaaacttgtacattaattcaaaaataaaataaaatcgagttgaatcaaagcaaaccgataaaccgagttgaaccaaaatctgaccgaattgaacttgaaacggcgtcgtattggaaatttaagattagaacaaacgagtgagaagaacagagcaagaagaagaacagaacatgaaatcaccaaaacctccgaatctctctgataaatctcttaaacccaatttcttccacggacaccgtaagccgtcacaaaaccgcccaactgtctacggtggtctcttctccaaccgccaatctatacccagagtctcaccccaaccacaatccaactccctcgctcaccgaacacctttcgatctccgcaaatgggatccagaaacccatctccctcctccttctccgccgtcacattccacggtgatctccgccgcctccgagcgtctatctccaatcgcgagattcgtcctcgacgcattccgtaagaaccgtaaccattggggtccctcagtggtctccgagctaaacaaactccgccgcgtcacaccaagtatcgtcgccgaggttttgaaactaggtaacgatgctgcagtcgcggctaagttctttcattgggctggtaaacaaaaagggtataaacacgatttcgctgcttacaatgcttttgcttattgccttaatcgaaacggacattttcgtgctgcggatcagttacctgagcttatggattctcagggaagaccaccgtcggagaaacaatttgagattttgattagaatgcacgctgataatagaagaggtttaagggtttattacgtttacgagaagatgaagaagtttgggtttaagcctagggtgttcttgtataataggattatggatgctttggttaaaaatggttactttgatttagctttggctgtttatgaggattttaaggaagatgggttggtggaggagagtactacttttatgatcttggttaaagggttgtgtaaagcaggtaggatcgaggaaatgcttgagattttgcagagaatgagggagaatttgtgtaagcctgatgtttttgcttacacggctatgatcaagactttggtttctgaagggaacttggatgcaagtttacgagtttgggatgagatgagacgggatgagataaaaccggatgtgatggcgtatggaacacttgttgtgggtttgtgcaaggacggtagagttgaaagaggctatgagttgtttatggagatgaaggggaaacagattttgattgatagggagatctacagggttttgattgaaggatttgtagcggatgggaaggttagatctgcttgcaatctgtgggaggatcttgtggattctgggtatatagctgatatagggatatacaatgcagttattaaagggttatgtagtgtgaaccaggttgataaagcatataagctcttccaagttgcaattgaggaagaactagaaccagattttgagactctaagtcccattatggttgcttatgttgtgatgaatagactgagtgatttctccaatgtgctagaacgaattggagaattaggataccctgtctcagattaccttacacaattttttaaattgttgtgtgctgatgaagaaaagaatgcgatggctttagatgtcttttatatactaaagactaaaggtcatggcagtgtctctgtgtacaacattcttatggaagctctttacaagatgggtgatattcaaaagtccttgtcacttttctatgaaatgaggaaacttgggtttgaaccagattcatcatcttacagtattgcaatttgctgttttgttgagaaaggggatgtcaaagcggcttgttcatttcatgaaaaaatcattgagatgtcgtgtgttccttccatagctgcgtatctgtctctcactaaaggtctctgccaaattggagaaattgatgcggtgatgttattagtccgtgaatgtctaggaaatgttgaaagtggtcctatggagtttaagtacgctcttacggtttgtcatgtatgcaaaggtagtaatgccgagaaggttatgaaggtggtagacgagatgaaccaggaaggtgtctttatcaatgaagttatatactgtgcgattatctctggtatgtctaagcatggaacaataaaagtagcaagagaagtctttacagagctgaaaaagcgcaaagtcatgacagaggctgatatggtagtctatgaggaaatgttaattgagcagacaaagaagaagacagctgatttggtgctttcagggatcaagttttttggtctcgaatcaaaactaagagcaaagggttgcagactactcgataactaaagttttggactgataaatcatttagctgtgcacaggtgatcaaaagaatgtgcttttgtccaaacaattgcatataccttgttgcatgacgataaactctttcgggcgttggttagtctgagttcgatgttttcttgggtatggtttgtcaaacccaaccatgcaaatttgggagctcttcccacggacaaatcaagacccgaaattgtttgttcgtttcatccttctggtagctgaagcttggaagtgagtaatatttggattcaagggtgatgtagtgaagcgcctcacaagcatacttacaaatcaatggtctggattttgaaacctcataaccttgatcccacttccctttgtgcgagttcaaaatgattaatggcattccttgtgctagttttgatgttgcagcttgaagttttgcttaaagtttcaatattgagtccttgcaaggatgtttatgaaactcacacttttcacatcaaatggttgccaattctcacttattataaatctaagattttttgttagaatttttgaaatgtcagaattgaaataaagtttaccataaagttatggtttttatttcccatctttggggaaatggcagttaaattcccgtgtcgatggctttgaaaagtggttgcatttatgatccacccttttattttaatcacacatccgaattaccaatcgttacccatttcttcaatgaacactctggtgaggagcggtggcgcgtggctggtatcgccgtcaatggcagtggcggctctgaagaggatgagagtgtctggtttagccacgtcatcatcatcttctgttcctaattggaaaggtggagtttccatggtccaaggagcttccagaggcattggtctcgaatttgtgagcctctttcttaatccatttctctctttcatttacccaaatcctgaaatttagtgactcatttgagagagatctaaatttggctgatttagttcagctttttgacgttgctctttaggtacgacagttgctggagaacaataagaacgggtatgttgttgctacttgccgaaatccaaaagaagcaacaagtctctctgatttgaagaaccgtttctctgaaagacttttcatccaaaagcttgatgttacagatgaaactaccattgaggttgtctctacactcaaatctgtctcctttcattaatcaacactcaaatgctacactcaaaactgtttctgaaactgttgaacctgtttactaggaatcagcggaatctgtgagagaaaaatatggttctctcaatctacttataaatgcagctggtatactttcaattcctggcgtattgcagccaggtatgagtaatctttcatttaattagtaatctttccactcatgtcttagacaagttagtttcagttttatctgcaatttgggataactaaatgaaacctgtgaaaataaaggactgttctttaatcccttttgatctcagtacagaaacaacattgaacaaggtcgaaaaatcatcgttgatgcttgcttacgaggttaacgctgttggtccaattctagtgatgaaggtaagctcttccaatcctctgtttttgtaaagaacgctgcccctatgcaaatctaagttatgcatctccttgttttgcttactcgtggacatggcccattgactctatgaatgataaaagattctgtctttggctgtgttgcagcatatgtggcctctccttaaggctggtggaggtagtggaacagatagagaagttgctgttgtagccaatttaagcgctcgagttggatccattggagataaccgacttggtggttggcactcttacagggcttcaaaatccgcactcaatcaacgtacaactgaataataagtttagaagattcttgatttttccatctgctatgagctgagaacaccattaatttctgtgtccaactgttgctttttgcagtgacaaaaaatgtatcggttgagttaggtaggaggaaagatcctgtggcatgcattctactacatccaggcacagtagacactgatctctctcggccgtttcaaaggaatgttcctgacggaaaacttttcacaagagagtactctgttcagaagttactgcacatcatcaacaatactaagaaacaagacagcggcaagttctttgcttgggatggccaggagataccttggtgatttcttatatggttttctcgatccgaatggtcagttctttcaaagtctattgaattcttgtcggggttttttcacgttcttggtttgagagcaattcctcgagtaatatcgaatagcttggagtgagtatccagaagctgagagctttctgagtatataataaccaatgtgatggtataatcttctatctacattttgtattactgcataattttacacgctattttcgaaaccctgagtccaaatcattgccatatgtggtccagctttgacctggagttttatgaactctgttcttgttcattaatccttgaagagctgcagaatcatcccactgtctcaaagaactatatgtgttgcttagcagcacatatgctgctgagctctgaggatccagacgcattagtttttctgcaactcgtctagccaagctcacatctccatggactctacatgaacttagtagaatctcccatagaacagagctacttttgtatggtgtagcttctgcaagcttctctgcatcttcaagccggccagctcttccaagacaatcaactatacagatgtaatgatccagctccggctcaattccatgaattctctgcatcgaactaagtatctcaagcccggtttccaccagtcctgagtggctacaagcagtcaagacagaaacgaaggttatcccatcaggcttctctcctgatgaaatcatctttctgtagagaccaacagcttcatcacctcgtccattatgaccatacccatgtatcatctcattccaaataaccgtgtttttcctcaaaacagcatcgaagaactgtcgagctgaatctatttccccacacttgcagtacatgtcggtaagagcggtttcaacaaaggaatcacttacatatccactcttcactaccagtccatgaaactgtcttccatggagcaaactacataaccttgaacagctacttagtacagtagcgaatgaagtttcattaggacacaacacggcagtctgatgcatccttctaaagagtattagagcttttgtgtccagcatgttgtgtctaaaacctgagatcatcgagttccaacaagcgatatccaattcgtttatacaatcatcaaagatacattcagatatctccatcttctcgcattcggagtacactgcaataagaccactaactatgtgactgttcttcgaaatctcggtccttatcactaccccatggatctgcttccctccttccagaaatctcaatctcgcacacgaacttaatatcacactcaaagtggttttatcaggtttcaggttctgaaactgcatttgtctgaaattgcttattgcttcctcatagtgttcatagttggaataaccagaaagcatagcattccaagcgctaacacttggctggggaatgctactgaatattctccttccggtttcgacatcccctgaacgaaagcacgctccaagaacactaatgcaagtaacttcatttggttgaaaaccagaatctctcattctcgttaggaattcaacagatttgtcacttcgatactcctgaccaaacccaactatcattatgttccaagagacaacattcacttcaggcatctcagcaaaaattagctctgcaccattcatgtctttattctttgcatatatttcaagcaacgaattgttcagatgaagatctcctccaaacccaagtctcaaagcaagacaatgaatctgtttcccaagctcattgccatagatttcactcaggctatcacatccttctcttggagcagagatgctaagaatattagataagcaaacagaatccacctgcacgcctttctcgcacatcaatctgaacatctgaactgcctccaacactttattttcccgagctaacccgccaatcaccgctgtataagagacttcattaggctgagagagagattcaaagactcgaacaccataatcaacaataaacccacactttgcatacatagacaacaacgcattcccaacaaaaatattcttatcaagacccgttttaacagcaaccccatgacacctcataccaaaaacaccatccaaaaccttgctacacgcacttaaaacactagctaacgtgaaccgagaaggcaaaaacccatcacaaaccatcctcttatagacaaccaaagccttctcttcaaaccctttcctcaccaaaacactaatcatattattccacgacacaacatctctctcaggcattccatcaaacacctcacacgcttcccccaaatccccaactttacatctaaacgtcaaaaaagcattccaagaataaacatctcttacagacatttcatcaaacaccttccgtgcataatccccatcaccacactcaatatacaaatcaagtaaacgattacatagataagtatcactcttcattcccatcctaacaatgaacccatgtataactttcccagaaagtttacacctttcatctctataacaacgcaagagactcgctaaatacttattccctccgctacgcattttttttctttcaaacaaatatattagattgaatattgtttataggcgacaatatgcgtttggtacgaatttttcgtgccaaattcagtaagtacaaaaaagaaaaaatttatttgtttataatgtttgaatcaatcattacataaactggaaaaaatacaaacttaaaagacaaaaagtaaaaataataatcttttggagaaaaaatgtttttttggagaatcaagaagaagggatgacaacagtacgcatcatgttcttgaattcaaaaaagtcaacgcgaccatcttgattccggtcaacggaaacgatcatcttctccactctctccatttctccaccttcaggtaaaccaagtttcttcagaacagtttgcagttctctagcggagatgaatccatcaccgttctcatcaaacaccttaaacgcctcggcgagatccgattcattttcagctgcggaagaaggatcatcttcgttttctcctcctccacaagctccaccgaagaaagaatcgtcgagtgttttgtgaagagaagagaaatcatcgaaattgagaccagtgttaccaggttggatgtatgattcaacggtggatttgagatcggagagatcagcgttgagaccaagacgtgttagagcttggcttagctcttcgacggttatgaatccgtcgccgtttttgtcgaataagtcgaagattcgttggagacgaagtgcgtttaggcttgggctacgtagtctgaaggatgatgattgtcttgcaactttcttcttctcgttgttgttactctccattgttatcttgtgttcttcttcttcttcttgttcgtttgtggaattataatctgagattgagaaattgagtgatgagggctaattatagaagagaaacaattggtgaattaaaaaatttatgtgtaggagtccgttgttgccggcattgactttgtctggcccgccatgtaagaacttctagcatcagaccccataattcatactatcaatgtcaaaataaaaaggtcacctttttttttgccaaaaaaaaaaaaaaaaaaaaacggtcaccttttttgtgatctgtcgaataatattttgacaatgacattagaacaaaaatccgatcttttttcccccgggaaaatggagatagagaaaaaaaaacgtctaattttatgatcgttatttaattgtgatacaagtttcggtttcaaatggtaatgaagattattaatgctttgatgatgggttaatttctggtttattagtatttggattattttaaaaactgaaattgctttcaagttgataaatgatacactcatacataactgtcgatggcttttcaacggagaagagacaagtcacgtcgtagtagttaccgaatttttaatcgaacgttcccatttgccaaccagtgtatagtttctatatcttccaacccgggtcgggtcatttgagaacccataaaactatgaaacccatttcagctaataaagcccatttgcagaaatgaagcccatttacagatttcatgtctgcaaattaagtactcattttctgcaaattctctcagtacttatagtaatcaaagaaaaaacacacaaatatgtctttaatccttacaatactatctaacaccagatgtctgaaaatcaaaagaaaccaataaagctttacaaggtatttcaatgatgtcgtgaactagactcatacaatgaactcaccaagtcataaatctgcgtcaagcttggttgctttaatggtggtattatatcagtacacatcagtcctagcgtaatggcttgcttaacttgatcaaatgttctcccctcaatcttcatcttctcatcaatcactctctctagattatccggataatgaactcttatatactcaagataccttctttctgaatcttcttgtcccaaatcaggtcttagatttgtaatcatctccacaaaaaacaatccaaagttgaatatatctgtaataacacaacaacaacaacaacaacagacttagcttttatagccttaaaaaggttttgatttttgcaagaagaagatgaagccttacttgttgacaagttgtttctatctccaatcttgaaatgagaaatcaaaggttcttgattatcatcggataacaaaacactgcttgtggtgagatcaaatgtaatctctggccattgatctgatagataacaaataccttctacaactcctagaactactcttaaccttcttctccatgataaagccattgacgaacttaaccaagtctcaacattttcaccttgaatccattctgtaaccaaagctctcatgtttctactattacaccaacccaacactcttaccaagttcttgtgtcgtaacttaaaaaccatctcgcatacctctgcgaattcacgccttttctcactcgaaaccttctctttataaacctcgatcttcgtctctgtcccgtctcttaacgttcctttgtagatatccactgtattgctcatgctcacaagatgttgatctgaaaactcatccgttgctgcttcaagcatcgcgaatgtgaacttgtttcttctccggcatgttcttggtaagtaatcaggtctcttgacacataaccagccaaagcaaaaacagagcaaaatcaccattattggaaaaacaatcaacaagaccaaaactttcatcttgtaacgcttcacgttgggaagaacaccggactgtatgaaactagaggcgttaaaccgtttgaagaactcagaatccgagatcttattctcggagaatcggttatacgataggttcaaatgggtcagattgggtaagcctgagagatcttgaaccggaacaaaaccagagaattggttgtaactcagatcaagagtacgaatctgagcacaagacagaacatttgtcggaaaaccattcgttagagagttattcactaactcgatatcaacgacggttaaaggacagtacttccagaagaaatcgaaagagaggtaaagagcagcggttttaggacgaccgtgaattctgattctagggaaagattcaacgcagttagggtttttggactcgttacagagatgactagcgacgattgtggatctgaaaatctcgacaatgtccattggagaagaggaagtgttgttgcagtaacggagcattggatcacgaagacagttgttggaaatagtggtgttgaaatcaggaggtggacttagattagcgaggtcttcgacgacggttgcggagaatactgagagaggaagataggatgatagtagtgacgtgaggaagaagatgaagaacagagaagacgccattggagagatagagagcaaataggtttcgttatttggtttcgtgtatgggtgagattagagagagaagcagagaggtagtttctgtgttattggaggtgttgttgttgttggcggttattttgaaacagagtgggatgagatttacgcgcccattttccttttagtgatcgtgtgcttggaagttgaagattattaaaataataataattgtgaagttttttaaattttgtgaatatctacactttttacaatagctccactatgaaaacaaatttcaatgtttaattatcattttcgttgtcattgaacacataataatgtgtttatgtcagttggtaaaaaattatctagaatggttttgcttgtatttgtaagattgtgcctcgaattcctttcatatatttcttgtctctttggtctatttatcttgttctaaactttttctctttcttgcgcaacaaacatctacgtgggtgaatttgagtcgataattatttggtaaatgtgctcaatgttaaatataatttttgtttgagaattgaattgaattatataaactactatcaataaaatcttcaatagtttcactttatatccaatgaactttatatttctgcaattttaccaaattaatatgcctaatttaaaatttagatttatagaatcatatatataatttttaattttctacatttctatttttattcatctaatctatatgcatttaatttctttaattggtatagtttcctatgttgtattgtttattattttgttattaacatattttataattttttgtattttcttaattaagaataataaaaatatataaaaataatagttattgtcttaatgaatctttaaaaaaatggaaattcaacaggagctaaaaggtaaacttttgataaagaaaataaaatttattgcaaacttactcaggcttcttaattgttagagaattttacactaatgcaacgcattaaaaggtgaattcaacagaagctaaatgctacttccatgagcactaactcaaaaagtgagaggaatagtcatttgagataagttgagaactaggcagtttttagggaaataatttgagaactagacagtttttttaaaaataggctgatagggtagtttcttctgtcctctctaatacagccctcctctaatacagcaaatagtcaaagaccgttttacccctcttgtgttttgatgaaaactaatgggccaaattcaaaccagcccaatatcattcaaaattcaagatttgtcatgggctaatatcacaaaactcaaacccatttgtcctcaagacattgaaaccaaacataaacttatctcctaaaccctcgttgaacataaacttctctcgtcgtcgacatcttctctgaagtcgtcattgtcaaaagaagataaaccctcgtcacttcgaaaatcatacacacattgtcaaaatctgtcgagatggaaggtatgagttatcataagaagctttacagtttatgaaattgagtgtacggccaacaaataacgatggagacgatgactctgttttcgttttttcaggggacgatgaatcctgcgtctccatggtcggccggtggatttgctactccaatggttggtgggatttcaaggttgataaaactaggccaggaaaggctattaactgcgaaaaaattcagactttcaaatcacttgaacaagttctccggcgaagattctccatggttggtcacgacgtcttttgtttagtattctatcttggctagtgtactagtctagtgtaccgaagtggtgtactgttctagtgttctcactttgtgtactatcatagtgtacgcatttggtgtactagtctagtgtactagtcttgtgtactactggtgtactgttctagtgttctcacttggtgtactattatagtgtacccatttggtgtactattctagtctacttctagaatgtcaaagtatcaatccaaattataatacaatatatttcaattcaagtgttatgaagcataataataatctagggttatgattttgaattaggaatttatttatttacttggaattctaaattctagtaatctaaggctttagggtatagttttaaactttattccatatgatatatggttttccttgggtttagtcttctctctttgtcttttagtgtatagttttgaatttcactacatttcaataatgtcttttagtgtatagttttagggtatagtttttaattccattgcatttcctaaatgtttttagtataatagtagactagtctagtgcaccaaagtggtgtactgtttttaattcacttggttactaattggtgtacccatttggtgtactattctagtctactattatattctatcttggctagtgtactagtctagtgtactagtggtgtactgttctagtgttctcacttggtgtactattatagtgtacccatttggtgtactgggtttctctcaaacgtctctcttctcgaactcgttcaccctcgatttgttgtacaccgactgtggctagggttcgtgaaaaaccaagaagagtaaagtaactcaatctcagaataaacacgggctcagaagttatttggataaaaaacgtaatgaaactatcgggctcaaatatttgggctcacttaatacgaattggagttaacgggcctaaaatgagttttaaaacccaatccaatttgtttcgtcgaacccagccggaatgtgtgtttttaaaacacaaggctactattgtatttgacacctcttttggatttttgctacctttttctatctcacatgaatcctattagacaagcccaataaaaagtaccctcttagcatatttccaaaaaaactgtctagttctcaaataattttctaaaaactgcctacttttacaataaaccctagtcatttcacttttttatcaaaaacaaaaaaattgaataaagtttcacattaagttacgtttccaattaggcaattacattataaaacaaaaaaagtattcaactttccctcattacttcagtttccatattttgtaggtttataagtttattcaaagtactgtaaatacatctttcagtttaattttctttccatagttttttctataagtctaaatcccaattaatacataagaaaaataacaaattactttagatttttcgtttctctttgagttcttcaatcaaagtaatgaaagaagtagtttatgttctgctacttgttcttcttgtttcggtttcagatgcaaatgaaacgaaaccaaatattgaaaacttcctccgatgccttcgtaatcggaccaatccgaagaatccgatcgccgaagccatctatactcatgagaactccaccttcgcgtcttcttacgtgtcctacacgaataacaaacggtgtttaaaccctaacgacacaaaactaatcgccattgttgctgcaaaacatgaatctcatgttcaagcaactgtggtttgcgcaaagtcaaacggaatccagatccgtatccgaagcggcggtcacgactacgagggactttctttcacctcctccgttccgtttgttatccttgacatgcacgatctccggtctataaccattgacgtgttcagaaagcaagcttgggttgatgctggtgcgaccatgggagagctctacaccaagatcgcagcggctagcaaaaccctagcatttgcgggtggcgtttgccctacattaggagctggaggacacatcagtggcggaggatacggaaatctgataagaaagtacggaatctcggtcgatcatgtggttgatgctcgaatagttgatgtcaacggcaatatcttgacaggagctaccttgggacgtgatctattgtgggctattcgaggcggtgggggcgctagctttggcgttatcctctcgtggaaaatcaacctcgtcgatgttccaaagaccgtgactgtttttaaggttaacaaaaccttggagcaaggagttactgatgttctctacaaatggcagcttgtgtcgagcaaattgcctcaagaccttttcttgagagcaatgcctaaaccggtaaatggcgtggtacctagcgagaaaaccatcgcagttgtgttctacgctcagtttttaggctcagcaaggaggctcatggcgattatgaacaagaatttgcctgaattagggctaaaacgtgaagattgctacgaaatgagctggattaatacgacaacgttttggcagaactatcctgtgggaacatcgacaagcgttttattggatagaccatcgggtcccgcaggagcattctacaagagtaaatcggattacgtcaagaaaccgatcccaaaggaagaaatggagaagatctggaaagcaatgttgaagttcaacaatatgtggatgcaatggaacccttacggtggagtgatggacaagattcctgctgatgccaccgcgtttcctcatcgaaaaggaaacttgttcaagattcagtactttgcgttatggacagacgcaaacgccacatacgctaatcttggtctaatgagagatatataccatgagatggagccgtacgtgtcaagtaaccctagagaggcgttcttgaattacagagatatcgatgtcggaagcaatccgagtggtgagaccaatcttgaagaagctaagatctatggatcgaagtatttcttggggaattttaagagattgatggaagttaaagcaaagtatgatcctgagaatttctttagattcgaacaaagtattcctcctgctagtgcaatgtaactcttctgaagggttttttgaatgtttaataagtcatatgagcatttaaccaataaaattaaattaaagtaatcagcatgcattatagctcatgaaaggattgtctgttttgtgatttgtgttatgcgctcagaaatcgtgacagcgtgttttgcaaacgaatcaatggttgatccatatgctttcagcattcttgccaatcgacatcgttttcgtcttgttctgcttcttctgcttccacattcaagtccaccttgtagtttccatttgctgcatattaagaaagtaaccaagatgagcatcacatgtacaccgaatgagacctaaactaatctcagttaaactatgagcatgtcttaacaagtatgtatcttcttgttgaaactctgaaatctcaaaacattcaaagaaaactgttcttcttctgaaatactctgcttcggttttatacttggaaaaaactaaacgaggttccttctaactaactaacgtgttgttgacttgtttcatataggaaacaaagtaataatagtaaactaaaactgacctgcaacagaagcttcttcttcttcttcctcttcacgtttggacttcataccaacctgacgatctgaggatgaagtagccaattcaatgtcagttgttactttgcctgcggattcttgctgattcagcttttcagctagctcttgctcctccagtatagccgcgtagtaagctttgagatactcatcctgaagaaaaacgaaaatactatatcaaaattatggaaacaaaacccacaaagatactactgtgggaatctccccaaaaggcattaccttcaaattcctatcatcatcaccattctccatagatgagccaccatcatcagcctttgcttcatgtcttatttctcctctttgttcatcggacagattcattcctttcttgatcaaccatgaaggcgtgagtttccttctagaagaatctccaacttcatcagatttgacatcttcgttttcttcaccaaggttaacctcaatctaaccatgcaacatttaaagaaatcaacaaaccacacaataaaaaaagcaagaatgcagggagagctttgattcatctatagtgtaactaacgattacctctgtctctccgagaaatggcatcggtgttgaaccatacccaccctgtggcctcaaagtatcatcagggttaaggtcaccattttcacgagcagccttagctacacgagtctcccatgccggaaaagattcaaagctaggaaccggtaggtcttttattctgtttatatgatccatcagaggtttcagtcgaacctccatattctgaagcaaatcttttagatgatcccgccgactccttggattgtcacttccatctactactacttcttcggaagttagcttgttacattccataacaagttcaccattgcaattttcacaatgaaaaaaaatcctcttccatagaaagttatctcagagcatccagtgcattatatctacaccagaattaatgagaatctatttaggataagttaacataacacaactcatgaatataaggatattataacataaagagtagtggactttacttccttttgcagttagggcagccatactcctgaacgttatctttatcttctagtacatctttgaattctttcttcatccggtgcagtttgtaacgaataacatcatatatctataagagagaacaagttctatagagttttgtctcgtgtgataagaaaagcaaaacatcaaactataaacaaaacaaaagtattagggacatacctgtgaataatcaagacagcaatacgagtacatgtggaccttaactttgtcctctcctcggccgttagttgtagcactcgacttctattgaaaagtattgagaatcaataaaagagcagagtaaagaaagaagtgtttagagatatctgcacagacctctttcctgtgaacacgcatgataaattgttgttcttcaaagtatcttaatatcgtacgaagttgcttggtgtttaacttcaactcttttgccaagtcttcttctcgaacccattgccgcctagcaaacatagatatgaaagtcagtaaataaatataagccaaacaatggactcaaaaaagttgtatgaatctactgtgacaacttaagatgtaatcaaaattcacctaatagaattttgaggatagaaactgaagatgtgcacacaaaccttgtaagcgcgtccagcaccaaaacggcaattcctccgctgccattttttgcagatttcttctgattattgtttttcggagtataattatcatagaaagttttcgctacaagcttcaccatcctgaaaattgatgcaaagcaaacatatgaaatgcaaaaacgattgataaaggcattgcttgaacatagattttggtagaaaaaatgtttcgctatggatagaaacaaaaaagttgtattgtatagagaattacttgataaatggctggcgcacaaccaccggacctggtttttccatggactacaagccaaagtttgtattaggtttgcgtttgatacaaactctacattgatatagaagactacttttttcatagagattgaaaacagagcaatcacaggattcaagccaagaataagaaaactagaaacgaaagaaaaccagttgtgaaacttgaacaaggcaaacagcaagagcaaaaggtattgcaaattggccaatatgctatatacaccattcaatattgtctcacaaatatattaaaggttcatcagtatattaaggttcttgtgttcacaagggaccacgaaattagggtttttacgttcagagctatgaactcaactcgacgtaacgcttagaaccaacaattgtaggtcaaattcttagtttaatcatatctctttactttgataagtctagtatcagttccaaaggaaaacctcggcggctcgacgaagtttatcggagagacaacgagtggatctctcttctaatgtttttaacgagtgtctttgtttatttgtagctttttccaaggtcaaagaagcaattgtacagatttttttggatcaaactggtgatttgaacgtgcttgtgtaatgggtctttaaaactaagttaagcccaatagagacaattacaaacgagttctttgaaatctgggcacaactggttttggacctttggtttgtaagtacataactttttctcaaggacaaaatccaaatcataattaacttgccgataaaaacaataatgacaaaatcttcaaagtttgaacatatacattgaaagaaagaatctacaagaagatagacataaatcttctaaaaatggtaaatggtaataggaaatttgacaaattaaaattcggatatatctataaaaattttcttgtattatataatgaataaaataaacactcaacaacgttatctatttgtcaacaatcaacatcacacaaaagttttggagtgttgtcctataagaaaagcttttggagaaaagtaaaggtacacaccatcaccatcaattgttggaactgaagaaaccagtcactttggaactagattttacggtcagaatttcacatctccatgtaatttatatgttcttttcgctatttctgcaccacggatgtatttttctgttgagatctactaattgaggttttgaacttttggatcggtcaggtatttggtgcagattgagctttttgtttgatatatttacgatctttcaatcgtcgtcgtctcctgcaatttccgttggtgagtcctatttctcttatgtgtttttttccttctttctagtatgtagttcttcagcatctatacactattttggaaaacattttagaaaacaaaacaacacttattagtgctttaatgcttgcttttgcgttcatcaatgattccattgtttcttatcgcaccaatcgtcttattcaatatatggagctgctagttgaattgaggtctaatatttaatatatttgtgtgtctataggtttaatagattttagtttaggctggtagttacaacttcaaattatcgtttacgcgcgaatcaaatattgttattatatgtcatcaccgttatgttgaaactatatcgatcgttgtgttcaaaaactttctttttgggcttcgatttcatatcttattagaatgcttgaatatcccacatcgaaaattggggtatttataagctcgtatataaggtgctctaccaaaatcttgaattaaattatgttaatttaattcaagatttttaatctatatcattagtacaatgataaagaagcttttcaacctcaaaactccaatgaataagaaaaatagagagatctaacatttttatataataaaacattacatatatagtcatgaacaatgaattttggaaaaagcaaaccttacaatacgattacataaacttatatctatgtgattcaccaaatgattacatctaaaacctaatcagtagttgtagtatttttcaaatttatctcaaaattagaccacaaaacctttcctcaaatctctccgtgtcatgctcgcctgtacaatccacagccttaaacaatattgcaagtttcccaccaagaactcgccattcaagacaattgagtattatctttagtagatcttcaaaacctttagttaatttctaaaccctaactttcatatcatgtttatttcataaactctttttcgatgatcaaaaccaagtgtacaacatgttgtcaataacgcaacgagctaaatttctattcactattcaacatgaagttcccctgctgtatacctttcttaggatcataaataagctattgtacgatctattatgtaaatcttctagttcatcacaatattatcgaacgttatcttttacacgttttcatcacatgcccaaaaattctcaattttgcttctcaaaccttaacccttatctaaagaatccatcttattacaacctcggattagattgatatttacaacattaaacgcaacgcaaccatgtgacacacacatactaggaaaaatgtgacactaatgatgcctccaccaaaagcatgtatttctatttgcttattacaataatagaagatccccaacaaggtcgagaaaggaaagaaggaaataaaacccaatttgtcgtaataaaagttagattcatttttgtaaggcttttgatagagagtgttccaattttcttattcatgactgaatctcaatgcaaaataaataaggtttttggtccgttcaaggagtgaaggtactatgttaaactctagcaaagcaatgaaacaacgaaagtcctagagacaaaatatagtgaagggtagtcacatcatggaatgcaaggaaacactttaccaggatttcgtctggcagtgcacgaaaacaaagatgattacatcagtcggtttcttaaattttggtgaagtatctgctgcatttttactaactacgaaagatatattcaatgagtatgagctatgaaagtaagggtggcggtagaagtttatatagtaatttaattacttttactaaataggtttaaaaaagcgttagattgtgtatgactattagctactagtttaatgcttaaaatggaaggtttactattcatgtgttgtttttatgctggtcaaagactccagggtatgcatgttataaatgttaaaaccttctatttgataacattaagttttagtaggtatagtacgcaactgaacggttcttttaaacctattttgaaaattaactaaacttatgccgccatctttctgttgatagttcatactcatattaaatgtatcttccgtagtccgtagatatggcagatgtcgtaaatttcctaccaaaattcaagaaactaactaaagtaaagttatctttgtttcctatatttctttctctgtcagatggtatcatggcaaaatgttttgcttatgttccaagatgtgaccacgtttcactatatcttgtttccaagactttccgtcatttcattgcttcgtcaaagcttaacatattaacttcagtccttgaactgacataaaacgttatttatgtgtcattgagatatgatcatgaagacgatcctaattggaatactctcaatcaagaatcttacaaaataagatctctcttataaccacaaatttgttccatatccttatatttcttctcttccgttttaggggatcttctatagtattgtaaaaagtcaagaaatctatgttttagtggatgtcttaatggtgagctgagcttgcctttaatgtgtttgttatctatgtcgatttcttcatattatgtgtgtgacatgcgactgcgctgcattaggtgttgtagatggcaaaatctatgtaatcagagagtgcaataagacaaatatgtgttaaataaaaaaatttaaatttgagggagtaaagtataaataaaaaccttcgactctaaaatagagtagaaaataaagttactatatatataaagcaattctgcagaaatttctattttagaatccaatatagaataagtttagagaagaatttagagtttttacactaaaatagagtaggatcgaagatgtcctaagggcatctccaaccatactatatgttagagtaaaaatgcgaaattcttcttaaccctactctataattgattataaaatagagattttgcagattgactctatatagagcaactctattctctattttatttttgagacgactaaactacttaatacgtgtttgcctaaaaattaaaaattttatggctacattatggtaaatcgatggggacactagtgtaaaactaaaaatcacgttcactgaaaaatttaaaatttatggtgaaacaacggcgaaacactttgtaaaactgaaaattccagtcattttcacttgacaattaggattttgagggatgaaaaaaaaaattaaaaaaattagaattttgtggtgaagcgaaggtgacactagtgcgaaactgaaaatcgcatttacattcatttgaaactaaaattcgttggtgaaacgacgacgatactagtgaaaaaatcacagtcatatattatcatctactcgtgaaaaaaaaatcacataactttttcaatagatttgaaatcaaaagcgttggtgatcccgttgtagtatatctcttcggataagataatatatagagaacatagattcgataatcgtttgttgttcaatttatattctatacatgtaatcttattttaaaaaattgtttaaatggtaaaatcaaactaactaagaaatagttgacgacattgaaaagttactgttaggaaaaatatctgaccaactcgactataccaaatatcgaaaaaaattctagtattaaattggtattggaagtaattttcactacaaattagaacggaacacgtggtaacagtccaattggtatagtcacataccaatttaatactggagattttttcgatatttggtatactccagttggtcagatatttttcctaacagtaacctttcaatgtcgtcaaacatttcttcgttagtttggttttaccatttaaacaacttttccaaataagattacatgtatagaatataaattgaacaacaaacgattatcgaatctatgttctctatatattatcttatctaaagagatatattacaacgggatcaccaaagcttttgatttcatatctattgaaaaaggtatgtgatttgttttttcacgagtagatgataatatatgactgtgattttctctctagtatcgccgacgtttcaccaacaaattttagtttcaaatgaatgcaaatgcgatttttagtttcgcacaagtttcatcttcgtttcaccacaaaattctaatttttttattttttttttcatcccacaaaattctaattgtcaaatgaaaattgttggaattttcagttttacaaagtgtttcgccgttgtttcaccataaattttaaaattttcagtaaacatgatttttagttttacgctaatgtcaccgtagatttaccataatgtagccgtaaaattacgtacgttggagttattaaactggagaagagtttagagttttcatttctaatctatcgctatcaagtatcaatattcattattattgaacctaccctcgtttccgtctatatccatgattccaatatcatcgtggtaatcttattacgaaacaagaaaccacagttttaaagaaaacgtcaatttggaaaataaaatatcatgcatgtggtcgtccatcaacgttactcatacaactgttaaccaacaaattattaactcctatatatgaatcgtcctagcacaactttaatattgagatacaaaatgctttttacgtgattacaaatcatcagtgaaaactcatgctaaaattgttaaagacgaattatttgcaggattactaatcaaactagcaataatgtaaatttaggtttagatttttgtaacattaaaataagcccacataaccgccatacctaatcaatactattatactaacaacaatatataaccctctaccaattgcttaacatcaatccaaaatagtcccacttaatgattcagctcctacgacgactgtgtaggacaaatgccattcaattatcacatccatctaatattatttggatcaagacgtgtgattctatctatccacaaacttttcatatatctaccaaaaatctataaattgttttcactttcaatttcttatatcttactccacaaactaatttaaaattagtaaatattttgttcacttctgtctagtagtagataatacttcactcttcaatcttcctacataaagtcaaacttcatttgttgcagaaaacaaaacaaaaaatatgaaattccaaagcttctttagctctgttctgatcttcttcactactagtactttacttctatcaattcctcatccggtttcagctaaccggtctaatcaatccagtttcctccaatgtctatctctccagttaaacgactccaacatcgtctcaaaagtcatacacacaccaaacgacacttctttctcctcagtcttagcttcatcaatacaaaatcaaagattctctgctcctgatgtacctaaaccggttttaatcctaactccggttcaaccttctgatgttcaatcagcggttaaatgcgcacgccggttcggtatccacatcagaacccgaagcggaggacacgactacgaaggcctctcttacgttacacacaaacccttcgtaatcctcgatttaagaaacctccggtctatcacagttgacgtcgataaccggtcggtttgggtccaaaccggagccacgatcggtgaactatattacgaaatcggtaaaaagaatcgtactttagcgtttcccgccggagtttgccccaccgtcggcgtcggaggacattttagcggcggaggatacggtactttactgagaaaacacggtttagcagctgatcacgtgatagacgcacgtgttgtcgacgcaagaggaaggattcttgagagacgagagatgggtgaagatttcttctgggcgattcgtggaggtggtggatcaagcttttgcgttgttctttcatggaagatcggtttaatcaatgttccatcaacagtaactgtcttcaacgtcacgaaattctcagaacagagtgctttaaagatcattcatcgttggcaattcgtggctgataaagtctctgatgatttattcataagagttatgttgcagagatacaagaacatggttcgagcttcgtttccgggtttgtatcttggttcggttaagaatctgttgaaaatggtaaacaaagaatttcctgaattgggtttggaggaagatgattgtacagagatgagttggattgagtcagtaatttggtttgctgagttaggagaagaaccaatcaatgttcttactaaacgtacacgagcatcgttggctttcaaggctaaatctgattttgttcaagaaccgatgcctaaaaccgcgatttcgaagctttggagacggttgcaagaaccggaagcagagcatgctcagctaattttcactccatttggtggtaaaatgagtgagattgcagattacgaaacaccatttccgcataggaaggggaatatatatgagattcagtacttgaattactggagaggagacgtgaaagagaagtatatgagatgggtggagagagtttacgatgatatgagtgagtttgtggcgaagtctccgagaggagcttatataaatctgagagatcttgatttgggaatgtatgttggagttaagaggagtaagtacgaggaagggaagagttggggagtgaagtattttaagaataattttgagagattggtgagagttaagacaagtgttgatccttctgatttcttctgtgatgaacagagtattcctccttttacgtttgttgaagttatttgaaagatttgaaaaaatgaaagaggcgagattttgtgcctgtaacaaagagatagtagtagagtgaagtgtctgtttatatgtgatcttgtcaagtttagatgaaaatgaagttatttttgtagtagcaataataaggaaaagaatgatatattttccaaagtgattctatttcattgtattttaatccaaatacattaacgtgtagaacaagaaatccttggaaggaatttgctagaaaactctcagaagaacataagttttcttcaaaagaaagtaggtctaggttataaaaaaatgattatggaagcagtgtacacggtgacttgaccggaaagttttaagaaacgtccaccctgtctacttaatctgagtggacgttttggttgcggaagaagcttgtcctagctctaggtcgaaaatattaacctgagcacttacttcgccaagactttatgatttcttgcacgtaaagtaaactgatggaagcaacaacagatattgatgtgctcatgcactcatagatgctaatgaagaaaaatatgctagtcgttaatctaacatttgtttattatttttgataataagcatttgaattttaaggattagtatgtgatttaatcattcgatctcatcagataattgttattacttttttaaggtctaataattcctagtatgacttatgaatcagtgtttgattttttttttttttttttgcgtctatttgaacaagttgtagtgtgatataatcaaggaatacaacaaattataatcatctagacatccgattattcaaaacacgtatcacatagttctcagttgaattttcaaaagaggcaattggttatgtaacttcgtatgtatttttccaaatatcatctctcaaatcgtttgtttaacaatagctctctcttaagtttttcgaacttcggaacttgaataaaccatttaacttgtttttttaatgacaatgtcctctgtctaccgttcatcgtgtaacaaaaatttatcagtgcatctatgtaagcaacaacaaagcttcttaattagtattatcgaaaatcttataaaagttacaataataatcaaatgttattcgacttgtttaacaatgtttttgtaagaaaaaagaaatgcatttgccttcatatagcgttgattaataccagtgttgttatcctaatcctaaaaaataacatataaatttcccttcgcttaaaaaagaatcatgacaagaaaaataactacttttgatttataagacagggaaaattatcaaccaaaggctaaactaataaccttttgaaatgcataagaattgttacttttctgcatagagaagtaaaagaaaatcgaaaaaaacataataatgaattcgtgaacgcatgctcacaacgtttttaaatgtaagccacacaaatacaaccctttcactttcaactttacaacaaaacataataagaaaaatcacctttgttgctttgtcattatgaatcttatagtttaataactttatcatttttctcttaatattccaattgaaatttcttaattttacaggttttcaggatttatctttagtcattttttatcctgagcattgcccgcatgatctgtaaatcccaacattttatgttgaaaattgcactaaaatggaattgtatcgtgtaacaaaaaattatgtacttgtctattggatcttttaaaaaattcttaactttttttacccaaataagaaaactgggaagtcagaaacatcaaagacgaaaatgaaatgattgtacaaacctacaatttacaatgtaatcaaattaatagtcaatttttttttttaatgagagtcatctctgatttcgattgtccttgcaaattcttaattgatatttcaaaatgtctagtcaatattttgttccattcacatgaatttatgtgaacatatatagaggatatatttttgcccaaaaaaaaaatatatatatatacatagaatgatcatagagacaaattaaaagactatactaattatattaaaagaaatactaattatatatttttttaaaatatctaaaagcattctttttgaatcttattgctgagaattttttcaattgaaatttcttaattttatgggatttacgattactcttgcaatatcctaaacagtaaacactgcccattagtgtactgtgtacatccctaatattatagactcgtcaacaaaatatgcaccttatctaagcaactatagttttcccgtcaaacaaaataataatagtatatcgttttctaacaattaaagcatttattttatatatatgtctatcggggctatttgaagtctttaacataaaaagactttgctctcaacatgggaagacttgaaagtcagcagcatcaaagatggaaaataaatgagtgtacaaaacttcaatataccaaatgtatttcgtattagtacttgaaaagttgtaacgcgtctctctgattttgatggttattgaaaacaaaaaattatatggtcaaatgtgtccatattcatatgatcatttttgttgcgatagagcaatacacagagacgaataaatcaaatactgactgttattctgttgacaaaatggaaggatcttagtgcaattctatttgtcatcagaaagtgaaaaagaaagcgatcaaacaaaaaaggtgcaggagattgaatcgaagcttcgtttataaaacaatgtacatagttgtttaaagtcttaaagttggacttttcttttgctcagccccacaaacccaattggattataataccgacgccgaccaatcaatgctacgaccattgacttataaaacatacatcggacacacacaaaaaaaaactacactttttgtatcagcaatctttttagttatttgttttcagttatataaatcaatgtttgtgttttctaataacagttattagtatgctagtgatgcatggttaaaaaaaaaaaaagaaatttcaaatatatattttaatttgcattatgtaaaatattttaaaaataagtccctagtaccaatggagtgtttttgtttaagctacaagtgaattataatacgtagtaatcttgattcaaatggaaagatttaccatgtgggtctataccaaaaccgtgtcctttttcatatgtatgaatctctaatagttgcttcttttgactagaataatttgtaaagtaactcctaattcataaatattgaagattagtctgatttattattaatatgcaaatctctgattaataagaaataaattataatagaaatattgatgtgtactgatcatcttttaataaatgtttgagactacaaatactataatgaatcaaatgaacataaatgtatagatgaactgaataaaattccagatacaccttgaattaaatatgtattcatagtatttttttttaaaatgaaatctggattttaaatccttattattcaaaaaaatcttctcctttgatatttttgctataacaaattaaaataaaatctgtaatcactaatcatatcccttaactccctttaatatcttttgttgaccaaaacaaatatttttttgttatatgcaacgaataaaaaaacattgaaagtactttccaaaaacaaaacacgtcttcttctccctgcggttataaatagacacggataagtacaaagaacagaggaacacgagacccaagaaaaagatctcaaaatgctcacgacacctccacgaacctttgtctctgtccctttcttcttcttcttcctcctcttcctttctctacctctctcatctttctctcaatcgaactctgtatacaactctttcctcaagtgtttctccgacaagacgaaatctccacaatcccaaatcactgacaatgtcttctctcagacaaaccctgctttctcctccgttcttcgtgcttacatccgcaatgcgaggttcaacacttcctctactcttaaacccaccatcataatcactcctcgctccgagagccacgtcagcgccgccgtcacttgctcaaaaaccctaaatttcctcctcaaaatccgaagcggcggccatgactacgatggtctctcttacatttccgacaaaccatttttcatcctcgacatgtcgaatatccgtgacgtctctgtagatatcgcctcgaattcggcatggatctccgccggagcgactctcggagaggtttattatcggatttgggagaaaagcagagtccatggattccccgccggagtttgtccgacggttggtgttggtgggcatttaagcggcggtggttacggtaacatggtgaggaagtttggattatctgtggattacgttgaggatgccaagatcgtcgatgtaaacggtcgggttttagatcggaaagcaatgggtgaggatcttttctgggcgattaccggtggaggaggaggtagctacggcgtcgttttgggatacaaagtcaagcttgttcctgtgccatcggtcgttacggtgtttagagtggagcagtatatggattcaggagctgtggatatggttcacaaatggcaatcggttggtccgaaaactgatccgaatctgtttatgagaatgttgattcaaccagtgacgaggaagaaggtaaagactgtgagagcttctgtggttgctctgtttttaggcagagcagatgaagttgttgctttgcttagtaaggagtttcctgaattgggtttaaagaaggagaattgttcggagatgacttggtttcagtctgctttatggtgggacaatcgtcttaatgctactcaggttgatcctaaagtgtttcttgatcggaatctcgatacctcgagtttcggtaagaggaaatcggattacgtcgcgactgcgattccgaagaaagggattgagtctttgttcaagaagatgattgagttagggaaaatcgggcttgttttcaatccgtatggagggaaaatggcggaggttgcggttaacgcgaagccgtttccacatcgaaacaagcttttcaagattcagtactctgtgaactggaaagaaaactctgcagagatagagaaggggtacttgaatcaggctaaggtgctttacagtttcatgaccgggtttgtgagcaagaatcctaggagttcttacttcaattaccgggatgtcgatatcggtgtgaatgatcatggggcgaatagttacaaggaaggagaggtgtatggaaggaagtatttcggagagaatttcgatcgattagtgaagattaaaaccgcggttgatcccgggaatttcttcaggaatgaacagagtatacctaccttgaaaagtaaggcataattgatatatgatcatttaatataaagattggcttcctataatgtaatgttttagtgaagcactatagaatatatggttttggatattgtatattgtatagtttctctgttcatggaactctacaacaagctcatttgattatgtgtaagcctatattgggtttgtatgagcgaagtaataagtcaaagtttctggtgatgaaaaatcgaattcgaaaccactgattgttgaaaatagctacctgcttttgtaatttaaggcgaaaattgtggtttggtttgcagtagttgacgtgattcttgtgacctgctgcaattttgtgtaatgaaatgtgataatgttgacatttggacccaatttggtcgcagatgagaagggaatgttgttgcctgagccgggaaaggccagacggtggtcacgagttggaggagccaccgtagttgcgacggtggtcttacatgtcttctagaatcttaagattgctttttgtattgttttgttttgaatggttgagtgatgatatctcttcataagatgaacagagtctcactcttttagatctttccaatctgaagttgcgagagtttttaaaggttcgagatttgcattagaaacagagcatacaatgaattgttagtcagtgggtgttggctttgatatattatatagcaaaaagatatatagagatattgggagttaaaatgattactagaaaataaaaataaaaataaacatatcttatcttctctgtttagtggtggttataaagtacagaacagagaagaagcaacgaatctcattacaacgatgattgcaacacaaacctttgtctctgtctttttctttgtcttcttcctcgtatctctccctttcttctcatccgcagcacctccgtcttctgattctatctacgaatcattcgttcaatgtttctccgacaagacaaaatctccacaagcccaaatcaccgacaatgtcttctctcggacaaacccttctttctcctccgtccttcgtgcttacattcgaaatggcaggttcaacacttcatctacgccaaaaccagctatcatcgtcactcctcgctccgatatccacgtcagcgccgccgtcacttgctcaaaaagtttaaatttccttctcaaaatccgaagtggtggccatgattacgaaggtctctcttacatctctgataaaccattttttatactcgacatgtcgaatctccgtgatgtctctgttgatatcgccgatcaatcagcttggatctccgccggagcaactcttggtgaggtttattacagaatttgggagaaaagcaaagtccatggatttcccgccggagtttgtcccacggttggtgttggtggacatataagcggtggtggttacggtaatatgttgaggaaattcggattatcagttgataacttgatcgatgcgaagatcgttgatgttaacggtcaaattttagaccggaaatcgatgggtgaggatcttttttgggctatttccggtggaggaggggctagcttcggcgtcgttttgggttacaaggtcaagctcgttcctgtgccagaaactgttacagtctttagggtggagaagtatatggattcaggagcggtggatatggttcacaaatggcaatccgttggtccaaaaaccgaccggaatctatttttgagaatgttgattcaaccggtgacgaggaagaaggtaaagactgtgagagctactgtggtggctctgtttttaggcagagcagaggaagttgttgctttgcttggtaaggagtttcctgaattgagtttaaagaaggagaactgttcggagatgacttggtttcagtcagctttatggtgggataatcgtgttaaccctactcagattgatcctaaagtgtttctcgatcggaatcttgatagagcgaatttcggaaagaggaaatcggattacgttgcgagtgagattcctagagatgggattgagtctttgttcaagaagatgactgagctggggaaaatcgggcttgtttttaatccgtatggtgggaaaatggcggaggttacggttaacgcgacgccgtttccgcaccgaagcaagctttttaagattcagtactcggtgacttggcaagaaaactctgtcgagatagagaagggtttcttgaatcaggctaacgttctttatagtttcatgaccgggtttgtgagcaagaaccctagaaatgcttacttgaattaccgagatgtcgatataggtgtgaatgatcatggtacgaatagttatgaggaaggagaagtgtatggaaggaagtattttggagataattttgatcgattagtaaaggttaaaacagcggctgatccagataatttcttcaggaatgaacagagtatacctaccgtgcttagcaaggcataggcatggagtttggacatagaccaataatgtttaatgaaggagaatatttaccatacgactggaaatattgtttattatattcacggaactctatttatttaataagattctttttcatttaagtgtgtagcctaaaaagggttgatgttattatcaaaactgttgattgttggatgtagctacataatcttgaatttgtggcagaaattgtggaatttaggttttgatttgaattagtataacagatgatgatacatactcgcgagtagtataacaatttgacggacttacgtttacggtttttgtgtattaaagaaaattttgggttattttcattttattgcaagtaacaaaaggaaaaggtacataatcaactatgcatagtttaagattctaaagtgtataatgattttgcattatgcattcaacaaagatggctcaaaagaataatttcttaatcatttttttgttttaatctaagcactacttccgaagaaagtggtcaattatcagagtgtatatctcaaacaagatcatgaaagggacagaattgcattattaatttgatataaccaaacctatgataggaggaagtaggtgagataatgttacatctttaggtgcagtagtcttccatttttacttcgattactttggtaaaaacaattcttcataccgaatcacacatccaccttattgagttggaaaattatataggaattcgagttatggcacaagtacgtattgattcaaactaatagattacaaaagtaagctaaccaatcaaaatagtcaggtaccaaagtaattgacggataaaaaaaatgattatttaatgagaacctataatgcaatagctaaattatggagccagactggtgaagagttgaaaatttaataaattctgagtgtcttttgccgtacacgcttgttgttggtgctcttgtcgatttagtttagtggatcctgcttccttagagatagagattacgtatccgatgattagtcatgtaatctcgtcgccagcggatagtcataatcgcgtcacatcttttaaacaattagaaattatacttaaagacattttcttgttatttgctcttcaaaatttattatagcatccaatttcccaacgataaaacatcgcacggaccaaaaggatccaaactccacattgacacaaatactaaattgatcgataattttattgattccacaactgaaaaatgtcaatacaaagagactaagaacatacagtttatacggacagaaaataagacagtagtttgggtttcgaaaaacaacgaactatttgttctggacaagcttttattgaacaagaacttgcaactatatgttctggata

SEQ ID NO: 604 - DNA, 91570 bp, Arabidopsis thaliana
agcttttattgaacaagaaggtagcaacaactactaaaagaggggtaggcttttagggaaacgaacctgcatccattgcttctcatacgtaaccaaatggctccaacctatttcctccagcaaatccagtttaagttcgtagagtttcttattcgcagtctcgttctcgttttggatcaagtcatcaagtacctgaaaatcattatcagtcatgtgggtcactgattttagaatgaatcatttgcagttttttagtatgtattaaagattagataaatgtatttaccttcaatgcggtcccgagtcgtgatagccgtttctctcttagaacagtgagagtaccgtatttagatgatttcacgtctacccattttgtcagttctttgaaattctcttcgaatttatccttctggctactttcttcttctccttcaccttccttctcaccctgcaaacaatagaatagtgttatttcttagtataagctagaaaaatgctaatgacaccattcgtagttcttatgcgctatatttagtaactttcatatgcataaaatcagttaatcaccagctaaaatgttactctcttctaatcagatagactaagtaacagttaacgaggatataagtattggtcttaccttcagattctcgattctcgccatggctaaccctttctggtatagtgcatccgccagttgatcacgtgtcacctccatttttttcttcaatttctaatttaaaaaaaaacacagtcgggttgttatcagagtcgtagataaagttaagaatacaatgaaaaaaataacgttgtaagaaacgcaataagtaatataataacacacctctgcttcatcatcttctggttcagttttgtctagcaagaatcttgctagctcatctacgtcaacactgcgtactacttcgtttgcagcttctataatctgcaaaaacaaaaggaagagattcagctttcatgcttatttcgctgaccatcttacaaacccttgataggttattagtaagaaccaatgaggctactgagtgttttaaagttgaatattttgtttaatgtataattagagagactagtgcacaatttttgatagtaactcatttaaaactttaccttagtaagaaccaatgaggctactgagtgttttaaagttgaatattttgtttaatgtataattagagagactagtgcacaatttttgatagtaactcatttaaaactttacctcttcgtgatggctgattttgtccccagcatcagaccgagacagtaaaccttccaggatcttagctagtaatggagtatagtctgggtattcagactgccaaggaacatatgcccaagttaatttaacagtatttcagatttgcatacctttttcaaaactttcaaagttgacgtggcaaaaagcattattcagaaagaaaaaagaaagccttaggttggcaaaccttgagacaggtacacaactttctccactctgaacgctcttcctcagtttcttgttttagattcccaagaaatttgatctttgtgtcgcgaacctgattacaagaaagagcgttcattaaacagttccaaaacagtgtcaatattcaccaacaagtacttgctcaattatataatagaacgttcgcccatcaagttgagtaagagccaataagagtaatacgaaacatgtttctgcaaataatacctcttgttccaagcgttctgatactgatttagagcaagtaggggcagaagctgccttcttatcttcctcaggctgttgaattaagaacaaaataaataaaagttcaaaaaaattggaatacaaggatagactcgatcaagctaaacacaatatgagctcatgtagccagattgttccgcattaccgcatcaagtttcacaagcctatgctaacaagcatgccagaccagaaatggtagtttatttagataccttatttggtggaaccacatatgatatcggataagataccggattatcctttggattcttcccttctttttcatcaaatgacaatttcccatatgagatttctcccaccaacatagatccttggggggtattctgcaggtgaaattaaaattgtacatttgagagagatatgctcatttgatcagaacatcaattatacaacaatctattaaaccttgggtagcttgtcctttgttggtgggcccagataaaatgcttccttcaccctgcagggtgataattgaggtgataaacacgttcagagaacaaccaacgtagcaaccagaaaagtataaattggtaagtgagccaaaagagtaccctggcattagaacagaggacttaaaggcaccatttccagtgaacggaccatctggttcagaatgtaaattcagccgaatctcctgcatcgccagcaaaataaatggaaaaaaatcagctctttttcaattctaatgtcgcaaaaagataaatattgacctcaaaacacacgcagagattttactccaactttgtttcatctagccttttcaatttaaagtagaacgtatttcagtatcttacccccatatttctttcaataaacacagtgagctgcttcaacttttccagcagctccacattttcatgcctggtgaaaccaattagcttttagagtagaagactaaatacgaaaataaacattgtgaaaaaaagttgtcaaccatgaaaaattatagtttacaggaacttgtcaatcaatcatgttgagaagattgttcggcctgtagattagtatgtacaaaatctactgtttaaattctaaaacaatcagcaaccatcaaagatgtagcacaaacctcagatacagctgaagtttatactctcccttgggaagttttgaagactcaggataaacgtcacccattgcatatacacgctgaaagtatgtcaggacaacgtgttaaggcaagaaaatactatcatttaaattttaaagtaagaaataccaaatttgctagacatgaaagcagaaaagcgttttcacagtacataaccgagctatggattcacaaattttttgaaatgcatcatgtttttagttgacaatgccaagagaatttaaagcttatctatacttgtattacccatcctattaggtggcactttcaaaagagtaccttgttagtatcagagatcataaaaaactgggactcaaattttgtgtcatatatgcgattgttcaataatggtatatacggtttcacttcagctgaatcttctaatttgaacttgtagctgcagaaacaaaaggatgagaattgctgtaaaaaaattgatagagagatagacaagcaacaatagcaagaacgcagaagcataactcacgttaaggtcaatgctagtatctgtttgcccgacagtagtctatcacggccagttgatagagtcttcagttgtgcatcaataggctgatatggaactcgtatctgcagttaaaacaaaacaccttccagaagcaattccacaagcaattacagaaaaggagaagatacaatcattaaatacaccgtaccttgttcaggacagctatgggaacaagtttttcagatgccaatagtgcttcagcttcaacttttattggtgcttcacttccatcaagtaacaattcttctttatcgacaccaactccatggaattcaatctaaagtaccacacataacttccgtcaactcatttatgacaagtcacaacgtactcaatgtagtgagcatgcgtgagcgaactgaacacagaacttcgctcatagcattaggtgtaacaacaacaagacattcgttttcaaaaccactcctaaaagagaatgcacacacatgagtgattattgctaaacctgagacctaacatctaactaaggaggctaaaactggcaagataaccaattgcagaaagaattaagcaatgtattaacatgggccataatataaactagtatgagaactcaaaggaaaatcaggaaaccagtaggaaaaaaggtagggaagaacaggtctaaaataataagtagagtttacttgacacaggatgacccaaaagacaaaacaaaacacaacacaagcattttacattccttatgcaaatgccttaaaagccttgatattcgcacatataaattctcagttcctacctcaaagtcaacgatagttggttcacgacttccgaggccacttgaccaaaattgagctatagctagttccatcgtttgaccactaaccacagggaacacaaagcttttagcagacggagatgcgaaagttggtgcgctctcccacttgataggccttcgcaatgggcaaacctgcaaattgagtaaagattagaaccagcagcataaaagtaatgaattatccttaagcgtgccctacctgaagtgtatcaatgtaaaatcgtcgtgtagtatcaaaccccgaagttcgcattgtagcctcagcccatgttgctccatgtggtacctcgatatatcttcgttcaatgtggcctacagttggaattattgaagaataaaagatcaaagatgtatataagcctgccgtttcagaggacttgtttgctttataaagcacacataacaaagtccacaaaacctgagatgaaagacatttgctgaaatgaaataactggaggttgatttgccacagtcttgggaattattattgttactgggattctgaaaaggggaccacgctctggtgctttgcaatcaatcccataaacttcaaagtaatgcacaccatccccaagatttgtgggatccacaacaacgctgaaaagagatgatataaccttactacagagacaacatgacacgaaaaagcaaacagaacataagcagaaaaatataggaaaacactaacttgaagccacgtccattattagtgagaaggagatagtcaggaacccgtacaactccttcatctgtggagtgcaactcaagacattcctcgaaagggacaagttcctttaaattacttgcaccttcatggaatttcggatcaacttgtattgtccactggaaaatcaaaactatgcttgtttcacataacatacaggagagataacaaaagcttgaatggaaaatagactacacatctggtaggagataaagtttgccaagaaaaattctggctccatgatagggcatcccaagacttagtgttccagaaacagatgcatatggcatatcgtttgaagataatgattttttatataaattttaagttagcatgcatttaggcagattactatgcatactgctgtgatatagaaacgctcacctcagtagactgtctgcaagcagtaccctcccgcaggtagatgcctcgtgatgttggaactgcgttaatagagttcaaaatcttcataaaaaggaagttatattgtttatcgaaaaaccccaaaatcttaggaaactttcccaatgtaacagcaggaagcccttaaattagtagctaggttccagtaagcaagttttcaataagctactagcttgaaattgttttaaagaagttcaaattattcgtttacatacttgttttaccggagagattgacctttatctgataaaatacgcatggatagtcctgaaactgttttaagtattcatatgccctgtcataacaaaataaatacataaattatctgaaatatggtgtcaaattaattacacagtatagaaccttacttatcaacttgcataagcccttgtccagtagttagtttatcttcaggtagatcacctactggtgtagatgtattttcaagggcccttctcacactgtacgggctaactgggatgccctcagcctgcagaagtgtgaaagaatgtcagcactcagcagcagaactaaaaagaacggaataggaaacggatgtgcagaaataaaaagtaatgttgaagaagaaaccttcatagcacttagaagtaacgcaattgccccacaggcagaaggagatgccattgatgttccattcatgagcatgcgtctttgaagcgtccatgtaggaacaggagcaacagccccaccaggtgcacttatgcagacaccaagatctccatcagatgttggcccccggcttgacctacaatataacaataactatatcatgccagctacaactagctgtagaataattccaaagttaaaaaaggtgaaaataccaagtgtattcaagcccctcactgggaggttccaccactgaatgggcacctgctgccattgcaggagaaacatacgcaccaaccccaatgatactggacgttgttccacccggtgctccgactgttgtcaaagctggaccactgttgccagcactacttacaaaaattagacgtctcttgttcacagcctaataaaacatggcagaaagtccataaacgctagaagaaaagcaaaaaatacaagctaataagtgctgcccaaataaagacaaaaggatttgaatgatacttcagtaacaagatcaacaaagcgcccatagtctggaagtaatgctggctctccatagctcatgttgacaagatcacagttatgctgtaacattattataaaagtcagtatatacaaaaaagaaacattgaacgtattgacttgtgtcaatgcaaacctcacatataataatccacaaatatatgaaattcttcgtgatgtttaagtaattcaagagatatacgacttgtttagttcaaacttcatacaatatactttcacgaagttacaaatgattttcagctaatggtaaattcatatcagctgatgaattattacctctagggcagctatcaatgcccgagtcaatccagttccggtctccattgaacctaatcgcgagtctccaattttgcaagatattatttgtgcaccaggtgccacaccatttaacaaatgctcctaacatacacatagaaggtaagttaattggttgcaacaaatcatcaatgtatctaaattatatagatgcgttttgcacctcagggtggtgtgcagtagctattccagcaacatgagtgccgtgaggagaactatcagttacaatgcttagaacctttccctcatcatacacgttagcaacaaaggagcatgcatctagtcggctaaacacgccatacttccgttcaattctgtagtacatatttgattgagattaataaaataaaataaaaaaattggtgaacaaatcatgcttccaaacgaaaagttcctgaactttcataagagatagatgtttaaaggaagacttgccggtagttagtcagtggggagaagtctgctagtttcccgctatctggatcctcttccagactctgtgtatcaagtgcaaccctccatacttctccatcatgccacacaacagcatcaataacaggccctttgtcttcatatttctacagaaaaaacaattgatttacagaacagattcaagaccacagcgaacaagtacacagacataaaactaccaaagggcggtctctaaacttacatcagcttgttttttcagaaaatcaactttgctttggaggtcttcacgagttttcttcaatttcgcatcttccaccttgctgtgcttctggaggcaagaatgaaaaatgaggttatgatagaattgagtagcactgtctaactcataacatctacaatacagcaaaccacaatcagcatctccctagtacctgatcgaaatcatacagattatttacagccttggcaatttcctcctgattcttttcatcccaggatttccttctctctttctgtgtaatgacaaaacaagtcttagcaaatgggattgcagaccagatatgtaaactctggtataagatttaatgagtagatgaaagtaatccaacagccaaaaaggtcacaactctaatcgctaccttcacacgagaagtcaagtcatctgtaaataactgataaaccaacttggaacctacacgccactctccagtgggatttttccatgaagaattgacaaccaaagttgcccctgtttaaacaaaagaaattatcaacgcatatcgtagcaagaaagagaaagcaaactatcatgcagaaatcataaaacctctcaaatcaccaacctgatgctccacgaatatgaccatcttcattggctttcaccactgtggatgtatctatatctccacttccagtgctaaacgataacgtaaaatgaccatcacgccacagtcaaagaacactaaatgcaaaattcaattaaatcacaaaactataccagtcaatgacgtccaaaaccttgggttttccatcagaagttacatgcaagccagcagcagaaggatcaaaaccagaatctggaaaacacaaaattccatttgctcagttcctcaatcagaatttttacttggagagttacaacaccttcttaagaaccaaacaatcgctctactatctgatccaagtataagcaacccaactataacataaggcttatacaaaacttctccattcacaaattcaatctagagaatacaaaacgagagaatatccaagtaccaaagatagctataacaacgccacgaccgtcgtactcaggatgagcttcgatgaagcaatccgcacggatttctttcttaggcatgagagaagcaataaaggtagattcgttcagcttgaaattagcgacagaagcattctcagctccaccgccaacggctccaccaccacctcctccgccacaaccgacgcgagaagccgtaagagtatcagaagaagaacaaggcatcgccgagaaaccactccgtcttaatcggattccacgagaacgagagcagcttcttcttctgagtcttcgatgaagaagaaacgtagaagaagaaatgaaatcgcgaggaagagaaagtgaagaagaagaagcccaataagaagtacacgacgggcctttgttgattaacgcgccgtgaatctgcagctgcagactcagatccatcttcgggatgtgtgttaattaacaggggtattttggtcaaataacagctgagtcgatgcaccgaatcgtgtcactcgttagaggtcttttgggttgtgaattgttgtgtcaatggagttggtggtggcttactccaactggtggctttcgcttgctctatctagataacgatattatttagatttaatttcttagttacatagtctttaattgttgttttgacttttataattggacataaccttaatctgattgcttcttgggtttttggtcgctcgtgtatgagattgttctccattgttgttgtctttagcttaattcttcgtggtgagaattaaactaaaaatatgattagtagatttgtgagctggttttattgttttaggactgaacatctgattttgataccacccatatgataatatatatatgtttttgctgacttgtaaatatcatataatgaaattgaaggtattacaaagagctttacctaatgatagtgcaatcttggcaaaaaagataaaaaaacaagattacaatatattcaagaacaacaaagaaaagaccgagctatcgaatccaaagaagcatgaacttccgccatcttttcttatgccttctacccgagatagcgttgcggatatctcgatcaatattcttaaagataattggaggagggatgatttggttgttgtggagaacattatttctttgcttccaaatatggtagataatattatcaatatatatggaaactttacattcactcatctgaattttcctaatttttttgttatgtgttgtttgtacattttgaatattgtactttattatctgtttgttgtagtcttgtagagactagagattgatcagttgatcacactttgttcctatatgattagactgagcaatagcataacttatttgataaagttaggactaccacatttgatttgtaattaactattttcttatacggtatgtgaggtctgtgatctgtcagactaattgaaatggctaaaacttgtgttagttatgtcatgtggatatatctgaagaatccctgaaaatgggggtatagtatagcatcatttgatgacagcaaaattcaaaagtcatgaagcatattataagatttgtgtgtgtttcggtctctaccaacaatcgttgttgctttaaagaaaaccttatagatattgctcataggtatatgcatgcatttgtaatgggagtttcgaacacacagctgaatcttaacagggatcagtggggttgataaatttgatattattagaaagcttcttgaatcttttaaacttgcttactcagatccctcacgttcagaaaaattggacggttattgtgttcttctcatcatgggtttgctttctagcttcagctatatctaatcaaaattttgaccctattttttctcgttgcctttttttggtatgacatatatatccaaaacaagtgcaaaaatcttgattcggattaggtgtttgtggttgtgagagaagtacaactacgaatctatttgtaacactatatcattcaaatattcaatgcatcaccaaatcaaagacttccagaatgtaagaacgttgacacgttttttgagcaatgccatagagttgacatcaagcatgacgacgttaacgcttcatttctttttttaaaacttatttataatcttcctcctaagtgagataaaattgtattaatataagacgtcatttttaaaatcctttgaatacaagagtatgggacattcaattttctttgtttcatactagcaacttgattatatattttaatttgctccagctatgtatataacgcttacaagttttatacaaggaaaactatgtattttaagaataaaagtgtggaatttatacaccgtttgtgtaggttttaagcgtaagtcagattgttaatctagaaaatattgttatccagaagagtgaaagacccaataaacttgtaagtgtaagtgttactcattctgttttataaagtttatgtatattaattgaagattgttggcacaaaaaacaaaaacagatttctaagggtttgtacacatgctaaaattagtttttaccaaatcctattagaatttatatttataatgttttcttcattctaataactaacaaggacaaaatacaaaatgttacacaaatttcaaatatagacatctatctttatgaattttattttttccgaaacatctactattattagtagttctaatatgttagctagaagtcatttttgtgtaataatatccatctacaccatgactcttgacaaaccaacgttaagctctaaagttgacaaaaatacttaaaatggatataactgtaaaaggaaatgccctttaattctgatttatttatttttgaaattattttttgttggctttttgtaacaatggaagtctacatctaataatgagccaaagtattctccatcaagtaataattatctccacgtttgaaaaattgcaatatttgttaaacgcgtatacatggtgatcaccattccacatcaactcgcaaatagtctacttttgacccgaagctaccgtctttgttttagctactcgtcaaaataatcttattatattcataatagtgacgttgatttaatatcatgatcaaacaaataaccccaaaaatgaaaaatctatatagcctcctgaactcttcttctctctgaaactcaatcagtttctcaacgaatctttctaaacaagacaaaggatcaagaacactacttgttctttgtctgagacttcaaacacaagaaaccaaaaatagaaaaagatatgagagagctttttatgtatctatttcttcttttcttagttctatgtgtcaaatctgtttattctactccgacaagagaacaattccaaaattgcttgtccacaaaacaattcaattctaccctcaaaaaccctataaatctcaccactcatacactagattcccgagttcacaccgacttttccgagtcttcatctccaaattctagtttcctcaacttgaatttcacaagcttgaagccgattctcatcgttaagccaaaatccgaatccgaaataaaacaatcgattttatgcagcaggaaacttggagtgcaagtaagaacaatgagtggtggtcatgactacgaaggtctatcttacctctcactatcacctttcataatcgtcgacctcgttaacctcagatcaatcagcatcaacctcacagacgagaccgcttggatccaatcgggcgcaacactcggcgaagtctactacaagatcgccaaaaccagcaagatccatgcctttgccgcagggatatgtccaagtgttggtgttggtggacatattagcggaggaggattcggtacaataatgaggaaatacggtttagcgtctgataacgttgtggacgcacgtttgatggatgtaaatgggaaaactcttgaccggaaaacgatgggagaggatttgttttgggcgcttagaggcggtggagctgcgagttttggcgttgtcttgtcgtggaaggttaagcttgctagggttcctgaaaaggtaacttgtttcataagtcaacatccgatgggacctagcatgaacaagcttgttcatagatggcaatccataggatcagagctagacgaagatttattcatcagagtcattattgacaacagtctagaagggaatcaaagaaaagtgaaatcaacatttcaaactctatttcttggtggaatcgatagactgattcctctgatgaaccagaagtttccggaactcggcttacgatctcaagactgttcggaaatgagctggatcgaatcgataatgttcttcaactggagatcaggacagccgttagagattttgctcaacagagacctaagattcgaggatcagtatttcaaagcaaagtcagattatgttcaaaaacccgttcctgaaaacgttttcgaagaagtaaccaagagatttctcgagcaagatactccactgatgatctttgagccattgggtgggaaaatcagcaagatttcagaaacagaatctccatatccacacagaagaggtaatctgtataatatacagtacatggtgaaatggaaagtgaatgaagtcgaggagatgaacaaacatgtcaggtggatgagatcgttacacgattacatgactccgtatgtttctaaatcgccgagaggagcttatttgaattacagagatcttgatttgggctcgaccaaagggattaacacgagtttcgaagatgcaaggaaatggggtgagacttatttcaaaggtaatttcaagagattaggtttggttaaagggaagattgatccaacaaatttcttcaggaacgaacagagtattcctcctctgttttgagtcctcaatacaaaaccagatataaaagatgtcatttcattttttcaattataatagataatgtaactttctgctacaattgtaaaagtgagatgtacccaatacggtttaagcggaccgagaatagtcaattcaaagaccaaattctgaatgatattaaaccactaaaaatatgttcaaatatggtgaatagatcgtatacagaagtagttaaacagtcattgaatcacctgatgaatttagaatacacaatatcagtgagtttttcgacactctgaaaaatggcaaacagaaatccgatttagctcttcttcgcagcggctttaataccgggaagtgttccaaagactttgtcccatagagaggaagtgattccatatcctttgtcctgaatcctaaagtgatgattcaggtggtatttctgtaaaatgtatatatcaaacctcatcagaaatgcagaggaataagtttgaacgcgaaaaaagaggagatgtctagagatggttttccttaccttaagatgtttaaaggttggttctttaggttgaccatggtgtagatagtaatgggtaatatcatacatcacatagccaaacaatatgcctccaagaatagcaggtgctgtagcaggagtagctaggagatggagaagcttccatagctaacaacggaaaaagaagagcatcaataaaagttttcgtattgaagtaaagaatgaatgaaagagattccatatctggatcaagcatggatacttactggaaccaagagaatagctgttgctgtaggagggaaaacaagacgaaggccgtcttgtgggtgcttgtgatggcatccatgaagaagatagtgtgcagtgtttgccctgaagaaaaaagggtttgaaatgaaacagataagcttcgtgatgaaatcgggtgtttctatgttgcataatcacaaatacagaactaaccagtaactcttggtttggatgtggaaaaggaagcgatgaagcgtgtactcgagcagtgtccacgtgagtacaccaaaagcaactattaaaccgatctggggaaacgtaagtcccttactcgccgatattgaaagaacgtagcaaacaactggaagccagattgttgggattgcccaccaaaccgtgcgagtcaaaaactgctcaaatttcccaaaaaaaggtttaagccaaacatagaggcttacatatatgaagataaatcttaaaaaggcagagttgttatgttacctcccaaaaatcactttcgaaaaaacgaggaccctcaacgcatacaataggttgatgaatccattcctgatattcttcgccaagatgaccaacctgacaaggatataagtttctttgtattagtaatttgttatgcattgtatatatcaaagaatctacgaaacagctttaaagattgacagagaattctccatttgatactttgtcttgtcgatctaatttgttaaaaaaaggctatgcggaaaagacgtgactgagcgcatcacctgaaacacaagtggcttattcaaatcgactgtgtatcgttctgcaaccatctttgccactttatgagactgattgtttctgcaagtaaatccaaaaccaaaaatcttaaatgcagtactgttgagaaacaaacattgagaatgaacaatatatcattaaaggtgaaacaaaattcacgatagtgttagaagatttaagttctagctagctcataaaagaaattccaaccaaattgatcccaaaacaataaaaagataatcctactgtgctgcaaaattctgctcatatgaaacagtactcattcaaatacaaatatcaatagaaaaaaaatgacaacatcttcatctgacaagaacataaatctgttgatcatccaaactgaaaaattcaatgtcaattactaggaaatctattgctttaaaggcaatctaaaactaaaagactgcatttggcatctgaggatttggtaaagctcgatttgcaaaagagaacacatccaaagaagaaatctaatcaagggtcaatgatccaacataagggagacattataagattataacattctcagcattacctaaagacagagccaatcaacgaagagaaccttgacaatgtattaaagaacaaaactttcagctatgaatcaaattaaaacatcaaatcatcaaatcccacgagagaaaaagaaacttagacgaagaaaaaagccaacattcttcgaaattcacgaaaaaaaatcccgaactttttgcagaaaagatctataaatcggggaagagataatgagaaaaacatagaatctgagagaagaaatcggaagaatttgaagagaatgagactcagagatctgaggattattttaccttagaggagagaaaacaaacaagcctctctctctctctctctctgggcgtaagagactcgcttactctctccaattgaagggaaacaacaaatacagacactctgtcacagaagaaagggtgggattttgcttcgcttgaatccttctgataatgttcggcccacgtttcctacctttttttttttgttctgttttagccattaaaatattatttgtataaggtcatatcttttattttgtataaacaatattttatttgctatttttgcaaaactaaaaatagtttttgtagagaaataaaaatctcatatctttttctgaattaaaataatattttatttactatttctaaaaagttgcaaaattaaaatagttttttctaaatgagaataaaaaaaatagtattttctaaatttgtgttgtttctagagtaacacgccatgtatatgtagacaaatataaattgttttgctattaaaagatgtttaaattttggaaaacaaaaattacattttttttctaattttctaaaagcctcttcagcataaatcacagacacagatccgctttttgatttggaaatggaaaataaaaacaagaatgtatggctagccaacattgatcagatggttggtcggtccattgataatatgaagttatctcttgtcactttcagagaatggtttttctcttctctagggagtatgggtctaatatgactactactatgcgtctatgcgcctatgactatgagtctatgagtaagggacttttgcttaagtatcaccaaccaaagactagatgaataaattctgcagataattcttattactcatctctctagctgctataagtgagatctatactaaaattgtatatctacatatttgatcttataaataaataagaatctaacattctttttcggagtagagtaatgttagaatgttgggctggtgttaaaatcttagaaaagagagatagaaatacctaaggtgaagatgtaaatgtaatggggagctaaaaggaagtgaagaaccttagcttaaccaaggacaaagtaaatatcaatttcgacgtgtttgttgtggtaataccgtaatactaatccggatagatagatacacaaatgataaagttatgcataagttttaaatcaataataaaactaacaaaaatagaattgtagatttacaaaatggtataatatgagaaatttactaatgaaattattgtttgttgaaaaaaaaaattaataacaaaattattgtttgtaacatttctcattgttcataaagaaaataatcaaacatccattatagataattagattctgatatcttaaattaaaattgaagattttaatatttttctgaacacataaaaggaaagggagatatatatattttatttagctaacaatgaagtcataaataaaaattcaatagtaccttcttacaataaaaatgcttaatacatatgaatgatgtagatatggatgtgatgtgttgttttattactttatatcaacaaattaatacatatatggacacgcatctagaatagatattagcccctttacatctgttgggaactattcatataaaagtaattagacatggccaaaaaccttaatgatagccatgatatagcaatgaggctttccactatataaataatagttttcattatgcactttgagagtttcaaaatttcaattaggttgaaatattaatcattctttcatatacaacattacttatttcaaacactttaacaacaaaaagactttgtttttgtcttctaaatagtccacaactaagatacttgtcttagattcgattccccatggaatatgtagtcttcttaacataagctccaaatttgttgtttaattttgttacatgcaatctttttagaatagtcatgcactcatgctaatgcaactttgacataaacgttttgtttttttcttctaattaagatgaacttgaatattgaaaaatgtgatgcatcatttgcaaaccacctacaaatgaataccaatgtttctacatcctctttttaaaagtttcttcaatcggaattggatccaatttcgaaagttgatttagaattgtcaaaaagaaatgctaaaagccgcacgatgacaaatccgagacatacgccataacaaaacaccaagattatcttgaacgtatcaaatgttttaagaagtcaataacttcgaatatttttgtctcgagaacacgactaggtaaatttggtcatgtcatcatgtgtctccgtcaatatcgcgccacaaacaaaaactattccacaagttagtgctattttggccgacacaaacgttattgcgctctctctgcctttcattatcaacaatgaccatttttaagaatatattactcagttttttttggttcttcataacaacaactttgactctttgaccatcataataacacgatatatatctctgttaacaacaaaacaaatttacacagtttcataagcaaaccaattgtctagcttcgaactgccaaccacccccaacaacaacactcccgtcaccgtctctctaccgtcaacaccgtcaccgtcaacaactaacggcgatccctaaggcccaccactgccacggacttccacaaaaaaaaaagaacccaaagtctgaatcatgttttcctctgtttcagaaactggtttgagatttgcaacagaaaactctgagaatcagacaccaagagagtgtcagaccaatagcaaagactttcccacacagcaatccaacaagaacaatcactatcaaaccaatcactttcgttagatcctcttttggtccagtctcttcttcttcttcaacctctgtacaactctctaaaaatggcggattcgaactcaaatcatccctctcagagatttcactcccgattctctcatctgaatacaagctagaaacttctgtcatagacccttcttcttcagtttcaagttcaacttcttcttcttctttttctttgttcttcatcttcttcttcttcttataactccttagcttctttggcacaatcttcttcacaatctttgatttcagcttcgcgcttttgcttttctcagtcttaaacataacatctcttatcgtctgcatttctttcttctcatccaccacaagtttcgccttctccaatgacgacgaatccgattgaggagtgactctaatctcctctctaggttcttcgatgatttcaaagtagacattgtttcttctgtcatgcgtcgatgttgattcttcttcttcttctagcttctctttatgtcgcttccctatgagcttatcgatcaaagaatctatccgaatctgcgcgtcgggacagagattcaagtacgtgaagacacgcgccaccgcaagctcgaggaagagaagggcaaaagcagagagcgtgatccccacggcgagcttcttcgtgctcaaggcaagcacagccaccataaaaaccttaaacaccaccactatcaaaacacaccctcctcctcctccaccgcgatgaccaccgtcgtcttcatggataatctccggaacagaagtttcctcgatctttctcaccaaaggagaatcctctgtaaccaaagctggatcaagcttggaaggaagagacatacgacgctgcaaagacatatgaggaggaggtggagacaaaacacgcgtttcagtctgggctttgttgttcttgttgttacgttttgaagattgttttttgagacgatcgcgattcttaacaaagagatcgattaaagaagttgggaaaccagtttcaacaacgagagatccaccatgtttaggagattgttgaaagtctgatacgaatctagagatccgactagatttagatttcttccaaggtaaaggcatgttgaaggaaagaaagaaaaaaggatttagacttttaaaatcttttttttggtgataaatcacctctccgaagaacccagaaaaaagggtttgtcgaagagatagagaagaagatctggttggaagatcaaaaccattaattagacattttggagagacaaatgcaataaatggagaagaaacctcttcctgccctctttgcgcagaaagtgaaatgagagagagagagatatgatgaggaaaccgctaaaaagacattgcaggacgacgcgtgccttaaccaattattttacttccttttttttgttacaaaaaatttgttatttatttccatttttgttaaatttgtacaactgtactatgcagtttttaagattttacactttctgctgtaccaaaatattacctatgtccatctgaccgaaattattaaattaattctaataaaaaaattctaataaagctgatcaatttatttattttagacttaaactttacaaaaactaatttattcagcttaatttccccaatatgtaaaaacattaatgactacaagtatggtataacagtagcttcaaaatcttaattcatttataccgaagcaaaagtgaatttggtaaaccggtgaaaaaaacaaaccattccgaaacagatttaagatttttgttcaattatattttgtaagcaaacaaattacatcgaactaaactaaactaaacaaccgaaatatgcatccatattatttgtgaactaaacatggtaaaccggtaatagctattttaagatccttacatttttaaaatttgtctaaagataatttgaacaatttcatctattgttaaacctatcaacgaattgtgtctatagttagatgctaaaaaaccttcctgatagatttttttttgtttgaaccgttgattcatataataaacttagaagcaagacatatagtaatattttttcacttgaaaattgatatttatgcaacagattaactattctaaaatcgtcatatttatgagttgttatttgcctgtaagccatttacttctaatttctattgtcagcttatctaattaatttggtgatttgctaaataagtaaaattgcctattattggtgtgaaaaacaacaaaggaaaatccactaatgacgcaaattcgaatcttttggtctttaatttcaatatccgaagaaaaaaggatctaatcaataatataaaaaagcgtagaaaacaatttgcctttatataactttcacgagtgattttgtaaatattttataattaattaacaaaaatatctaaggaaagatatttgtttttgattcgctgtataacagcacataaaggaaaccaaatcgaaaaactatcagggtaatatcaaaaaccaatagaagtctaaggacgaaaatgcaaattatttgagaaactagagaaaaaaggaggtaaactatatatagccgattactactctcatttgtttttatacccctcaatcataaacaataaacagagggagtcgccaaattttctcatcattttctcgagaaaatagactaaaagcgattcccgagagaaagaaagaacaaaaaaaaaacatccgagtgaaaatgagagaaattcttcatattcaaggaggtcagtgcggaaaccagatcggagctaagttctgggaagttatttgcggcgagcacggtattgatcaaaccggtcagtcatgtggcgatacagatctacagcttgaaaggatcaatgtctattttaacgaagctagcggaggcaaatacgttcctcgtgctgttcttatggatctggagcctggaactatggattctctcagatctgggccgtttggtcagattttccggcctgataacttcgtttttggtcagtctggtgctgggaataactgggcgaaaggtcattacacggagggagctgagttgattgattctgtgcttgatgttgtgaggaaggaagctgagaactgtgattgtcttcaaggtgagagagatacgctttcattttctaggttttcgttttctgaatctcgtttgtgttttgatttgttagcgtttcctgttcctgtatgcattcgaattcagatctgctattagaaactccttcatagatgctttgtttagcgtttgatttcattctctgattgatgattcatttgtggagcaggttttcaagtttgtcattctttgggaggaggaactggttctggaatgggaacacttcttatttctaagattagagaggaatatccagatcgtatgatgatgaccttttcggtcttcccatctcctaaggtctctgatacagttgttgagccatacaatgctactctttccgttcaccagctcgttgagaatgctgatgaatgtatggttttggataacgaagctctttacgatatctgtttccgtaccttgaagcttgctaatcctacatgtgagatttacaaaccatttattctcttgttttctaatattcatgtgattgtagttttgaaaatcctgacattgttcttctttcttatgtggtggtgtatcttagttggtgaccttaaccatctcatctcagctacaatgagtggtgttacatgctgtcttcggttccctggtcaactaaactctgaccttagaaaacttgctgtgaaccttattcctttcccacgactccacttcttcatggttggttttgcacctttgacatcaagaggatctcaacaatacagtgccttgagtgtccctgagctaactcaacagatgtgggatgccaaaaacatgatgtgtgcagctgatcctcgtcatggtcgttacttgacagcttctgctgtcttccgtggaaagatgagtaccaaagaggttgatgaacagatgatgaacgtccagaacaaaaactcctcatactttgttgaatggattccaaataacgtgaaatcaagcgtctgcgatatagctcccactggtttgaaaatggcatcaactttcattggaaactcaacttcaatccaggaaatgttcaggcgtgtgagtgaacagttcactgccatgttcaggagaaaggctttccttcattggtacacaggagaaggaatggacgagatggagttcactgaagcagagagtaacatgaatgatcttgttgcagagtatcagcaatatcaagatgctacagtcggtgaagaggagtacgaggaggacgaagaagaagaagaagcctaaagaaaagatgattgattattacttttgtaaggctgtaagttcgtcgcactcatttccttttacctctttttctgaattgggattctctctttttgtgctttgtgtgttttgttattgaatttctttcccaaacctaagatttgttccagagtgtaatcacatttgcctatgcttctttgttttgtctatgaaaatatttcaatgtcaaaagcctatacaatttctatgatccaaaaaacttgataaccggtacaaatagatcctacatctctgcggttttaagctctccctgcaatctttcttcttcttcttcttctgcttcttcctcttctgcgatatctgcccagcttttctttgattcactcttcggaccatctgctgtatctttgacgaattcatggagatattgaatcatgttctggtccagtttctttcgcttcatgggttcttcttctcctctctctaagatcttcatctgttcagagccaaaaggttgtggttttccaaatagtagctttcgagcagcacctctcgtctcttcttcaaacaatctgcatctgcgtggttgtgtatatagacctgcagagttcggtctcacagatgctggagacgaagaaacatctgagtagttcttgtttgcggttccaggagctatattttccttcatcctattcacaaatgaacatcccgcgtagaacttctccgaaagatcagcttctggctttttcgattctatttctgctaacatttcgacggctcggtcataagactttgcgaatggttcatctccgcattcactctctgcaggagaatctcttacatcatcaagcagagatttagcttcaggaattcgactcatacgcatcaagcagattgcaaggttacagagtttgtttttgtctcgctccaaacccaaagctctcctgttcataatcagttgaatataagcaaaactcacatgaccagacagtaatcaatatttgggattttggtaacaaaaccaaacctgtaatgctgctctgcaattccatagttatgtaactgtaaatgaacccagcccaagttccctagtatcctaaaatgttcaaacaacaatggaaacgtcaattcaagagacaaaacactcatcaagctaacatgagaatacaccgaaactttctcaccttgctttctcttgctcgatagtcataataacatgttttccttgaaccctttttgctctactgactctaccaccaaatcccattccttgttcgagtgtttgcagtttgtgctcaagtaaaacagcttcttcttcaattctccctgacttctgcaaaaacaccaaaacccatttccaagttataacaactccataacacttgctgcattaacaaagaaggaggctgcattaccttgtagagctcgagtagcaagttatcaatcgagtcttgagactcgaaagaacagagataccgaaaggatttaatagcttcaatcccttcatcagatcgacctaattgtttcattacaacggccatatccttcaaagcactatcaactcgatctccagcgtttattgcagtccaaaacaatgatatagctctgttcggatctttatctatcaactgttcttccacataaacaatatccatttgttagaaaacctcaatcatagacaggttcaagaagatcactcaaaatttgaaaagcttttaagagattttatcacatgaggaagaatctagaattcctaaattaggtcaaaagaaaaattcccctgtcttgttttcgcgggaaaattgattatacctgcgcgtgtttggctctgacgtaaggagaatcaccagaaggaactttatgaacaatgtgaaacggatcacgtctctccgacgacgaagaacaagaatacggtggtctcctcctctccgtcatcggcatcgccgccacatgatcacttgttctcgccggcggcggagtatagtaaactccaggtggagcacgacgctctacgcagggacacattttctttttcgattctctctgtcaatttactcagataaagttcgagaaagcttttcccagaattcaaattctcgtgttcttcagaaatcgccctcgtgaaaaagatcaagaacgcaaatgctttgaaaacgaatcagtgtcgttgaagaagtgagaaagtgataaaaatcacaaggacttgtatttaaataaacaaactttaacgtaggggcaaaaagggtaatctactgatctaatctttaaacttcaacggaccagtagacttggagacaaaaggatcttgtaaacataaaggttcgattttatggttaatctgcaaaagctcatggcaaaagaactaaacgagctttgagttttatagatgaacacgtcatcacattgcttgcaatatatatattctctggtagatactactctagtcaaagatcagtctttttcttttctacatcttctttcttccactcccagatgactttataaggctgcattgagctttctgcaacattctcaacagatgaagcttcccgtctaaaaatagctatctgagaagcaaatccgggttctacttcaccagacccaccaacaccgctaaactcgacgctgtagttatggcgtttgccgagctttgatgcccattgattgaactgttctcttgtccactcgaatttgtggtcatggttcctgaactttggaagctgtggctccgagttgttttcttcttgggtttctggtgtagaccgctggagaattgtgttgaactcgtagtttggtgttgagacaatcaggagcttggggtggaacaagctcagaactttttccccaaattcacaggcttgatcttcttccatgtgttcaataacctacagattaggaacagattatagatttaacgccgaaaccagacagattgcttttgataaacgtgtacaaaatttgaaggattagagagcagatgagaggtggacctctaagcaagtgccgatgtcaacgtcatgcagcctggagtcaaactcaaggatggaaccatcataaagtgtagcagatttgacgttgcaagcttccttgtttagttttacatgtagcatctaaagttgaaacacaagatacacaaaagcataagtaaatctaccatttcttttcaattacacaaaatgcagagaatcatgagtggtgcaaatacattcttcatcaaacatttatcaattattttgatgcattagtctcatcaagttatgtctacgagcgggaataaaaaacagtgatgtgtgattttgcagaccttagcagcacgggcaagaccctttggcgaaatgtcaacaccgatgatggtttgaagtgaagttggatagtcaagtagagagtctaataaacttccagatccgcatccaaagtcaacctgtaacaagaatagaggtgccatcttatgcttgtcaaagatttaccaataaggacaaaaagagactgaaacaaatgagttttaacaaagtcttgaattcataatcctagtaagcaggaagacattaagatatatagagcttaccaaagtagaagcggatgattctcttatatgtttcagtgcatattcaacacgttgttttgaaagtggaggtttgaaaaaagccgcctccattcgttcttctgatggccctttcactcccaacaaaagtatattgtaatttaaacatggacgttctgtgcacaaaaagcagagaaatccatcactatcacatttaaatgttcatgatatctcttaacttagtcatagatataggtctaatttttgttcatcctctgtttacagccatgtaagctttgataattttggctatgatttgaaaaagaaataagagaccgacagattcatctaactagctagagctgacacagtaaagttgaaatgctaataatacattattccataacagaaagaatagaaaaaataaaatggacaagactttaaatcaatcctaagtttcaccagaagactttacgtgaggttcttacataactttgcctctttttagtattagtgagaaccagagctttgtagttactagtaagactagacctaagttcactggtgaaggcagttcaaatgtctaacatatgataaagaccttttttttttttttcaaccagaaaatcgttttcagaaatttatcctacaacaaatgtaaacattataagtattacctgataggagcgagcggattctcacagtatcagaaccaacagccaaaatcaaagcttcagcagcatcagggggtgtcatcctaaatgaagcatattcacccacagtcatctgagtaacttctgattcaatatgtggattcatggatccagtccctacctcaaactctatctcttcattgctttcaatgagctctactgaggattcacaattagccgaatattcagactccatctcttcattgctttcattgtcttctcttggagattcaccatcactcgaatattcaggatccactgccaaagacaaagaatagcatatgctaaccacggaaccatttgttatagattgaacacgcttctctgccgacagcacatttgtgttttttgattcagaactgtgttccttttgtaaaatcggtggggccgcaaaaacattaggacttgaagatttagtatcctggtcgtcatctgtatcacatgattgctctccatccacatccaggtcagcaaaaaacttactaaaccataagagggcctttaatgaagcattttgaatggcatcattttccttctcatagaattttctcggtgaacattctaaaactaaatcctgagactttgtaaaaatcttcacttcacatctaaacccatgccctagtcctggtgtatcttctttttgcctactcaaattctcattggcatcatcaactcctgagaccttcaacttcttgtgagatctgaatatgtcggacaacgatttcacaggtgcagtagatgaagaaaggatgggttctgctagtcggtgctggtggcagaacaggccgagaatctccctggggagtggacctctccaattagattttgtagtgaatgcaaaaggcaactgtgcagcaattacagcttgtcgggaaattttgtagattccattgggtgacataccgcaacatattctgcagcagccacaaagccaatgtcatgcatcagtgcatgataagaataagatatgcagtgcttcatcggaaggcaaagacaaacatcaaatgcattacttcagagttagtagacgttacaccaatgcaatattcctaaaatccttattctagaagaagatgtggaaaggaaacaaatcagacataaaactgagcggtaggagagaagagacctgtaaaatgaatttacggttacatcatcatagtcaagatcatcggacttccatcggtaaccaacagatgccaagattgcatccccgtgaatatcttgaccacaaatgtaacttgctcgtgcattccgagattttacaatatgagatgagtcttcatttgaagtaccagaggcatctgatgaattatccaagtacttctttggaatctcagagtacaatctacactcagagccacaggaagctttgccaaacatcctgttgaaaagaaaaaaatactttcataccagattaacaccaagaaagctccagttactaatagaaaaaagacaatataatcacctggatatcatcacttggttgccatctttcaatccgagcctttcagcaatactatccaagtaatgccggtttgatgaaatgtaaagagtatctaactcaacaacttcctcatcgatacatggtatatatacagccgcgacttctctgctatgtagggaatcagatacatgagtagctagtgcttccacgatttctgaagggtatgcatttttccttcggagtccatgcggagatgcaacaatgtagtctgccaactttgcagcagccttcataacataggaaatggccaagaaaggatctgactccacagaaggattgataattttacaacgactgttaatctttgcatcaactgtagcaatgacagaaacgggaactgatccacaacgttcaccatctcttcgcaatgccgctctaaggtgagctcccagaggatgctcagctgaaagaaactgcaatcgcaacaaacattaatgccagtaccacttcctatttagacatccagataccttttggtccagcgatataactggtaatatgtttaacgaggatgtcgttacagctacaaaataatagaaaccaaaattttcttttcatcaactaacctcatcagaaaatatatacttaatgcgtccaacaatttcatccctagcttcatccacagtaagatcatcattctgagggcgaatgcctagctgcaacatgaatagtcttgccttcgttaacataagagagaataaattacataagatatatatatatatataataaacaacaaagcataccttgtcaagagccaattcagcagcagattgttcagaatccttcttcttcttgaagacatttgacacaacagaaaattcaggtagctgcaagtggcaacgatagagacatggacctttttgaggaattgctaatcctagacaaccactctgagaagagtcatgaacttcctcaactgtatagcttgctttagcaccaaacttctgatgtataatcgcctttggagtaggagtatgcttcccaccaccggccatcacaaacacaatgtagcttctttaacacactgagacaaacaaaagggtacacataaatattgtcaacgatcaggaaagattggaacttttatgcaaaatgtgcatacccctgaaattagggtatctaagagaagaagaagaatgtcttaaacttgacaattcaaatcagagccatagaaaacattaataaataaacaaaaagttcaaaatcgaaccaacatctatttgagttccaacattctcaatgttctaattctaagaaagaaattgagtcaaagcaaaaaaatttcgttccaaggaagtacagatagatagagggtttgggtataaacaacaaaaaagggttttgagtgtaacattaggacaaacgaattgtcatgaacagagaagatgggtcaatgaaattgaatttcagaaagagcccagaagttcaaaaaataaatacacaaacataaagcaagaataatcgacaacgaacctaaagagttcagcggactttcatgtaagaagaactcaggagagagcaacagagaaaaagagagtgggagagagagaatggggttttagagggaggaaggagggtgttttggtcattacatgttgtagaatcgtttctttttccaactttttattttattcccctatccaccattctctttttctagaagaaaataaataccatttacgtgtgaagttattataggtttaaggctctgattggtaaggcgttttttaatgtaattatgtaaaaaaattctcatattaagaaaatttgcataattgtataagaaaacgtaaaaacgcacaatttgtatttttgtttaaatttacaagtaaaaattcattatgcaaaaaatgggtatatagtttttattcgcataagaaattgttattattttacgcatcttaaatactaacaattttaaacaataaaaaactataattatttacacaaaaattatgttattaataatctacatatacatttttggggaagatttgtgtcgaaaaatcatttttcaatttcgatattgtatgtttagtccctacaaaatcaatcagacaagattgtcttctttatgacaatgaccaaatttttgatcaattattcacgttttgcactaattacttacctaaacaaaaatattattttgcactaccctcataaattgcacacattaatcccttgaatctctactaattcaatattacacgaaataatattccctaaaaatccgaacaaccaaataactaaccatatctttacttacttcatttcaaaatctctaatcagcattttcacaactctttaatagattttaagaatcttatatttttattatcaaatattacttaaaatttattaaaaacagttttattagtataaatatatattgttgatataatattttatttgtcgttctgtaaaatgtatccaatcaacatatatttttaagtaatttgattctacggtttttcattctacatattttattatgcaacttataccgttatgctattatgcaatgttacgaatcataaccttaatgtttggtattctcacatttcttgtgctttgtagccaaaatttgaagaaaaccatgtcatgtaatgaatgcataacactaaaatatgagtcatatcatatgaccaaaagtaaaagtgtgattaaggaagaaacatggagattttaaacagaactagattttaacccgcggtataccgcgggatgatttatttttttaaagtaatatctattaaaacttgcaaattttatttttataaaatatttatattttacagtttataattgttattaagtaacgctataccacgaatccatgagacaattgttaaaaaactgaagtttaaccccttgtaaaacagcatattaataatattttaaaattttataaatattgattcaaatacatccaccatataacccaattccaaaataaaacccgttctgtaattcctttacccgtcccgtaatatttttttaaagtaataatttttaaaatttaagaattatttattatatataaaagttttgcaaattgtatcattctctaacacatttatattttatagtttaattttatatatagtaacattatacataccacataacatttttggttttatataatcttttctaaattaggatgatttgatatgtttaatattagtggtcttaaaaaataataaattaaagatttaacccgtattcaaacagtggattaattatattttatttttttattaatgttgattcaaaaacccgtctctccaaatccgtcttgccaaaaagccatttattttattaatattaattttatttatgatatgactctgaattataatctgaatattttagctaataacataggagtgcaccatatttatttaataggagaatgtaccatatgacccgaatgcacttttatccaaatccactaaaaaagtcttgcaaaaatactgtagagataagaaacgatagtcggttttgataggtataagattagcaaatatattaggtagcttaaattagttaaagaatacaaattgaaaagatatattacactttattcgaatatagtatcaaaacttatataacacagagatttgataattgtttaattgttgaatactttttttgtgctaatttttatgtgattaagatttaattgatttcgtatataaaatattaaattgttttacgaacttatttgtttataatttggtaacagatagatatttgaatatttagtgtattttgcttcagtttaggaaatctttgatgacccgtctttagatccaataaaccttataattaagagatgaatattgttgttaaatgattttggtaatcttaatgacgtcattaaagatttttgtttttgattaaatttttctaatggcattgtcatgtaattaattacaaaaattaaggttacatttaaaatgtactttccaaataatatagtagaactaggacaagtaataacttatcaaagattagtctttttctctccatttcctctttgaccatttccatatgattttataaggctgcatcgagccttctgagaccttctccactatgttggacaaagatatccgtctaaaaacaacaatttgagaagcaaacccggggtctcctttaccagacccaccaacaccgctaaaatagacgctgtagttgtggcgtttagcgagtttagatgcccactgcttaaactgtttccttgtccattcaaacttgtggtcttggttcctgaattttggtagctgtgaagacatggatctgttttttgggtggtttggaggaccagacttatggaaatttgtgttgtactcgatgtttggtgtggagacaatcagaagtttcgggcgaaacaagcttagaactgttttcccgaattgactggcttgatcctcctccatgtgttcaatgacctaaagattcaaaacggattatattgaatattagagaagctgctgatgaagaaatgaagcaagaaaatagaatcgaacctctaagcaagtgccgatgtcaatgtcatgcagcctggaatcaaactcaaggatggaaccatcatggagtaaagtagatttgaggttgcaagctcccttgtttatttttgaatgtagcaatctgaaattataacatgcaaaaatatcaatgtaaaccaacaatcttcaatcaaccatctctttccaatgataataaaatacaaccacgttggagaaacatgttacacgacctatgacttgtgtaaatgcagttttgatcaaacatatatcaagtttttaagatgcatgactctcatcaggttaagtctacaagtggaatataacaaagtggtgtcagatttcacataccttagcagcacgggtaagactcttatgtgagatgtcaacgccagcaatggtttgaagtgaagttggacagtcaagtatagatgctagtaaacttccagatccacatccaaaatcaacctgcaacaagtatagaggctgaagtattaacaaaaaattcccagaaagaacttggaatcacaataagcagaaagacaaaatgattaattaagaaacacaaagagcctaccagagtagaagctgacgattctttaatatgtttcactacatattcaagacgctgttttgaaagtgaaggtttgaaaaaatccgcctcaattcgtttttctgttggccctttcactcccaacaaacgtacacagtattcaaaacctgcgacatctgtgcattaaaaccaaagcaactcatcatcagaactaccgtagcttggctgcaaatctcttatattagtcagaggtatatgtttgttacttgttcatgcgctgttcaaagcagaaaacctttgaaaaagcacagaaacacttcataagaaccaaaacaacaaataaattttaagagtgatgctgccttcaccaaaatagtacagaactcattaaactcataggaccaattgcaacagaagagtttgcaacaaagtaactaaattctagattcaactagatagtgaattttagtcctaagtccgctggtaaaggctagccggttgcatttgtaataaacaaatgtcatcgagttttttccttttctaaccacaaatgttaagaatttcatatacaaattagaagcattacctgataaaagtgaacgatctctctgggtaccagtggcagcagtcacaaacaagtcttcagcaggcgcattagttaaaaaacgagcatattggcccacaaccagttgagtaacaactgcttcaagatgtggattcatagaaccattccccacctcaaactctatctcttcattgctttcgatgagttcttttttagatttaccatcctttgaaaaatcagcatctacatccaaatacacagaatagcatatgctaaccaaggaaccctttgttatggtttgaatacgaacttgatcctcatattgattcatttcgtctctatttcggaaatgtccctttggaacagcctctttcatcaagatcctctgttgaaataccgcatccaggtgatcatccgtataacatatttgcagtgggtccccatccccctcgtcgaaaagcctacttaaccatgagagggcattcaacgaagcattttgaatagcatggttttccttctcatagaactttctggacgagcaatctaaaaccaaatcctgggactttgagagaattttcacttcacatctatatccagtccctgattctggtatctcctcttttcccttgctcgtatactgatattcgctatcatcacattctgagtctttctcatcacattctgaatctttctcatcacattctgagtctttcaacttctggtaggatcttaatatgcaagacattggtttcacaggagcagtagatatagtaaaaatgggctctaccagttgttgctggcggcagaacatgcagagaatctccctggggaatggacctctccaagtagactttgtagtgaatgaaaaaggtaactgcgccgctattatcgcttctcgggataatttatagattccattaggagaaataccgcaacatatcctacagaggccaaaaaactggtgagatatttagtgcttcagcactagaccaaaagatatacaaaggaaaaacaaaacataaaacggagcaaaagttggtagaggtaagagacttgtaaaacgactttaaggttacaccatcatgttcaagatcatgggacctccatgggtaaccaacagatgccacgatcgcatcaccgtgaatatctacaccacaaacaaaacttgcttttgcattccgagacttttcaagatgtgatgattcaatgattggacgtttttcacgggctttccatgaattatcggaagacttcaacttaggaatggcagcatatactctacactcatagccagaggaagttttgccaatagtcctgatgaaaatccaaaattagctttagtaagattaaaactgagaaagctccatttattgacagagaagacaaaatactcaccttgatatcatcacttggctgccatccttcaatccaagcttgtcagcaataatatccaagtaataccgacctgatgaaatatcaagagtgactggcttaacaacctcttcaccgccaacggtacattgtaaatgcacagcctcagcttttatgcttttcacatgagtagtagccagtgctttaatagttgctggaggatacggttttttccttcggagtgaatcgacatgcggagatacaacaatgtagtccggcaactttgcagcagccttcatgacataggacatgagcaagataggatctgattctacagaaggatcaatcactttacagcgactgttaatctttgcatcaaatgtagcaatgacagaaacaggaagtgatccgcaacgttcgccatccctttgcaatgccgcccttaggtgacctcctagaggatgatcaactgaaagaaactgcaatggcaacaacttaaacgttaatgccaatagagagaaaaaccaaattaacttttggactatggacttgcttatgacctgtactaacctcatcagaaaatatatacttaatgcgttcaacgatattattccaagcttcatccacagttatatcaacatcatcatcatcctgagactgaattcctagctgcaacatgaatagtattgtactttttcacataaacagtgttaagaagtctactaaacaataagagcagagagatgtgtcaaaagtataccttctcgagagccaattcagcagcagattgttcggaatccttttttctcttgaagacatttgatacaacagaaaattctggtagctgcaagtggcaacgatagaggcaatcattcgaagaaacatgaacttcctcaattctgtaaattgctttaacaccaaacttctgaagtatcatctcctttggagtaagagtctgcttctcctcacccgccattacaaactcactgaggcttctttctacactgagacaaacaaaagaactatctatgattcatatagatacttcaaagatcatgaaagatggtaacttcagtgcaaactgtacggctgctcactgcacagaaccccaaaaaactagggtttttgaaagagatacaagatgatgacctaaattcggagacttcaggttttaagacagacaacagtaagatgaaacagaggaacatgagtcaaaagcaacgatttttcgcgcgaatgaagcagaaaaacaggtagaggttgaagtaacattacgaggaacgaattgtcataaacagaaatgatggtgtgatgaagtcgaatttcagaaagaacccataagtaacgaagcgaaacacaagaagaaggatcaaagacgtacctttgagtgttgagggaaactagtttgagcaacagagagaatgaaaaaagttgggagatttcaaatgtagcggtgtgctgaagaaagcgagggtggttgtagtcatttcacattgtagatattaacacaaacaactgtttccgtaattgtaccggagattctgcaaaaatggtttggttctctcattggtgacgaaggtgaatcttcattaactttaggtaaatagccaagaatgattaataatcaaattaaatacgaatatagataaggaaaatggtatatttacggattggttagcgagtaacactgttaagaaatgtaattacaccataggtgactattgtttgaattgttgttgacttttttccgggtaaaagaaaagtttagaactttgactctgagctttgtttaatcctctctataggatccttcatgctttattcttcgctgacctcataactaattgattggtgattccaagagtaatgttcaacaccagagagatgttctcaaactaattacaattcacatcgcttattaacatcacagcctttccaagacttttattattcttagcaatgaaaatcaacaatctaaatgcacaaagaaaccggttattttgcagggtcgttgttaagattgtctcagacctcatctttcccattgtaaaagtgtctgaaaacacaagagaagtccttcgtttcatgtccttcctcgcacatcttcttgtaactgcaaaaacaaaaaaacaaaatcttcagcttgatgtgtgtgctttttgcttcataagaaatttctacgttgtttccataaagtttcattcacaagccttctttgttcacaacaactcataaggaatagagcttctaggagaaaagactactgaagtactcacatttcttgtgctttggatatcaatgggcttttgtgtccaacttcttcagctgaggctgctgcgaggtttaggtctttagcctgcatttccaatacactatatacatgaaagacttgtgtaacaaaagaaatgtgctttagagacattttacaggatcaatgatatagagatttcttaagaaactgaccataagtttggaggcgaaaccgccattgtaatcccttgaagatggcacacctttcatcactcctggaactggattgtatgcgtcactgcggttatcataatataaggaaaggaagttaagaatttggtgtgcttgctcttgatgagaagacgattataaatttgaagaggtcatttcatttacttacctgctccaacaacggccactagatgtgtttaagacttctgttaaagtactggcagatattccaagtgactgaccaagagctaaggcttctgaagtgccgagcatactcacggccattgccagattgttacaaatctttgcggcctaagtttaaaacaaaacatgtcgtttctcagtctattatccttaagaattgtagagacaaatataccaaagatcaagataatagagatactgtaacagagttacggaaacatggtataaagcgaacttacagatccatttcctgaaccaccacagtagatggaggttctgcccattgactgaagtattggtctagcggctaagtaagcatcttcgggacctccaacctacagaacgtgcagttgtatcaatgccattgtgctcttgtaggtatacaagcacacataatcttcaaacttgatgttatataaaggatgtgattcaaataatgtagaagataagagagtcgtcaacataccatgaaagtaagtgtaccagcttctgcagcaagaacacctccagagacgggagcatccaacatgactggcttttcccaattatctacatcaaagatgcttgaaactagtgaaaatgaaacaatctcgacttgttcacaagaagaacaaaatgaagctgttgttaactcataagaagaaactaacttccttccaaatcctatctaagctttacctctcttttctttcaaattacaattagaaacagcaagtgagatttttcgagttgtttgtggatcaatagtggatgaatctataaacaaagcaggtcttatatcattttctccaagaagcaacccatttgttcctgtgtacacatccatcacctacatcaatcacaattttttttccttcataaaaatcatccaatcaattgaagattaacattctttcagtaccaggagtaaacaacaatactatctcgtagactaggtgcagctaatcatacagctaacaggacgatctttcaaactgttttcatataaaactattgctaaaggtaaataacttacatgagatgatgaaggcaacattgtaatcacaacttcgctatcttgtgcaacttcataaggagtttctctagaagagactcccatttcagtgaacattttcataacatcacggtttctgaaaattcaaacacaagtatatgcacaagaaagttaatcaaaggaatcaacattaaccaaatatgaaaattgataggcagcaaaacgcactcaaagtacattacatgtcatgaacggtaactttatatccagctctaattagattattcaccattctgaatcccatatttccaagtcctatgaaaccaacattctgacaaaacagcaaaaatgagacttcatttacataaattttgggtactgaatcagacaaattttgctgttaaaaatctaatccagacaactttttttgcagaactgatgaatttagataagtggtcaagatcaataagcaatttggccactaaaattcttattaactatgctcgagattacaaaagttaagatcttttattccaactaccttaaggatcatgttttagaacgtttcaataaaattctaggtgacttatgaggaaaagagattatgttttctgatcatgaagacaatttaaaaagcagaacctggaattgatttgaattttgagacgaagaagagaaccggtggagcgacccagacacgaaattggttttgaatttagaaagacaaagtagagtttgcgctctgcgaatcgccattgatgaatttcttcaaactcagagcaagttaacaattagcaaatgagagtgagttttagacgtaagtgtgtaatctcatcaaaacactcagatttttgttttttgaattatgaccccttaactattaatttattctgaacccggacatttactttcaacattatcagtagaacccaaataattggtctgatgcccttgtctcttccggtcttccctagtcaacgtagtcagcatgtgggacccattttcctacgcggtatttatttcgcttctacattttcctactaattaatgtggtatcaacttcaaaaatatttatttgtccgaatattcattactattttttctggattgttcaaaaaatcatgtttcatttactacacattttccttgcaagcttttaatatctgtattttggtgtaaataacattcactccgaactctcattactctttttattttccctattatttatttatgtaaattcatttattgcaagtttctaccaaaatttattagaacactgcgcaattttcgcttattttcccaatgctgtaaatctctctcactaaaggcaaggacatagactcataaccatattggataaaccctttcacgtccaccatggtcacactcactaaaaacattagtgtaagtagcttttttcattttttttggattcctttcccgggccattccaggcgggtaattaaactatattttaaatctttcctcactgaaaagactatgaaaaagtaaattaatatataattttcttctcgtgaacccatgaaaataatttcttgctattttactttttatttagggtttttgatttggtgtccgttcacacgcttcaagacttacccttttacaaggtccttgtcgttcgtcactgtcgaacgtgaaaactagcaaaacattttctctatctttaattttgttttggcttctttcttttgttcttaaacagtgacaatcttttaagggtttttaatttttaaagtgacccacaaagatttccctcagttagctcagtgactcagtctacaacactgttgagcttaatccaaaaccccgtgcagttcatgagctaatgaacaaaatgattctgctttaaagtttttgtcttccttcttcttcaactctgtcgacattgttcttgcagtgagaagcttttttcatccccgtaagtttaaaaatcctcacttttcatttatctctttgctttggagttaggttagatctcggaatgggacccaaatattgaatagcccatttgttcatttaatgtttttttcagctgattccctttgagtgaagattgtctcttctcactcagtagcattactgcattttgtttgattggggtttctcagaagatttgttcatcttaggtaaagtttctttctttagcttctgtttttttttttatcagagtgaaatttctggtattgttgatttttgcagaaagatttaaacttttttttggtaacattgatgggttttgtcttatttcattatgttttatgtcagatttacttggggttccatgaattttctgcgttggtgagctggaaaagttgttgggattcttcaaaaactgtagctttttgggggaaaagatttgaagtcaaggaaggatgaatctttctaggattttgttactctccatgttttttctatctgcaatggggcaacttccatcacaggacatcatggcattgcttgaattcaagaaaggcatcaaacatgaccctacagggtttgtccttaattcatggaacgatgagtctattgacttcaatggttgtccttcttcatggaatggtattgtctgcaatggcggtaatgtggctggtgttgttttggataatttgggtttgactgctgatgctgatttcagtctgttctccaacttgacaaagcttgtcaagctatctatgtcaaacaattccctttctggtgtgttgccaaatgatttaggcagtttcaaaagcctccagttcctggatttatcagataatctgttctcttcttcattgcctaaagagattggtagatcagtaagcttgaggaatctttctttatctggtaacaacttttctggtgagattccagagtctatgggtggtttgatttcacttcagtcgttggatatgagtagcaactccttatctggacctttgccaaagtccttgacaaggctgaacgatctgctgtacttgaatctgtcttctaatggattcacggggaaaatgccaaggggctttgagttgatttcaagtcttgaagtgcttgatttgcatggtaattcaattgatggtaatcttgatggggagtttttccttttaacgaatgcgagctatgtcgatatcagtggaaacagattggtgacgacgtctgggaaactgttacctggtgtttctgagagtatcaagcacttgaatctcagccataatcagcttgaaggttcattgactagtgggtttcagttgtttcagaacttaaaagtcttggatcttagctacaacatgttatctggagaattaccaggtttcaattatgtctatgatcttgaagttctcaagcttagcaacaacagattctcaggttcccttcccaataatttgttaaaaggtgactctttgcttttaacaacgctggatttaagtggcaacaatctctcaggtatgctcttggctttatcttctacatagtggaaattgttatatgttaacggtggcaccaagaaaactagaaatctaatatttttttattggttttccttttgtgtttcagggccagtaagttctatcatgtcaactactcttcacacccttgatctttcttcaaattcactgaccggggagcttcctctcttgactgggggatgtgttttactcgatctctcaaacaaccagtttgaaggaaatctgacaagatggtcaaaatgggagaatatagagtaccttgatctaagccagaaccatttcactgggtcgttcccagacgcaactccccagcttctgcgagcaaatcatcttaatctttcctacaataagctcacaggctcacttccagaacggattccaactcactatccgaagcttcgggtacttgatataagttctaacagcttagaagggccaattccaggtgcgttactatccatgcccactttggaggaaatccaccttcaaaacaatggcatgacaggtaacatcggacccctgccttcttctggttccagaatccgtcttcttgatctttctcacaaccggtttgacggggatcttcctggtgtattcgggtctttaaccaatcttcaagtgctgaatctcgcagcaaataatttgtctggctctttgcctagctccatgaatgacattgtctctctaagctcattagacgtatcccagaatcatttcactggaccactcccaagcaacttatctagcaacattatggccttcaacgtgtcatataatgatctatcagggactgtgccagagaatctgaagaacttccctccgccttccttttatcctggaaacagcaagctcgtcttgcctgctgggtcccctggatcaagtgcatcagaagcttccaagaataaatccacgaacaaacttgttaaggttgtcataatagtttcttgcgctgttgctctaattattctcatccttgtggctatcctccttttctgcatctgcaaatcaagaaggcgcgaagaacgtagtattactggtaaagaaactaataggcgggctcaaactatcccctcaggcagcggaggtggtatggttgtctctgctgaggatctggttgcttcaagaaaaggctcatcatccgaaatcctcagtccagatgaaaaactagctgttgcaaccggcttctctccttctaagaccagcaatttgtcttggtcacctggctcaggagattcattcccagctgatcagcaactagcacggcttgatgtgaggtcaccagatagacttgtgggagagctgcattttctggatgattcaattaagttgactccagaggaattatcaagggcaccagctgaagttctgggaagaagtagccacggcacttcttacagggcaacgctggataatggagtgtttctaacagtgaaatggctaagagaaggagtggcaaagcagagaaaggagtttgctaaagaggtgaagaaattttctaacattagacatcctaatgttgtgactctccgagggtactattggggtccaacgcaacacgagaagcttattctttcagattatatatcgcctggaagccttgccagcttcctttacggtaatgctcctttcaataaacttctctaagtattatatgtatgtgcagtatttttcatcaagcttacggttcttgtttgatgacagatcgaccgggcaggaaaggccctcccttagcctggacccaacggttgaaaatcgcagttgatgtggcacgtggtctaaactacctccatttcgacagagctgttccacacggtaacctcaaggcaacaaacattctcttagatggagcagagctaaacgcgcgtgtggcagattactgcctccaccgtctcatgacacaagcaggcacagtcgaacagattctagacgcaggaatcctcggttaccgagctcccgagctagcagcttcaagaaaaccattaccttctttcaaatcagatgtatatgcgtttggtgtgatacttcttgagatcctaaccggaagatgtgcaggagatgtaatcacaggtgagcaagaaggtgttgatctaaccgattgggttaggttacgtgttgcagaagggcgtggtgcagaatgctttgattcggtattgactcaggagatgggaagtgatccggtaacagaaaaaggcatgaaagaagttcttgggattgctttgaggtgtataagatcagtttctgagagacctggtattaagaccatttacgaagatctttcttctatttaggaacaatgtttttttttttttttatgttttgtaggttccaatagagtttggttcctctgaatgtgttctcctttgtcaagttcatgttctgtttcgggagaaacatgttcttgattcaaggtactagtgtgttgtgtcttctgttagtttactttacattttccctgtaaaaaaacgaaatctgctcatgtctcatgagtgaatgaaatttcattttttcccatttatattctctcttcttggaagttgctaaattgtgtttcatgttccggttagacttaaccgagtctttgaattaggaatcttaacttagatgttacgttttgtattatatatgatctttctccagaccctaatcctagaaaccctaatcccaaagtccgaatggaaagaccaatacatctcccggaggctatattgacggagattctagcgagattgtctttgagaagcatctatagatgcaaatcggtaagcaaaacatggaaatcgtcaatcaaaacatggaactgttgatgcacgaatcacacaagtacgaaaatgggatctctagggaaggaagaagaatctttctattaatgacgagcccgcgacttaggcgaattggacggattacaaaggatgatttcttcaacaagcataaatggaaaaagaacgagccgattgtagatgaaagacgagcttgaggccggaaaacgatcttgatatccgaggaagaatagagtttattcgttttatagctgaaccttggaacttattttggggttttgacttgggtttgggcattgggccaagtaggcccaatccgacccctaacagttgccccccaatcctgatgcatcgttgatgacgtggatcaggatttcaggcgctcgaaactcaatcgaaggaagtaaaaagtcgcgcatggggaagacgcaatgtttggtttgtctttcaattttctcaaggttcggagatcgaagcgtcgcatggctttcaaagtataggctgctatcacgacgatgtgctgtctcggtgatagtcaagcgagacgacaaggaaggttaaaaggggccgcctcgagtgttgcgtgaccgtcacatttctgaagagcctcctggatcaaagtggtcgtctggtgttcaagttgggatgttcgagtcattcgaaagtggttctttgagggggagagggaagagacgagggtcgttaatcgtgatgaacaacgagcgagtgttccgaactcgtccgatgcgttttgcgtgccaatgatcattattggagttatcgtttcgtttgaaggaggcgttccttttgcttttaactcgtgtttgtgctgagctcgctgtttgagaggcaagactgctcaagcgttggccgatctagacaaaatcttgagccgaggttgaaaagatgagtggaaagtataataatttagttgaacgtgctttttcagggagaaaagagctttgggagcgtcggttggagtatgacaacttcgttcaaaggtcggcggttgataagatggcggagctcatcgagaagcgattggatcggatcaagacctatattgacgatacgaaggtggcggagccaaagtttttcaattcaatcaagtgtatggaaacatcaagactctcgaggcgtcgatcgaaggcggcgaggtggagataaagtcggatgagacgatgtcgagattagaagcggatgttgaggagttgaaggacgaggtgaaaaccttcaatattcatcatctcatggtcggagaatttggcgtttatactatatttaccgagctcaggtctgaactttgttactctgctttgcttcagagtagcaaggaagatgacgatcacgcagatggacgagatggtcaagaaggtcgagtcggggaacgaatcattgatcaggtcgtagtgcaagatgagaccacgggcgtcgacggctgagatcgtagaaccttcgttattcgtgcgtttcgttcaagggttgagatgggcgagtacgactttatcggtgcgtcatttaagatgagcgcatgatcgatcttctgctgtgattcgaatgtgcaagtgcaatcgtaggcagctttagttcgtcgaaatggtgtaagcatcgagcttgtacggtgaattcttcggggggtaacggcgtcgagatgatttgtatagcgattacggaggtgtaggtttggcatacatatatatatatatatatatgtgtatatataccccccccttttttttttgaaaaacaaagccggtgtggaactcgatcatttgagaatttttgcgaatcggcgtggcggttgagtgtgcaggcgttgacacgaacgtgcgaacggtgaactcggtgctcattgcgaatgatgcgtcgtttttgaagcgaacgagatgagttcggtttcaaacctttaggacgtttcgttattcctgggaattcagtttaggggaatgccccggttcggtgtgaagcgaaagtaatgaattcgatcacaaaactttgggattattctgacgaaaccaaagttcgtcgaaactattgattccaacgtaacggtacgagcgcggagctcggcttaatctgtcgtccgacaaaaccaaagttgtcgaaactattgattccgtcgtaacggtgcgagcgtggagctcggcttaatctctcgtccgacgaaaccaaagttgtcgaaactattgattccgtcaaaacggtgcgagcgcggagctcggcttaatctgtcgtccgacgaaaccaaagttgtcgaaactattgattccgtcgaagcggtgcgagcggggagctcggcttaatctgtcgtccgacgaaaccaaagttgtcgaaactattgattccgtcaaaacggtacgagcgcggagctcggcttaatctgtcgtccgacgaaaccaaagttgtcgaaactattgattccgtcgtaacggtgcgagcgtggagctcggcttaatctctcgtccgacgaaaccaaagttgtcgaaactagattccgtcaaaacggtgcgagcgcggagctcggcttaatctgtcgtccgacgaaaccaaagttgtcgaaactattgattccgtcgaagcggtgcgagcggggagctcggcttaatctgtcgtccgacgaaaccaaagttgtcgaaactattgatttcgtcgaagcggtgcgagcgcggagctcggcttaatctgtcgtccgacgaaaccaaagttgtcgaaactattgatttcgtcaaaacggtgcgagcgcggagctcggcttaatctgtcgtccgacgaaaccaaagttgtcgaaactattgattccgtcaaaacggtgcgagcgcggagctcggcttaatcggttgtcagacgaaaccaaagtttgtcgaaactattgattccgtcgaaacggtgcgagcgcggagctcggcttagcactcccttaagtgtaggttttatccaagaccgttttaccgatacatggcatacttaaaggggttcgtgcgttcgtttatcgatcgaatgccgggccaggacaccgatgtaaattagctcgatcgctacgaggtccagcggaaccctttttaagaataatgatgaattgaattacgacaaaaatgaaaattttacttatctcaacgcaagagtttgtggtacgatcgagttttgacggtcgagttcgttgatacaattatcgaaaagacgatgctcaatgtctgccctagttcttgtcagttcgttcgtccgacgtgacgttatgctaagtggcatcgttttcttcgttttagtgggatggcgttggaacgagatctccgacgttttgagtgacgatgtgaatttcgctgttgaggagagtttggcttttcttcagttcgcctagctccagcgggtgctgttactttcactttgcaagatggcgcaaatggcgtttggttggttgcgtcgttgtgtacgtccagagccgtctggttctttcgtttagcttctcgtagcctgccgacatgatgtgttttgttagtcgttttggtgtggtcattgctttgcggtattcgcaaaacattggcgtcagtgtcggatcgtcgatatctcttatggcgcgtccgacctcatggaccctggagatggctcaattgatttgggcgtgaaggtcttgcacttggtatctcgtttatagcggtctgaggaattgccgagctgggtttgtttaagacaacctgaatttcttcgcgtaggtcgggtatgcgaataacgactcatgtgcatgcggctaattttatcttgtatgtgctcttgggcggcggttaataatcgcgtcgcgctgctttaaatgatcgatgatgatgttgattagttcttcgccgcgttggttggctttagccgtatcgtccaggcgatgaaatcagctaagtgaagcttctccttggtctttttgcaacgctaggtattcaggcgtgggcgataacgaggtcggtacaatagatgacgccgagtagtattctttatttgagttttcccgtgcgctgacgttatcgtccgagctgccgagctgggagtgtcatcgtcgaggttctccaagtgacgtccgcctgatgacttctcctcttgttcttggttaggcgtgagtgataacgaggtcggtatgtttattgaggttatgggatgttcctctttgatcggtggcacttcctcgtcggtcagtgttattgtcctgactgcccggctggaagtgtcatcgcctaggatgatggggtcgatagttccttgaagtccttttcttgtcggagaacatgctgcgatatcgaatgaagaggtcgagtgactggctctcccggggatcgacgttgtcgttttacttccagagcctgacgagtcggtatcgaatgctccatgtagtctgtttgttgtcactttgcttcgtcgctgggtcgtagttttgagagatatcttcgagctatccccctacctggcgcgccaaccgttgatgcacgaatcacacaagtacgaaaatgggatctctagggaaggaagaagaatcgttctattaatgacgagcccgcgacttaggcgaattggacggattacaaaggatgatttcttcaacaagcataaatggaaaaagaacgagccgattgtagatgaaagacgagcttgaggccggaaaacgatcttgatatccgaggaagaatagagtttattcgttttatagctgaaccttgtaaaaggctgcctacgtaccctcagaaagggatcaagccacacgtagttcatattagaataagtgagctaggccgtcattggaggtaggtcggcaggtagttgacgagccggcaaatgtgcgacgagctggatgaaccgtggtagagagacttggacaaaccgagttgtttgctggtgtagacgagctgggcgacgagataggtggactatgcagtcaatggacgaactgccgctaggcgaggaggtagatgagttttgcagtcgagggatgagctgatagctagacgaggagttggtcgagctgaggaagagcttgaagacgagctgaggagcttgatgacgagctgaggagcttgaggacgagccgaggagcttgaagagcttaaaggcgatctgaagagcttgacgaagaggagcgagctaacgagcttcttgagaagggcgagaccccaattcttgagaagggcgagaccccaaatacaatcaacaatgtatgcttttttccgtttcttgcgttttgggtttctttatttcttatctctattgagacaagtctgttggcccttgagaccccaattcattggtgtttcttaaaccggatatgtataactgtctaaaacaaaatttaaaatagcctagtaaaccgatggttatgactgttacggtttccggttagtcttaaccgactctttcaattacaaatccaatcttctcgtcgtcgtcgtcgtctctatttctctaccaccgttgatgttagggtttcggctgtattctcaccgctgctgacggagacggcccgaatccgcaatttaatcttcgaggttcgattttagtgaagaacaagattcaatagtgatatgcagatctcatgtctcccaatttcgattccttcgatcactcctcgaacctcaattccactcttaccatcactctcctcaaatcctcgccgcattttcaacctcacttcacttcagagcccaaatcactgtttcttcaaaagattacataaatctcagactggtttcagcaatccagttttggctgccatgagaagagaagaagatgttgaagtcgatgattcgttttatatgagaaagtgtgtggagctagcaaaaagagcaattgggtgtacaagtcctaatcctatggtaggttgtgtcattgtcaaagatggtgacattgttggccaagggtttcatcccaaagctggtcagcctcatgctgaggtaacaaaaattcaatctttctttgttgggttactgaaaatgagcaaactttaagtcttgcttgtggaattgttgttgttggcattggtatggtaggtgtttgctcttagagatgctggagagttagctgagaatgctactgcttatgttagtttggaaccatgtaatcattacggaagaacaccgccgtgtacagaagcattgattaaggctaaggtgagaagagttgttattgggatggttgatccgaatccaattgttttttcttcgggtattagtcggttgaaagatgctggaatcgatgttactgtgagtgttgaagaagagttatgcaagaagatgaatgagggattcatccatcgaatgttaacagggaagccttttctcgccctcaggtaaagttcattgcttctcttgagtggagacaaatccgagtcaatagattgtttttaagttttgaaaatctttgcaggtattctatgtctgtcaatggttgtttgctagacaagattgggcaaggggcttcggatagtggtggatactactcgaagctattgcaggaatatgatgcgataatactttcttcctcgttatcggatgaactctcgagcatttcttcacaagaagctattaatgtttcgatccaacctattcagatcatagtagctagcaatgcacaacagtctcatatccttgcttcttcccacactgtggaagaatcgggtccaaaagttgtagttttcaccgcaaaggaatcggttgcagaatccggaatcagtagtagcggggtcgaaaccgtagtattggaaaagataaacttggattccattttggattattgttacaaccgtggactatgcagtgtcttgttagatttgagggggaacgtcaaagaccttgaagttcttctgagagatggatttgagcagaaactattgcagaaagtaattattgaggtcttgccggaatggagcacaaaagatgagagacagatcgcgtcgatgaagtggttagaatcaaagcatgtgaaagatttgcagtctaagcaattaggtggaagcgttttgctagagggctatttttgatgttttcatgtatgaatgaatacaagtcatgatatttaccttttttaaagcatagtattattaaggttttacagatcctattattaatagattgataacagatttttgagaaaatgttgtattttcaaaagaaaatattttcacatgttgagaatctgattcgaccttctatggcctacacatgatgggtatcctaagatgagatgttttttcttaattggagttcataaaccaaaacccataaaaaaaattaaggatgtgtaatagaatgtgaagtacattcaatgagaactgattgttgatgtcgattgcgttacaaatttgacaattctttttggattttggtggaaatgtgaactaactgacaacaaacatcaaccatgttggatttgtttttgtcaaaaccgatatatctagagatattcgaaagaaagaacgaaataaacactatacaatagtcaattttaaatcactttatgatttaacaatcctaagttcctaacttcaaatttaagatttacaatagcatgaattttagtctttcttattgtttcatagcattattgtattaaaaaattactctacagttacaccatctctctttataatggttgtttcaattgagttaatcatttactattaatctgaaaatttgtagtatgaatgttattgttggtacacaaattggtgatggaacaaaagattaagaggatatcttttatgtcgacaatggtcgagtggttcaacaaaatccacgcaatcgcctgagcgaaaaagttgaccatactcagccccaccactctccacttcataacctttttcttttatccttcttccttttgcatttatacaagtattttccaatgacggaatgcagaaagaaaaaaatttgttaagcaaatgtcataaaatataaaaatatctatagcaagtgactgtaactacgattaactcaaccgattggagaattgagtaacttatatcgaactcaagttcgaacatacgctatatatgagagtcaaaattattgatcaaaatatgcaatgtaatggtccaaaattcaaaatattaccaaaaagaaattctataagttaatgttggaattatgataataaaaaaatactaattgatagatatgaaacaatttaagacgatccatttgagacccgggaaatagattagtttatcaagtattaatttataaagattttactttggactatttgttcaaaaaactacgtgatgatgagttttctatgcaaaatcaattaccgatatgtggatgattcttgtcttttgtagtaatgttggttatctttcactcttaatgagaggtttaatatcatgtgagagttaacgagcttcttatttgagtcaattgtagataaatagcttaacatatgcccttataaactagcgttgattctcaatccaatttgaaactattaacagaaccattaaaaactatatatgaacacataaaatatataattgaccataacgacgagtcaagatatatatttaaagaacttacttttttccactttgttttgctttttttttttttagtctttggtacatatatattacaaacccttttccagtaaatagttagcacaaactaattatcagatgtcacttaaaccaacctccttctttatataagcttggttaacattgagtttgttatcatggtctatgtgaaacaattcaggaataaaaaaagaaatggagccgagccattcaaacacaggtcaatcaagatctgtagatcgcaaaacggttgagaaaaatagaaggatgcaaatgaagtctctctactcagaactcatctctcttcttcctcatcattcttctacggtttcttcctcttggccctcttatatgcttatataatctaagattccatgtatgggtgatgatcttaatattctaaactcttttattatttcatgttaggagcctttaacactacctgatcagctagatgaagctgcaaactacatcaagaagctacaagtgaacgtggagaaaaagagagaaaggaaaaggaacctcgttgcgactacaactttggagaaactgaattccgtcggatcttcatcggtttcgtcgagcgtcgatgtctccgtgccaagaaagctgccaaaaatcgagattcaagaaactggttccatttttcacatctttcttgtgacaagcttggaacacaagtttatgttttgtgagatcattcgtgttctcaccgaggaattaggagctgagatcactcatgctggatactccattgttgatgatgctgtcttccacacccttcactgcaaggtataattcggaaagtaaaacattttttgcaatggaatttaagaatcaaactttgctactactactatgttaaaactaggtctaatccagcttgtatacacattgggaatgagttcaaagttagggaatgatatttatacttgttgtttttatatttaataaaacttgcactcaaaaacgctaagaagctgcatgttcccatctgattgttaagtttctactagctgattcctattaatatccatatgttagtaaactaaatttaatttatattttatataggtggaagaacacgattatggagctaggagtcaaattcctgaaagactggagaagattgtgaacagtgttcactaatattgattccttgttcctttattaaaaaaaaaagttctatgtttttgttccttttcttgaattatttttggtgttagctagattccttttcttgaattgtatcatgtgctgtgagagtgatgtttcatttgtaagcataatatatacttttctctacttaaagctgtgaaatatattttgttttttggtatcaacaaagctgtgaaatatatgaaacttaggatgatgattttcaagaacgaaaccaaaaaaaaaagtttcttagaattaatacatgaacgagcgaaataacttcaccttttttcaatgtgttatacttgcccaagcatttgtaatctagtgataggagaaactttggtgataggtgaaactctcagatccgagtttgaatatcccgtggtattagttagaaaacatttaaattcgggacagatagtgttgtggtccttcgggaaaagtttacttcggagcactttggtgcgtttctatcgaagctgaccagatcagcaaatagagtttatcaaaaaaaaatgtgttatactatttcaaattgatgaatttgaattctaaatttttattttattttatttttttctcaaagtcagaaatgaaaaacatgatttaagacttcaagtgttatatatgggttttgaagaatactaaagcccatgagcccaaacattaacaaaaatgtttttttcttgtaccttctctcttcaacgtagactaaagaattagggtttccgctttccacacacacagctgcaacactatcttctcagaaatggtaaccgaagctttcgaattcgtcgccgttcctttcaattccgatggctggggacctccagacgcttccgacgtttcctcctccgcctctcccaccagcgtcgccgccgctaatcttctcccgaacgttcctttcgcttccttctcccgttccgataagctcggccgtgtagctgattggactcgcaatctctctaatccatccgctcgtcctaacaccggatccaaatcagatccgtctgcagttttcgatttctccgctttcgcaatcgacgaaggcttcggtctcgcttcctccggtggtaatcccgacgaagacgcagctttccgtctcgtcgacggtaaacctccgccgcgtcctaaattcggacctaaatggcgtttcaatcctcaccacaatcggaatcagcttcctcaacggcgagatgaagaagttgaagctaagaagcgtgatgctgagaaggaacgagctcgtcgtgatcgtctctacaataacaaccgtaacaacatccatcaccaacgccgtgaagctgccgctttcaaatcatccgttgatattcagccggagtggaacatgcttgagcagatccctttctcaacattctcgaagctctcgtacacagttcaagaaccagaagatcttcttctctgtggtggccttgagtactacaaccgccttttcgatcgcataacgccgaaaaacgaacgcagactcgagcgtttcaagaacaggaacttcttcaaagtcactactagtgatgatcctgtgattaggcgtttagctaaggaagacaaagctactgttttcgctactgatgctatattagctgctcttatgtgtgctcctagatctgtttactcttgggatattgttattcaacgtgttggtaacaaactgttctttgacaagagagatggatcacagcttgatttgttgtctgtgcatgagacatctcaagagccattgcctgagtctaaagatgatatcaattctgctcattctctaggtgtggaagctgcttacatcaatcagaacttttcgcagcaggttttggttagagatggaaagaaggaaacttttgatgaagccaatccatttgctaatgaaggtgaagagattgcttctgttgcttataggtatagaaggtggaagcttgatgataatatgcatcttgttgcgaggtgtgagttacagagtgttgctgatctcaacaaccaaaggtcgtttcttactttgaatgctcttaacgagtttgatcctaagtactctggtgttgattggagacagaagcttgaaactcagagaggtgcggttttagctacagaattgaagaacaatggaaataagttggctaaatggactgcacaagctttattggctaatgctgatatgatgaagattggttttgtctctagggttcatcctcgtgatcatttcaaccatgttatattatctgttttggggtataagccgaaggatttcgctggacagattaatctcaacacttctaacatgtgggggattgtgaaatccatagttgatctgtgtatgaaactaagcgaagggaagtatgttcttgtgaaggatccatcgaagcctcaagtgaggatttatgaggttccacctgatgctttcgagaatgattacgttgaggaaccgttgcctgaagatgaacaggttcagccaactgaggaaaacacagagggagcagaagcaagtgtagctgcaactaaagaaaccgaggagaagaaagctgatgatgctcaagcttgatggttataaagtcaggtagttcatacaaacaactctcaaattcaaaaggcggttaccataatatgcttgttggatttgattgaacacttgtttaggatcgtgaatttatacttagaacccaagaaaatgcagaaagttggttcttacttcttagccatagaatcttgttcttattcatctgaatttcattcttatagtttagaaactggtgacttagattaattgatgatctttattataagtataaacgtcgtatgaagcatcgtcattcacaatttggatactatattcttcaggtccaaagtctacacctttcgtttctgggttcttttgagagttgaagcttcaatcaaacaacaacaatggaggttccttttttaattatcttgtcctttttcaaatttttgtggtactgctgtaattttaagtcagaaatgagattgtagaacactatcttcgtgacatcttttggaaaatcattacggattgtttacagaacagaaatctttttactatgactcttatagccaccaaattttcttgaatcattttgcattagttttataaaatttggtattttatggttccaacttttgtttgtttcggtcgtttggcgtattctcttatgagcttgatcctattgtcctggtcggtttttatctctgttaaactgacatagatcctattgtcctggtcggttttaatctctgttaaaccgacatacttcacatatatttattattataaaccccaaattagaaaactcaaccaaaatggtttttactaagcattcagttttttttttttttttttcatgtttccaatagtaacatcagattattaactaataatcgtagcaacggcaaaaaccatatcagaacagcagaacaaacatcccccaaaagcctcctcttaaataggttgtctctaaacccttcaatctccaaaacataataacatactccattaagcaaaatctaatctcgaaagaagagaaacatggataccaacgcaaaaacaattttcttcatggctatgtgtttcatctatctatctttccctaatatttcacacgctcattctgaagtcggtatgattactacatctctattgcattctagtaaaattaatcttttgtatcaaaattcagatttaatgatttgttattaactttaatctgaaaacagacgacgaaactccatttacttacgaacaaaaaacggaaaagggaccagagggatggggcaaaataaatccgcactggaaagtttgtaacaccggaagatatcaatccccgatcgatcttactaacgaaagagtcagtcttattcatgatcaagcatggacaagacaatataaaccagctccggctgtaattacaaacagaggccatgacattatggtacgtaaaactttattatagaattcagttattctcacttaactatattattattacaacactaatcatttgaaatcttaaaggtatcatggaaaggagatgctgggaagatgacaatacggaaaacggattttaatttggtgcaatgccattggcattcaccttctgagcataccgttaacggaactaggtttgttgttttcatttttaatgagcattttcaactatagacccatattaagtggtatttacacgatatttggcattattacaggtacgacctagagcttcacatggttcacacgagtgcacgaggcagaactgcggttatcggagttctttacaaattaggcgaacctaatgaattcctcaccaaggtatcatatttagattattgttaaacattgtatttatagagtttgttattgatttgttattttcaaatttataaaaaaaatgcagctactaaatggaataaaagcagtgggaaataaagagataaatctagggatgattgatccacgagagattaggtttcaaacaagaaaattctatagatacattggctctctcactgttcctccttgcactgaaggcgtcatttggactgtcgtcaaaagggtatttatatttttgtttcgtttttatagtaattttcttctttatgcattacatattcatttttttcaatattcaaattgcaaaatacatcagtaattttttttacgtcggtatatgtaggtgaacacaatatcaatggagcaaattacagctcttaggcaagccgttgacgatgtaagtagtcgaaatttgctaatgtagtttcattagctaatattgattttattactaatttagttagttgactgatcaatagggatttgagacaaattcaagaccggttcaagactcaaagggaagatcagtttggttctatgatccaaatgtttgatatatttacttctattattttgtaatttatacccttttaacaaaattatcattttgtaatatttgagatttttttcaaactttaataaagaaaacaattgatgagtatttttttttaatataccattagtattccactataataatcatcatcggaaaaaaaaaaacacgcctgattacatcaacgttgctaaaacagtatgtcctataaaagctaggcaagcagtgttagctactaaatccaactctaatcaagcagtataaaaacttgaaacaacaaataaacataaatatgtatggtcaaaacaaaaaaaagtgagaaggagtcatatgttccttcaaaaccttttcatttcctgatgtattcaatacaattaatgtattccatcaagaggattaatacattcgattaatatcactttctttcacaaatgttttttttttttgacaattatatcatcaagccaatccatatcgaagaatctatactagtccctaatacgataaccacgtgacaaaaatgtttacacaaaagaagctttggtagcaatttgtcttggttttactcatctctcattcgatacggtagaaaacaaagtcgatccataatgaacaataatagagtatcaaaaacaaggaagattatacagtcgaatgaaggtgaaacccctgaaataagcaatcagaatcgcaatatgaaccaaagaagcaagagaattgccgaacgtaaaaccatatagaggaagaggccaacttaaaagagcctatattttacattttgttgtttaggatttcagtaactttatgtttttttcgtcacttatgtatcaagtttcttgttattatttttctatgaaaatgaaagaaattcagtctatggaatggaagcatgaaaattagacattacatatgtataaaaaaaaaaacaacaatgtatagatttaacgtatctcttattctcttacacaagagatttaaaataatatctctttgtttgactttaatgtaatttttagtaaatccaaacaaacaaacaaaaaaaataagttctgaatactagtcttttttggttcgggtcgttcaacagaatctttctgaatgggattaacggttttcttctctgttaaattatcacatttcacattagctactatagaagcccaaattagaagaaaaaatgaactgttttaaattttgtcactgaaagtttctattttccaataaaatcaaatactacaacaaatgattaactaataaccgtagcaactgctaaagtcataaaagaacattaaacaaaccttcccctaaagcctccttttaaataggttaaataccaaacccctttccatgtccaaaacatactcaagaacattaagcaaaatcaaatctgaaagaaaaaaaaaatggatgccaacacaaaaacaattttattttttgtagtgttcttcatcgatttattttcccctaatattttattcgtttatgctcgtgaaatcggtatgatcactatacatctctgttttattctaataaaattcatcttttggtatcaaaatttatgtttatgtgtatgattttgctaatttaatttgaaagcaggcaacaaaccgctatttacatacaaacaaaaaacagagaaaggaccagcggaatggggcaaattagaccctcaatggaaagtttgtagcaccggaaaaattcaatctccgattgatctcactgacgaaagagtcagtcttattcatgatcaagccttgagtaaacattacaaaccagcttcggctgtaattcaaagtagaggacatgacgttatggtaaaacttttatttcattttagttatctcacatgattatattaatcatactacagtaatcatttgaaatctctttttttccctaaaggtatcgtggaaaggagatggtgggaaaataacaatacatcaaacggattataaattggtgcagtgccattggcattcaccgtctgagcataccattaacggaactaggtctgtggtttcacaaaaaacaaaattcggttacgttagctagattttccaaaaaaagaatatgaacatactaatttgtttataaaatgtgttatgtacagctatgacctagagcttcacatggttcacacgagtgctagtggcaaaaccactgtggttggagttctttataaattaggtgaacctgatgaattcctcacaaaggtataaattagtattcataaaaaacatatatatagatagttgatacaattttttaatattcgtgcattcaccataaacatcttataaaacgaaaggaatggtacatatttgaaagaatgtattataaattttgtgtgatgatttgttaatgcagatactaaatggaataaaaggagtagggaaaaaagagatagatctaggaatcgtggatcctcgagatattagatttgaaaccaacaatttctatagatacattggctctctcactattcctccatgcaccgaaggcgttatttggaccgtccagaaaagggtattatattttttttgtttctgttatagattaattatcttcgttacaccttacataaacattttttggatttttgtttttgtattttggtgtatgctaatgtaatttcattagctataatattgatttagtattattactaattaattaactaattgaataggggtttgagataaattcaagaccggttcaagacccacatggaagatcggtttggttccacgattaatgtttgatttttcttcttttttgacaacaatttcaaatgttttgaaacttaaacttttttgtaatattctttaaaaataaaataaaattatttttataatatcgagtttgttcgaatttgagttgttgttttttaaacaatgagttggatcgattgtttttctgatgattctcaatgtacaattaggaatccacagatcttcgtaggacaagaaaaaatcatctaattacatcaacatatattactaattagtttgaccaaaaaaaaaacatattactaatcatatatatgaaagttggccaactctctccctataaatgacacatcatcacacaagaaaatgacatgtgtcattctatattaattaaataaaaaattaatacaattaattgaggaagaatcaaaagtcttttgttgtgttaaattctctataatctctcttttaaataaattttcttaaaacattcaataaataaaaaattataataatatatcaaatactactttcattttattctacttattttttaaaatatttttatcaatagttatcaatttataatggctaaaatttactttgtgttgtagtttaaatgtttgctacctaacctcatattaattagtaattttagttggatattttcttattattacgttatatgaatatgatttatcatatgaccttctttctgtttatttttgtgcgttctgataacttggtaacattgatatacatttttcacgtaatggtcatccgacacattagatatacccacacaaaaaacacgagattctatatggctatatgcaagggaagagaattaaagtgttgacttgaattactagcatatcatgatgtggttagtgtactagataacgagagaatatatggaatatagaattgtttgttacaattaagttaggcaagtttcaaaatacataagtaatataactacatattaatatatcatataattttgttgtatgtgtttatgatagtgaaatatttgaataataggtctataaatattcatattatactaaaattaatattttgaattatagataaatttaattataaaaaattataactctataaaatagatatgactttattacttacacattaacacacacacaaaaatgaacatcaaaatcaacaaaagaccataatcatatattccgacaattttaaaaacaaaaacccatgcgtagcatgagttttcatttagaataacaaattaactaataataacaaatatgtaggtaattttataaatattgtatatataaagatcataagtttatatattatctatatgtggtgtaatcatatatatgaaaattggcaaactctcttcatatgaatgacacatcatcacttagcttttaatttgccacatgtccacttaataattaatgtaagttaatggtttatagtgatttattatttaattgtatatattataaaattttaaataattaattgtataaataataattttcttttattttgtatgtctttttcttaaattaaattatttaattgattttctcatactcgtagatattttcccctaatatttataattttaagttaaaatatgattaaataattgtatagtggattagctaatagttttcgtaggttgttcttttttctatataagatattaaaaatggtgagaagtacttgagatctagcatcaaattcttggactcaaatcgtctagcattttgtcctattttttttggtttaaggttaacacaaatgaaaaaaaattataaaaataatgtttactgagaaaatattttgttagaaatctaaatgcaaaatgcaaaaacaaattgttgatttatggagcttagtatcaaataggaattttatcttcttgcctattaaaaaatcaacctaaattttacatttaaatacttttaaattacgaaatataaattgaaagtccgcacgtagtgcgggtactcatctagttagtccaaaaagttactctcggttaataaatcattctaatcaagcacatgtcaaaactatatactgctgccaataagcatctgaagataaaatggtaagagaagagaaagataaagtccaataagcatcaagaaactatttgccattccaagactctctagctcaagccaagttttcgttctctcgatgaattgacgaatataaaaagatataatgttatctttgttagtgttaactctatgctacttcttcgtttgtgatgattttgattttatcccctaacttgtaagagaaacatatgtttggtattttgtcaagaattaatgttaatgctttcctcctctgttgtcttgcagcgtcgtttgatattagtacagagacttggagtaggaaaaataataggtacagtaacaaagaaattccaagaggtttagttcccggaactgctaactctggaagagctcgagcatatgggaattggtgagtttggttctgttggtgatctcttttttcttcttcttcttatcctttggtttattcgatacgccatggagctgttcagcagctctcctctctgcaatgtttgtggctggcttcaaaccaatcttcagcaactccttctccacctcaagcatgtcgctcgggatgatgtcacggaatagagctttaagctcgtcatcaatcttcggatactccatattatttcgatacacagtgccctcttttgaatcagtgtttgatagcaaccagaagatttctcctgaagattttagagactgcacaacacaagacaatcttgaaacacaaaacacataacgacattgtatatatctccagaaaaaatacaatgaataccttcaaatcttccattacattcgggtaagcatctttgagatcagacacatcaatcaccttatctgatttattcacaaacgaaagaagttgcttcttgtccttgatattgtgcgtagcctgtgacgtaaaggcagagaaaatgagaaacaaattcaccatgaaatgaaatgtttaggaattaccttataagagaaccttcttccgtcataatgcactttaggattcttcctcaaactatcaaaaacagccttgttgttatgcatatcaacgtaacaagcttcatttatttgctctgccgtataagctagccttgtctacaagacaaatcaacttcattatataaattaagctcatatgaagaagaaactagaaagagaggggacacaaaccttaaacaaaagatcaatgacaatcttcatttgagctccaacagcactgtttcttatgttggtaatgtgctgaagttgctttgtgttttctgaaaacttgccacgaaatacattaggcttctgactggttgttgctgcaggcacgtatgatctcgaaagggccgttcttgaagaagaaatgctcgaaagcgtagattggcatttctcttgctgtttattgaacttatcaagctgctcccgcaaagccatctcaactgtactgagaagatgtagtcctaaccttcaatattctgaatgcatatagacaagaaaaatctcatctgaatccaaaccccaatgaagtgatatgatttgtataaacgaaatcggaatcaaatcttttgatcaatagaaaaaaaacgatcccacttcaaagctcatacacgacatcatcaattttcagaagattgatcatgggacacaaaatagagtaatagaaaaggccgattcctcaaaattagggtttccagacggatctagggtttcgcaacctaaacactgcagtagatttctccgatcttagaacgaagactgcaactagggtttatcaatcgacaaagatcgaagaacacactttatttcttactctatcgacgagaggatatgggtgtggtttagggtttcgacgtcgggaactgatgaattcttctttgcccagaccttcggattaaagatgaatataaataaaactgaacgtaaaagaaaacttgtcctacaagaagaaagaaatattctagtgggccgtggaagtcggttggattgaggttgactaaaaaccacgtggcttgaaacatacaatttcattcacggttaactttgtctttttccgtagtggttattacataacctacattaaaccgatgcgtttcgtatcaattcaccgaagaaatcaaaactgttagagcaactccaatgtcgaacacgtgtacgttcacccacacgtgtcagatacttaggttgccagcttatcttgctgttggatctatatgctgcaacgtattaatataaaccgacctcgaaaataaaagagagaagagaaaaggatctcaatccaattgaatcatagcaaattaagtttcgcattcgaagtttttcttgatttgataaaaatggcggccatgcaactaacaagaaccgctctagttggtctctcaaaggctttccctggaatcaaagctccggctactctcgctgcttcttcccggaaagtctctcgcatctgcttcgccacctccgttagccaaaacgaggtcacgatttttagatattcatatgattatagaacaagagtaattttgttttagttctcatgtatttgatcatgtgagagttttgattcaagtaagtcacataagacgtaaacaaagtagcaaataacgtttttaatgtccattttaacgagacggtcctggatttaagatatcgatacattttttgcatagtactcgtagcggttgtggtgtatcctagctagacaagattttggtccggtttattgagatatatgtaggtgttcctttggttaacatgttggtcaaactattaaccctagtttgtaccttgttatgtttattttcagggaagagatcctctagataacgctagagactcgagggctgattcagcttacggatcgaagaaatggagggaggacaccggagaatactatgcccaagcggctaaagacaaggctaacgaaggagcaagcaaagctgcagataaagcctacgagacaaaagagcaagcaaaggataaagcctacgaaactaaagagaaagcaaaggatacagcctacaatgcaaaagagaaggctaaggattatgctgaacggactaaagataaggtgaacgaaggggcgtataaggcagcggataaagcggaagatacaaaagaaaaagcaaaggattacgcagaggatacaatggacaatgcaaaagagaaagctcgacatgcaaaagagaaggtgaaagagtatggagaagatactaaggagaaggcagaagggtttaaggagactgtgaaaggtaaagctgaggaacttggagagaagaccaaggagacggtgaaaggagcttgggagagtactaaaaacgctgcccaaaccgtcactgaagctgtggtagggcctgaagaggatgcggagaaggcacgagctgatatgaataaaggcgtggaagatcacaggaagaaaaaagcagagaaagatcaaaaagaggacgatttcataacatttaactgatgaggaaagatacatatgcgttctgaagtgttattgctttttatgtattgctctgtttcctgtttattctctgttttaaaactacgtttgatcacatgtatgtgacagtgtgagatgcattagtatataaataaggtaaatctaaggttatttctaaaattaatatgattctatttcttttcgtcgatctcaatttcgatcgagcattgaagatttgatgttcgaaggtcataaagttaatttgagtagtgttttgttcaggtacacaattaatgtccctaagttaattatctaggttgttttctgattttttttaattgttattcattctataaacttcttgtatacttgaatttgttatcattgtgatactgaggcatttcttatttaaccattctgttctcacaaattgaatccatcaacacagctttccattgccgtgtgcttactgtcaacacggtttttctgttgccatgtccttttgttgtttcaaagactcgattttgaagattttatagcttgcgtgattgatagatcaggagggttttctctttgctatgtctattctcatctgtctttgttgaggtttttctttcggctccaatgtattttcatgcaatattgtgtggttttcacctctgaatagatgtttttgcacaagaatgtcttttgtaattttctgtatcaatatcagatggcaaaaaaaattgtataatcttaattaaatgtggaaaatttctaagaaagatttctaattttttttctgatacgccaataaaacatcctcattagacaatttttaaaagatgtctttaatattaattagtaataaagttaaaagacattcttcttttttgtgtctcaagactcaaatgtcttttcaaacacacaaatctaaaactaaagacacccattattttatttttttattggtattagttttatatttagagacactcacaaataaatgaccaatgtgtgttctctaagaactaggtgtgaatgtctcacatacatatttttttctcaaaacaaatctctagctgcttgttgtcttgattttgggtattgttgtatactgtaatctattatatcttcaacagttgtatccaacagaaattgtatccaatgcaaataagtttataagaaacattaattttgttttataataagttgtttatattgcaccaatgagagcgtatgggttaactctactctcacacacatttttttttcttctcaaaaattactataaaatctcaaataaaggtaattatttaggaactttgtcgatttcgaaaatttaaggtttgaatggttatggctggggcgaacaaaaccgtcaacggatcagaccgatttttatttatcattcatcaattatactccggaatggtccggactaaaaaaaaatagaagaaaaccgctgcggaccatctgcggaccgtttttacatacaaataaatttggtctgcagcggtttattgtccgtaccaaaaatgagatggactaaaccgcagacaaattagaccgctttgtccgctgcctccattcatagtcttaggttatgtttctaatcattagatagcgcgtgagcacacatatattcatacagcacgtgaacgtacatgttttcacatactatctcctatagtaaatatccatgtcatatatttatatagttggacttaattaattgttaattacattctcaattttcactagatttctttcctgtttatttaattttctgatttaatagcttatcaaaattttcacatactgacaagaattaacccttagtttttttactaagcttaccctaacgtttatggtgtgtagatagatcttcagattttattaaacactatctttgactaactctccttaaatgttcacgccccaagaacctatataagaatacactttccacaacagaaaagatcatagtaacaagaagatcttataaattaagtcttcgcgtttttggagaaattaaaataaacaacctctcgagagaaatgaataatttgaatgtttttacaaatgaagacaatgaaatgaatgtgatgcccccaccgcgagtgtgtccaaggtgttattccgatcaaaccagattcagctacttcaacaacaacaagaagtctcaaccgcgctacaaatgcaagaattgttgtagatgttggactcatggtggagttttaaggaacataccagtcactggaatatgtgataaatccaatcttccgaagatagatcaatcttcggtttctcaaatgatcttggctgagatccaacaaggcaatcatcaacctttcaaaaaatttcaagaaaacatttcagttagtgtttcttcttcttcagatgtttctattgttgggaaccatttcgatgatttgagtgaacttcatggtataacaaattctactccaattcgaagttttacaatggatcgcttagattttggtgaagaatcgtttcaacaagatttatacgatgttggttccaatgatttgattggtaaccctttgataaaccaatcaattggtggatatgttgataatcacaaagatgaacacaagttgcaatttgaatatgaatcataaaaccaacgctagtggaagggatttttaggcactgagatgaacaagatcagaattcagaaacaactctttgtttaggtcttctacaattttaattgtattacttgttttctatctttaagttaatgtttttgtccttgttcgtttatgcttcctatttgcttttaagttttgtttatgatttatgttgggtccttttttagttatttaagtttgcaacttttttcaattccctaaaaatttaaacataagttgtttgatcttctttcttttaaatatataattatacaagcgttactatttctttatattgcaaattctactctctattatttgctaatagtatttttccttgttataagtatcttgacttgagcaaaccacacactaattttttagaatatctaaatatcttatataagatgcaaatatttagataagcgaaaaaaatacgcgtccaatatatagaaatcaatatggaatctcgaatcggactacacaaaagttaaacttgtgagtgccacttgataatttcttgaaaactatataatgtaacaaatatatttttctataagtttcggttttgttctatgaatcgacgactgagtgggtttctattctagtcaacccaattattcaatattattataatgctattcattattcgaaaatttaaatatacttgtataattgttgaatttataaatagttgacgggaaaaagtaagaaattgtaaataagtacatatataattagcaaaagtgactatcaatataaggctgtgttaattaatttgttggttccgattataggaaatgtctgaaacttctaaattatataataataaaatatgtgtaattattcctataaactatttaactgtatctgaaatgttcaaaattaaatatggaccaattttacaaaagatgtcctaaaatattagtagtcaactaatataataaagtagatatgtaaataaaattaaattgagattttctattaaatatatgacagaatcaacagtgatatatgtaatacttagaaattcattaaaatatatttttttaatataacatttatagtctttcacgaatatctagatttcaaattttatttgattgttgaaaaatgtgttcgttgttaaataaatttatttaatattaggtgattaactaattatgaatatatggttaagaaacgaataaaaacatagatgaatatttcatctaaatggttcatcctccattatgcagaaaccaaaactttttaattgactaaagttttacattatggtagatttcgagcttgcttacaaatgcctgtttcttctaatgataaagaagcttcaacgatcatagtatttagtgtcgagcctagtaagaagaaaactctgaaccaaagaagatctgatgctgtggccaaaactgttagagccagaggttcaagcagttcatgggttttggattctattgcaggttgccaaattttagacttgatataaaatagtgagaccatattttgctgttgttacttgttaggaggattatggagaattgtgttaatgattttttacaaggattctttatacagtggactgtcaaccaacctttttaataatatatgtaaaaatggagagcaatgtcatcgtcaacatttcttatgacaaaccaatcaatcagtaacttcctaaaattttcaccatgagttaaatagcttttgttataacagaatttgatgttatctgagttacgtattggacacatttgtggtgtcgacgtaactccgataacaccaaattctgttactacaaaaaatatatctcaaactccattatttcaacaaattacttagaagaaaaaattatatttcaatttataagaaagtggtcattttggctctggaagaaaatctgagaggaacaatgtttttcttgctaacaacttgtatctatttatattattatttgtatagttctgagtccttaccatttatactaattaatatatacatattaatacagtcaatctttttttctcaaaaataattactttgtgataaaataacaattaatgtttggatatagaaattcatgaaattgttgatataaaagtcaacaaaattttataaaattatctaattaagactataaaatattatatttcaattcatttctaacttttacatcattttttattgtcatgatagatatagcaactcattttatttggatttatatatctactttattagtcaactaccactggattgacattttaggaattctttatcatatatcatagtaatatgtattctgatattgtcagatgttaaataataaatatttaattttttaaaacaaatcttatatttctctttataattatttagtgttgtaattattatataatagaattctttatcatatatcatagtaatatgtattctgataaggtcagattttaaataataaatattttaatttttttaaaacaaatctttcatttctctttataattatttagtattgtaataattatatatacatatatatatatatatatatgttataattatgaaacatacgtaaggttattaaaagttatattggtgattattagatagataattatattattttagaacaaattacacaaaccacaacgacacaaacttatttttttggtataacgacacaaacttcaataacttaaaataaattaaaagaacataaaagagaaactgagcctccaaatgaaactgagacatgacttattttattagaaaaagagaattaggtaatatagttaagattcaaggaccacccttctctaaatgactaggatgcatccttccgctagtgctagcgttattataattcatgttcatagcgttattgaagctctggttccagttgtattgatccacttgattcatgtgataaccgttgtgattatcaacatatccaccaacttgttggtttaccaaaagattatcagacccaacatcataataatcttgctcaaatgatccattatggaaagctaggcgatgatttggtcgaaaagtttgagttggatgcacatttgttaccataccaccatgaatatgagacaaagaactaaaacggttccctacagcagcaacaaaagatgaagatgaagcaccaaaagatccaacaaagtcattattttcttgaacattaaagaaaggtttatggctacctggttggattccaacagaaaccatctgagcaactgaaggttgatttatccttgtccgcttggcacgactactcccaccaattggtacgtttcttaaagccccaccatgagtccagtatcttcgacagttcttgcagaagtagcgcggttgaaactcactataattgttgtagtaacaaaattttgtgttatcagaatcacatcttgcacacactcgcggtgggggtggtggaggcttcacatcattcacttgattgtcttcattggcaacaacattgaagttatccatttttctcaagaggtttttgattttctcttagaaagaaaagacagaagttataagatgttgttgatgttatgatatttggtgttgtggagagtgtcttcttatataggtttttgtttagtgaaaatctaagaagagtatgttattgggttaaaaaaagtgagattatgagcaaaacgtgtcaaacattgtttattaatcaaatctaaacatctattacacaccataaatctttggctaaacttagtcaaaaactaaggattttttattctaactcttgtttgtatatgagaaatggtgaatcaagatataattaaatggattagacatataaactgaaaaagatctaaagatattgatagtgtaatgataatttaaggtcaaacaagcatatattgcatatattaactatgatagatatattatatgtgacgcgtgtgctcacactctatttcataaatacatattatatgatttgctcatatatagaatagatacctagggttggaacaaaaaaacatttagtagtcaataatacataatatcaagataataggaaatctaaccataatacatatgtttttaattgaaaataacctatttttcgaattcgacaaaaacctaattaatcaacctttatagggatttaacttaatagagatttgttgagaaaataaaatattatatttgtccatcgcgtgaagttcactcgtgttattattggtgcatcgaaattttttgtcataaaactttattttgtaaattacgaataccttaatttgtacaatgtctattaaattaaatagatatatagaaaatgctagcaaaatttgtctttgcaccacttgtaggtactttagacaaacaatacaacatcagtttttattcatttgatctcatggaccggctttagaggtaactcaatggccctacaatcagggccggctcaacaaaacatgggaccttgtgctcattaattttgtttctaatatatgttctatatgtttagattttagtttgattatacactactgtttgtaaaatggaccttgattgcttaaagaaaatgattgaaaaaataaaggaccctgtgcactagcaccaagggcacaccctctaagtcgggcctgcctacaatggctcaactaactcaacggataagatcacatgtcttctgggccttttctacttggtaatgttagcgactactgaagttgaacgatcacacggaccaaagcggtttcatatttctgatcagaaccaattcttttaactatcttttttttagcttgctaaaaaggtaaatatttcataaaaatgaaaaaaaaattagaaatacaataaaaatcatagacctatgcaatgttcccatgacaaaaaaaataaaaaaaatggaagcgtatatgaaaaacacattttcatatcgaattcttgaatatgaatacgaggatgctggcttcaatatcgaattatttccccaaggtgaatatttcttttctcctttttttacccatctttgatgtaatcatatctagagatctccgtttgttttttgacatggtcttgtgggcatttgcaagttccaaaaccaacaaatgtgattttactcgctaaaaacatcggagatgacattggttctcgtctttatggtatgtatatcagaggtcatggtattctctcatcccaatctccactagaatgggacctttcctagtgaaagctctacatgctttttgactagcctattcgatggccgtaatggctcaccaacgtcttgacaataacaagcagaagacaaatccaagggagatttgatgtttggttataaacccatatatatgtaacgtgttttttgtctatgaagctagaagatatgaggaatgaaaaaaaagatatgtaacgtgttcataaaatttaactgatgagaaaagaaagaaacctatgcgttctgaagggttattgctttttatgtattgctctgttttcagtttttttctctgttttaaaacgacgcttcatctcatgtatgtgagatgcattagtatataaataagacaaatctacggttatttcttcaattagtaagctttctttttgtcaatctcaatttcgatcgaccattgaaaatttgaacttcgaaggtcataaagttaacttgagtcgtggaccactggtgttgaagattacttctttcatttatttttaattttctattatgattgaattgcttgtcgagagcatgcgattaactcaagtcgctcacacattttttttttttgttttctcagaaatcattattaaatcccgaataaaactataaaagtaattataaaattaatttaagtaaacttggtattgggtattgttgtttactaaactttttatgttcaaaccattttgtatatatgtaaagatgaatctttataattaaaaagaagtaaataattacgcatatatcatgagcacacatgttttgacatagagcttgagcacacatgttttcacatactctctctaatagtaaatttacatgcaatatatgcttggtttgactttaattaattgccattatacttttaatatatgtccctagattttttttttctgtttatatgtgattttctcatttaatcatatctacttgattctacaaaaattcacatacagacaagagttaaccattggtttttgactacgcttagcctaaagtttatggtgtgtagacagattttcagattttattacaccacaatttttaacacgttttgcttataatctcactctcctaaatactgaaagtacagtttcttaaatgtccacgccccaagaacctataagaatacaccttccacaacacaaaattagatcataaaaacaacaagaacttataatttaagtcttctctttctacgaaaaaatcaagaacttcttgaaaaaaatggataacttgaatgttttcgctaatgaagacaatcaagtgaatggtttgaagcgtccacccccgtcacgagtgtgtccaaggtgtgattctgataacactaagttttgcttttacaacaactacagtgaatctcaaccgcgctacttttgcaaaaactgtcgtagatattggactcatggtggagctttaagaaacataccagttggtggaagttgtcgtaaaccaaagcgtctgaaggtagatcaatcttcgatttctgagatggtttctgttgagaaccaaccaattaatcatcaatctttcagacaaactcaagaaaacaatgagtttgttcgatcttttgacgcttcttcttctgctactgttactgccgttccgaaccattttggttatctaagtgaacttcatggtgtaacaaatttgcttccaattcaaagttttcgaacaatggactgcttagatttcggtgatgaatcttttcaacaaggttattacgatgttggatccaatgatttgattgataaccctttgataaaccaatccatcggtgggtatgttgataatcttacaagttattgcataaatcaagtggaaccaaagcttcaaccacgctatgaacatgaatcataaagccagcagtagtggaagcataggatcttgagacactcagaagaacaatatgagaaacatgtttgtttaggtcttcttaacattcggaagttaatgttccagtccatcgtttctacttcttttttttttattagtttcgtttatgcatggtttatgttgggtctttttttagttataaaagtttgcatctttgtttaagtcccaaaatattcagacataagttgtttaattcccaatttctttgatgcttgtaattttttttttaatctcgcgaaagcaaaattttaggctgatgccttggcaaaagaggtctcctcgcttgtatgaactcaattctctaaatcgaatgaaaacaaggttgtccaaaaaaaaagaaagttgtttgatcctttttcctttttatatatacaataagaactagagatatttctcgaacaatctcaacacgagttcgatttccgttgtgagaattaattgattaaaccttagtctcgattgtgaaatgttcagaattaaatattatcaatattaattctccaaaagaaatcctaaaatgttagtagccaactataaagtagatatgtgaaccaaaagaaattgagattatttattaaatatatgacgaatcaacaatgatgtaattaatacttagaaattcgttgaaatctatgttttaattaatacaacatttatagtctttaatgaatttctagattttaaaattttaattaattattgaaaaatgtgtttcttaataaataattttattttataggtaattatgactatatggttaaagacctaataaaaacataaatgaatagttacaacttgctctctcagattttcgagagccaaaacggccactttcatagacaaaatcttaatgaaattaaagaaaatctgatataacaaggacattgacaaaacgtccagattgtgttagtatagacgtggattatcataagaccgccggttaatgcaagggaaaaagctagattttgtcagtcatcgattccgacagagatagagatgaggtcttccacaaggaatttgaaacgtgctcactctttcctttttataataagctttcttaacttcattatccctatcgttttcaaaagttggcaaatgcattatcaccatatagtgaattagctatatggttacatgaattttttgagtgaattaactaaccatactgcatttccttctaatttttgtttacctccgtttcattatatactgttttaaaatatttttaacttttaattatatcgttatgaaatacacttataagggttttttttttctattgaataagctgaaataataacaataaaaatgattacgatcgtaaatttggtgtaatttctatgtaatgcttttaaatttttgagacaaaataaattgatcgcgacaaaacaaataaagacttacactacacgtgtctatacattaaatagcaaaagctattgacggtgcaaaacgtcaaaaacaaatgccctacgtcgcgggtaattaacaaactcatccacatatatatacgagtttcgtatctcaaacatttcataaatcaaaccatcatatacctctcaaatcatttctttgatttctataaacactattcttgttaatgactgaccataaaaacaaatggctacttctcgtctagctaggtttgtatcagaggttgctccacctcaatttgtgacggttatgaggaggcatagagcagcgaagcagaagctagacacaatcaaagaagaagagaataaagaagattctttcaatggtgggatggtggtgatgatgaagacatctcatcaacatgtttattcacctaattcttcttattcctcttcgtctatttcggtttctatttccggatctagcagctctaagaattttcgaagctctttttctgtcttcgaaaactaagatctacgtactaatgttgtattttttaatgatcgggtcgatatttttgtatgcacccgtttatattatatagttcagacctttttatttttatttaaaaggtctgattaataatacatgttatacacttataccttttggttatcgtttgtaattttcgatcgaaaccccgttttaataaggatgtgtagttttgaagatacttagttcgaaatagtaaaaatggaatgttttgcacattttcataacaaacaaatatgtatgtttaaaagttttatttttatttaattattcattcctaacatttaacaaaatctttatagataagaatatgtaattttggagataaataacagagaaatcaacgactttaaaaacccttgattcgttgttcttagtgagacttttgactaaatttatacacatgtgaatattgttaagaatagagagaccatttggtggtttttaaaatttaaaaaatgaaaaaaggttccttccgatttctcaattcatctcctgagtgggtttttctcctctgttttatttctctaatagccctagattcaaggagataaaactgctcaaatcaggtggagatttgctctgcttcattggttttttgttttgtttgagttagtgactttatctatttcttcttcgccaaaagacgagatttttaaaacaaatttcgtctttttcaaattctcgtgtcaaattgagacatttgggttgctttgattggatttcgtagactctattgatcttcagatcgtgtcgagatttagctgctattgtggggtttagaatccttctctttaccggattctcaggttataaatctcctttacttctttcaatgaagttgttcgatgaattggctacattttaggtactccaggtgcagttttgtggcactaattcgtcttgtgaatcaacaagtcgagtgattttgattgtggaaggtagtaatttttagttgaccctcacaatgaaaagagtaaaaagcgaatcttttagaggagtttatagttctaggaggttcaagttgtcacatttcttactagctatagcagggttttacttggttttcttagcttttaagttcccacatttcattgagatggttgctatgttgagtggtgatactggtttagatggggcattaagtgatactagtttagatgttagtttaagcggatcgttacgtaatgacatgttgaataggaagctagaagatgaagatcatcaaagtgggccttctactactcagaaggtgtcaccagaagagaagattaatggatctaaacagattcagccacttctgtttcggtatggtcgaatatcaggagaggtcatgagacgtaggaataggactattcatatgtcaccttttgaaagaatggcagatgaggcttggatacttggatccaaggcttgggaagatgttgataagtttgaggttgataagatcaacgagagtgcttctatattcgaaggaaaggtggagtcatgtccttctcagatctcaatgaatggagatgacttgaataaagccaataggatcatgttgcttccctgtggtcttgctgcaggatcttctattacaattcttggaactccacagtatgctcataaagaatctgttcctcagcgttcgagattgacaagaagctatggaatggttttggtttcacaatttatggttgagttgcaagggctgaagacaggggacggtgaatacccccctaagattcttcatttgaaccctaggatcaaaggtgattggaatcaccgaccagtcattgaacacaatacatgttataggatgcagtggggggttgctcaaagatgtgatggtactccatccaagaaggacgcagacgtgcttggtaagattttgagcatccatcataaactgttgttagttgccggaatgtagcaagtccatgctcagaagtctaagtttgaattaccttagcttcttttttattgctgtgtagttatgtttctttttgttttctcttcatctaagtaaatgtacttttccagttgacggattccgaagatgtgaaaagtggacgcagaatgacataattgacatggtggactcaaaggaatcaaagacaacatcatggttcaaacggtttataggacgtgaacaaaaaccagaagtcacttggtcattcccttttgcggaaggcaaggtctttgtcctaactttgcgagctggaattgatggtttccatattaatgttggtggaagacatgtgtcttcattcccttatcgaccggtatgtgatatcagatgagcattctacttgtatatggctttggtctcagcactcaatagtatcatttgttcaaaccaagaggattcatctcgtccatgtctgataactttgtaaaatattttgtgatgtctggcctctcagggatttaccatagaagatgccacagggctggcagttacaggagatgttgatattcattctattcatgctacttctctttcaacatctcatccgagtttctcaccgcagaaagctatagagttttcttcagaatggaaagctcctccattacctggcactccttttcgccttttcatgggtgttctctctgcaactaaccatttttcagagcgcatggcagtgagaaagacatggatgcaacatccttctattaaatcttcagatgtagtagcccgattctttgttgcacttgtaagttcttacaatctttccttattttaaagcatgatctttaagaagtttaatactgcaggtcgatttaattgaaacattgagatggagatttgctgatttgaagttcttatgctttggaatactgagcagtttatgtgtttttgttgatttgttttgtgtagaatccaagaaaggaagttaatgcaatgctaaagaaggaggctgaatattttggagatattgtgattctgccctttatggatcgatatgagctagtggtccttaagacaattgccatttgtgaatttggggtattgatcatttctctcatgactccatatctgtttaagtctttgaacaatctctgataaggatcagtaaatgaacagtttccctcattgtagttactttacacaaatctaattatgagagtctgaatatcttccattcaggtccagaatgtgacagcgccatatataatgaagtgtgacgatgataccttcatcagagtggaatcaattttgaaacaaatcgatggagtctctccagaaaaatcactttatatggggaatctaaatcttagacatcgtcctcttagaactggcaagtggacagttacatgggaggtacaatggcttctgttctttacctgcatatagtctgtatgattcagaaatcagaagcagcctcagatactaaattttctcttatactgtaacaggagtggccagaagctgtgtatcctccttatgccaatggacccggatacataatctcaagcaacattgctaaatatattgtttctcagaattcaagacataagcttagggtctgaccctttatcatcgtcttacgttcatctccatcttttactgtcatgaacataagagtctcctaacattttcaaactatttcgactttgttgtcacagctattcaagatggaagatgtgagcatgggattgtgggtggagcaattcaacgcctctatgcagcctgtcgaatactcacacagctggaaattttgccaatacggatgcacactgaactattacactgcacattatcaatctccgagtcaaatgatgtgcctgtgggataatttgttgaaaggtcgaccacaatgttgcaatttcagatgaccaaaacatagcactagccggaagatattacaggattacagatttggcaccaccttaacccattttgtaatttttcctctttggtgctagttgcttacatttacacattcaagataacaatctcttattgtacattgattaggattttgtctaagaaagagatttacactgatatctaaacaaattctttcaaaacgtctttgccataacactatggggctaccaagaaagagaagccaaggtcactgtattatacatttatactactctgctggtctttaagttcttgagtcatgttatcaagattttggctttcatcaagtcgcatttccttaatcatctgcatttcttgcgcttcactgaaagatttccagcttttgcaagatggggaaatggaagagggcatccacaagatccaggtagatgtcactgagttgttttcttcagtgtttgccataatcctcatccggtagatgtgacatacccatagagacaacaagtttggttagtatacagatgaattgatcagaatcctgattgtataaacagaacatctaaacatcaatcttaagagtgtgcaggtcaatagcagaagcaactgtaatgaagaaaactcgaaagacggattgattacaacaaaaaaactgtggcgcaaagactaccaatttaatcttttcatgatcagatggatacagccaaatgtgcctttagaattttgtttagcaccatgtttaatccgcacgccaaaaccttacggctgtgaagttctgatacacggtgcgtgaatcaatcaagaagagaaaaagagaggcatagagaaacttgcacggttaagatatccagatgaactacacagtgataaagtttcactttttatgtctttgaagaagcattatagattgatagagaatcatcagagcttaacctgaaacgaaccatctttctccggacagagaatggcggcggctgtctgaagttattttgagaaagtgaagatttttagggttctgagaagtttccatcacttgaagtcttttaaattttaatagtatatgataatggaattgcctcgattctaatgcaattgacgacaatgcccacaagaacagagcaaaatgtctccattctcagaaacctctgttctgctacttcccatggtcgagaaatgcataaacctcttgcaaacctacggcgtttcatcgataacgaaactcagacaaatccacgctttttcaatccgccatggagtctcaatctcagacgccgagcttgggaaacacctcatcttctaccttgtttctcttccttctccacctcccatgtcttacgctcacaaagtcttctccaagattgagaaacccatcaatgtctttatttggaacacattgatcagaggctacgccgagattggtaattccatctctgctttttctctataccgtgagatgagagtctctggtttggtcgagccagatactcatacttatccgtttcttattaaggctgtgacgacaatggcggatgttagattaggagagacgattcattcggttgttataagaagtggctttggttcgttgatctatgttcagaactctctgcttcatttatacgcaaattgtggagatgtagctagtgcgtacaaggtgtttgataaaatgcctgagaaagatttagtggcttggaactctgtgattaatgggtttgcggaaaacggtaaaccagaagaagctttagcgctttatactgagatgaattccaagggtatcaagcctgatgggttcacaattgttagcttgttgtctgcttgtgcaaagattggtgctttgacattgggtaagagagttcatgtctatatgatcaaagtaggtttgacacgaaacttgcattccagcaatgtgctcttggacttgtatgcgagatgtggaagagtggaagaagccaaaacacttttcgatgaaatggtggacaagaacagtgtctcgtggacttcgttgatagtcggtttagctgttaatggttttgggaaagaagccattgagcttttcaagtatatggaatcaacggagggattgttaccatgtgagatcacgtttgttgggatattatacgcttgtagccattgcgggatggtgaaggaaggttttgagtatttcaggagaatgagagaggagtataagattgaacctaggatcgagcattttggttgtatggtcgatttgttagctagagctggacaagtgaagaaagcatatgaatacatcaagagtatgccgatgcagcctaatgttgtaatctggagaacattgttaggagcttgtactgttcatggtgattcagatttagcagagtttgctagaatccagatcttacaactagaaccaaaccacagcggcgattatgttctcttgtcgaatatgtacgcatccgagcagcgttggtccgatgtgcaaaagatacggaaacaaatgttaagagacggtgtgaaaaaagtccccggtcacagcttagtagaagtaggaaacagagttcatgagtttcttatgggtgataagtctcacccacaaagcgatgctatttacgctaagctgaaagaaatgactggtagattgagatcagaaggttacgttccacaaatttctaatgtctatgtagatgttgaagaggaagagaaggagaatgctgtggtttatcacagtgagaagattgctattgcatttatgttaattagtacaccagaaagatcaccgattacagtcgtgaagaatcttagagtatgtgcagattgtcacttagcaatcaaacttgtgtcaaaggtttataaccgagagattgtagtcagagatcgtagcaggtttcaccattttaaaaatggttcttgttcttgccaagattactggtagtctggtaatgcagaaaataaaattattgtttcatcgcagatcgttcaaattctacggacaatcttcgttaattaaagtcttctaggggaaatttgtaaaattttaaagtatatatgtgggtaaattttgcatagataaaagtaatgggttcaaatcttgcaactaaaaaacttataggggcaaaacgaaaattgagtgaaatgagattataccgcgtgttttcatggcgggattggaaatattttgaagtagatgaaaatttggcgctttttatttagtctgtaaagctttcaagggaagcctctttgaaggacacgcttcgtcatctatctatctatatacccaaagagtcgctttgttcctgattcatcagattgattcgtttcgttttctctgagtgaagatcgaaaatggcggacactagtcacctggagaggatgggaagagaactcaagtgccctatttggtaaatcgcgtctctctttgctcaattttgtgacgagcataaaccctgatttcgtattgtctgactaatgaatctcgtttaactgccttggtaacaattttaatttgtttttttttgttattggcagcttgagtctatataattctgcagtttcactttcgtgtaaccatgtattttgcaagtaagtacctttccttagtttgttctttcttcgtattctcatttcatcaatctttaaaagtaatgaacacatggtcttctcttgatttcagtgcgtgtatagtgaaatctatgaaaatggatgctacttgtcctgtttgtaaaatcccttaccatcgtagaggtactttctcttgctctttattgatctcagagttcagctttatctgttgttaaacctaagtttgcagtttgatgattatgttaatatgttagagattcgaggtgctccacatatggatagcttggtgagcatttacaagaacatggaagatgcttctgggattaaattattcgttagccagaataatccgtcaccatcaggtacttaaaattaggaccaatgctttaacattttggttggcttgaacgaaacaaaggcagtgatagactcgttgcaagttcattttaagcgtagtaactggattttaatcatttcacttgaaattgaactgtctctgaattcaattgaatggtctaaaaagtggaattttgtagtaagaaaaccctaaaaatgccgattaagttcccacatgaatgaagagaatgctcggattttacctgaatgaagagatatgtatttctttctaacttgtgttctgtgatatgcgtctacagataaagaaaagcaagtaagagatgcttccgttgaaaaggcaagtgataagaatcgtcagggatctaggaagggccgagcatccaagaggaacgagtatgggaaaaccaaggaaatagatgtagatgcacctgggcctattgttatgaaaccttcatcccaaaccaagaagagggtgcagctgctccagaatctgtctgctgaaagtttaactaaacctactgagtctgttgaaacagctgaaaaacccaaggactacactgaaaacactgtgattcgtttggatgagcatccatctctgaataaagaaggaaatctttcacccttcttttggttgagagatgaagatgatggggagaactcaagtcagcgtacagaaagtgatcaacttttagggactacaccagttaatgttccctctttcagcgatttgatggactcagatcatgagagcccatcgaaggtccatactcaaaaacctcaatagcctttttagtgctatctttcaggattcatattgcattatattgttctgtagtattgatacattctacactagtttatgatagaaatgtgtttgataaatgttagttatgcggtggaggttatctttgatttagattgaatactgcgagttaaaaggtctttgacacatttattactcataaaagtcatactcagttacatggaattccctcattctatccaatatcctaaaaaagtgtcggatcctttgatcttactttttttccgatgaatgtttcaggaagacgagcaacaaaagcccaatccaggtgacatgtttgatagcgaaatgtttgaatggactcagaggccttgttctccggagattctacctagtcctgtgaaggccaaggtaaaggctgttcttcactctggtacagcaaggtctttttgttttctatgatagtgtcatcaagtgtgttgaaatgaactcaaatttcatcgatttgcaggtcctaggtagagatgagattgatcttactcaaaagaagctacctaaagttaaagttgcatcatccaaatgtaaaaaccgcaaagcaggaagtgcaagaaatacagttgctagacgaagcattggggtttcacaagaggacaacatggaatcatctgcagcagcaaccattagtgagcaacaagatagtcgtgggacttctggcacaattatcaggaatgatgtgaatactgatgaaaatgtgaaagctaaaagagctacaagaagcaaggctcagagtacacgagttcagtctgatctaaatgtatccaatgaagctgatgggaagcaggggacaaagaggaaaagatctagcattaaatcctctccagctcacccaatcgcaggacctaatgagctctcacttggaacagaaattgtgggaaagggggatcaggatcaagcccatggtccatctgatacacatcctgaaaaacgaagtcccaccgagaaaccctctctgaagaagaggggaagaaaatccaatgcaagctcctctttaaaagatctatctggaaaaacacaaaagaagacttcagagaagaaattgaaactagattcccatatgatctcaagcaaagctacacaaccgcatggaaatggtattctaactgctgggttgaatcaagggggtgataaacaagattcaagaaacaataggaaatccactgtgggtaaagacgatcataccatgcaagttatagagaaatgctcaacgataaacaagtcttcatctggaggcagtgcacatttgcgacgatgtaatggatctttaacgaagaaattcacatgtgccttttgtcagtgttcagaagacacagaggttgaattcactatctcacattggagtcctagatgtagccctttgttgacttttatcatattattaattggaatgttatatgaacaggcttcaggagaaatgactcactactacagaggtgaacctgtctctgcggattttaatggtgggtctaaggtcatacatgttcacaaaaactgtgctgaatggtaagaaatctggatagtaattatccgctcatgccttttgacatcatttaaaatgcttgaatgacacatgtgcttctgatacaccactgactgaacgtaaaaaactgttttgcatttttcagggctccaaatgtatacttcaacgaccttaccatagtgaatcttgatgtggagttgacaagaagccggagaataagttgcagctgctgtgggcttaaaggcgcagcacttggttgttacaataagagttgcaagaatagttttcatgttacgtgtgcaaaactcataccagaatgcagatgggacaatgtaagtgttgcatatattgtagaagctctatatagtcccttacacagttcttttaacacattttcttatcaacaggtaaaatttgtaatgctatgccctttggatgcatccattaagttgccctgtgaagaggctaattcaaaagacaggaaatgcaagcgtactcctaaagagtatgcaattttatctactgataaggattatgatgtgattccaatatttgaaattagacagctgacaatagatcattgttttctctagaccactgcactctcagcctaaacaagtatctggaaaagctaacatccgtgagctccatatcaagcagttccatggattttccaagaaattggtcttatcttgctcagggctcacagttgaagagaaggtatggatatatctactcttttactatatgcaacactcgagctgaaacttgtatttgatggatggctttgattgcagactgttattgcagaatttgcggaactgtctggagttacgatctcaaaaaactgggattcaactgttacacatgttattgcatcaatcaatgaaaacggagcctgcaaaaggaccctcaaattcatgatggcaatcttggaggggaaatggatactaaccattgattgtcagtattcttaacccattagcaacgaaacatatatgtttgcaatctgacaatcaacaaattgtctaagtgttgtctatcttttcttgcagggattaaggcgtgtatgaaaaatacaaaatatgtaagcgaggagccatatgagatcactatggatgttcatggaatacgagaaggaccttatcttggaagacaaagagctttgaaaaaggttagcttcgtctctctttgatgctctctatgacacaaccaacttgataataattcatctaagtggtttcattctccgttatgcagaagccaaaactttttactggacttaagttttacatcatgggagatttcgagcttgcttacaaaggatatcttcaagatctgattgtagcagcaggaggaacaatcttgcgtaggcggcctgtttcttctgatgataatgaagct

SEQ ID NO: 605 - DNA, 91387 bp, Arabidopsis thaliana
tatcaagcctgatgggttcacaattgttagcttgttgtctgcttgtgcaaagattggtgctttgacattgggtaagagagttcatgtctatatgatcaaagtaggtttgacacgaaacttgcattccagcaatgtgctcttggacttgtatgcgagatgtggaagagtggaagaagccaaaacacttttcgatgaaatggtggacaagaacagtgtctcgtggacttcgttgatagtcggtttagctgttaatggttttgggaaagaagccattgagcttttcaagtatatggaatcaacggagggattgttaccatgtgagatcacgtttgttgggatattatacgcttgtagccattgcgggatggtgaaggaaggttttgagtatttcaggagaatgagagaggagtataagattgaacctaggatcgagcattttggttgtatggtcgatttgttagctagagctggacaagtgaagaaagcatatgaatacatcaagagtatgccgatgcagcctaatgttgtaatctggagaacattgttaggagcttgtactgttcatggtgattcagatttagcagagtttgctagaatccagatcttacaactagaaccaaaccacagcggcgattatgttctcttgtcgaatatgtacgcatccgagcagcgttggtccgatgtgcaaaagatacggaaacaaatgttaagagacggtgtgaaaaaagtccccggtcacagcttagtagaagtaggaaacagagttcatgagtttcttatgggtgataagtctcacccacaaagcgatgctatttacgctaagctgaaagaaatgactggtagattgagatcagaaggttacgttccacaaatttctaatgtctatgtagatgttgaagaggaagagaaggagaatgctgtggtttatcacagtgagaagattgctattgcatttatgttaattagtacaccagaaagatcaccgattacagtcgtgaagaatcttagagtatgtgcagattgtcacttagcaatcaaacttgtgtcaaaggtttataaccgagagattgtagtcagagatcgtagcaggtttcaccattttaaaaatggttcttgttcttgccaagattactggtagtctggtaatgcagaaaataaaattattgtttcatcgcagatcgttcaaattctacggacaatcttcgttaattaaagtcttctaggggaaatttgtaaaattttaaagtatatatgtgggtaaattttgcatagataaaagtaatgggttcaaatcttgcaactaaaaaacttataggggcaaaacgaaaattgagtgaaatgagattataccgcgtgttttcatggcgggattggaaatattttgaagtagatgaaaatttggcgctttttatttagtctgtaaagctttcaagggaagcctctttgaaggacacgcttcgtcatctatctatctatatacccaaagagtcgctttgttcctgattcatcagattgattcgtttcgttttctctgagtgaagatcgaaaatggcggacactagtcacctggagaggatgggaagagaactcaagtgccctatttggtaaatcgcgtctctctttgctcaattttgtgacgagcataaaccctgatttcgtattgtctgactaatgaatctcgtttaactgccttggtaacaattttaatttgtttttttttgttattggcagcttgagtctatataattctgcagtttcactttcgtgtaaccatgtattttgcaagtaagtacctttccttagtttgttctttcttcgtattctcatttcatcaatctttaaaagtaatgaacacatggtcttctcttgatttcagtgcgtgtatagtgaaatctatgaaaatggatgctacttgtcctgtttgtaaaatcccttaccatcgtagaggtactttctcttgctctttattgatctcagagttcagctttatctgttgttaaacctaagtttgcagtttgatgattatgttaatatgttagagattcgaggtgctccacatatggatagcttggtgagcatttacaagaacatggaagatgcttctgggattaaattattcgttagccagaataatccgtcaccatcaggtacttaaaattaggaccaatgctttaacattttggttggcttgaacgaaacaaaggcagtgatagactcgttgcaagttcattttaagcgtagtaactggattttaatcatttcacttgaaattgaactgtctctgaattcaattgaatggtctaaaaagtggaattttgtagtaagaaaaccctaaaaatgccgattaagttcccacatgaatgaagagaatgctcggattttacctgaatgaagagatatgtatttctttctaacttgtgttctgtgatatgcgtctacagataaagaaaagcaagtaagagatgcttccgttgaaaaggcaagtgataagaatcgtcagggatctaggaagggccgagcatccaagaggaacgagtatgggaaaaccaaggaaatagatgtagatgcacctgggcctattgttatgaaaccttcatcccaaaccaagaagagggtgcagctgctccagaatctgtctgctgaaagtttaactaaacctactgagtctgttgaaacagctgaaaaacccaaggactacactgaaaacactgtgattcgtttggatgagcatccatctctgaataaagaaggaaatctttcacccttcttttggttgagagatgaagatgatggggagaactcaagtcagcgtacagaaagtgatcaacttttagggactacaccagttaatgttccctctttcagcgatttgatggactcagatcatgagagcccatcgaaggtccatactcaaaaacctcaatagcctttttagtgctatctttcaggattcatattgcattatattgttctgtagtattgatacattctacactagtttatgatagaaatgtgtttgataaatgttagttatgcggtggaggttatctttgatttagattgaatactgcgagttaaaaggtctttgacacatttattactcataaaagtcatactcagttacatggaattccctcattctatccaatatcctaaaaaagtgtcggatcctttgatcttactttttttccgatgaatgtttcaggaagacgagcaacaaaagcccaatccaggtgacatgtttgatagcgaaatgtttgaatggactcagaggccttgttctccggagattctacctagtcctgtgaaggccaaggtaaaggctgttcttcactctggtacagcaaggtctttttgttttctatgatagtgtcatcaagtgtgttgaaatgaactcaaatttcatcgatttgcaggtcctaggtagagatgagattgatcttactcaaaagaagctacctaaagttaaagttgcatcatccaaatgtaaaaaccgcaaagcaggaagtgcaagaaatacagttgctagacgaagcattggggtttcacaagaggacaacatggaatcatctgcagcagcaaccattagtgagcaacaagatagtcgtgggacttctggcacaattatcaggaatgatgtgaatactgatgaaaatgtgaaagctaaaagagctacaagaagcaaggctcagagtacacgagttcagtctgatctaaatgtatccaatgaagctgatgggaagcaggggacaaagaggaaaagatctagcattaaatcctctccagctcacccaatcgcaggacctaatgagctctcacttggaacagaaattgtgggaaagggggatcaggatcaagcccatggtccatctgatacacatcctgaaaaacgaagtcccaccgagaaaccctctctgaagaagaggggaagaaaatccaatgcaagctcctctttaaaagatctatctggaaaaacacaaaagaagacttcagagaagaaattgaaactagattcccatatgatctcaagcaaagctacacaaccgcatggaaatggtattctaactgctgggttgaatcaagggggtgataaacaagattcaagaaacaataggaaatccactgtgggtaaagacgatcataccatgcaagttatagagaaatgctcaacgataaacaagtcttcatctggaggcagtgcacatttgcgacgatgtaatggatctttaacgaagaaattcacatgtgccttttgtcagtgttcagaagacacagaggttgaattcactatctcacattggagtcctagatgtagccctttgttgacttttatcatattattaattggaatgttatatgaacaggcttcaggagaaatgactcactactacagaggtgaacctgtctctgcggattttaatggtgggtctaaggtcatacatgttcacaaaaactgtgctgaatggtaagaaatctggatagtaattatccgctcatgccttttgacatcatttaaaatgcttgaatgacacatgtgcttctgatacaccactgactgaacgtaaaaaactgttttgcatttttcagggctccaaatgtatacttcaacgaccttaccatagtgaatcttgatgtggagttgacaagaagccggagaataagttgcagctgctgtgggcttaaaggcgcagcacttggttgttacaataagagttgcaagaatagttttcatgttacgtgtgcaaaactcataccagaatgcagatgggacaatgtaagtgttgcatatattgtagaagctctatatagtcccttacacagttcttttaacacattttcttatcaacaggtaaaatttgtaatgctatgccctttggatgcatccattaagttgccctgtgaagaggctaattcaaaagacaggaaatgcaagcgtactcctaaagagtatgcaattttatctactgataaggattatgatgtgattccaatatttgaaattagacagctgacaatagatcattgttttctctagaccactgcactctcagcctaaacaagtatctggaaaagctaacatccgtgagctccatatcaagcagttccatggattttccaagaaattggtcttatcttgctcagggctcacagttgaagagaaggtatggatatatctactcttttactatatgcaacactcgagctgaaacttgtatttgatggatggctttgattgcagactgttattgcagaatttgcggaactgtctggagttacgatctcaaaaaactgggattcaactgttacacatgttattgcatcaatcaatgaaaacggagcctgcaaaaggaccctcaaattcatgatggcaatcttggaggggaaatggatactaaccattgattgtcagtattcttaacccattagcaacgaaacatatatgtttgcaatctgacaatcaacaaattgtctaagtgttgtctatcttttcttgcagggattaaggcgtgtatgaaaaatacaaaatatgtaagcgaggagccatatgagatcactatggatgttcatggaatacgagaaggaccttatcttggaagacaaagagctttgaaaaaggttagcttcgtctctctttgatgctctctatgacacaaccaacttgataataattcatctaagtggtttcattctccgttatgcagaagccaaaactttttactggacttaagttttacatcatgggagatttcgagcttgcttacaaaggatatcttcaagatctgattgtagcagcaggaggaacaatcttgcgtaggcggcctgtttcttctgatgataatgaagcttcaacaatcgtagtatttagtgttgagcctagcaagaagaaaactctgacccaaagaagatctgatgctgaagccttggctaaatctgctagagccagagctgcaagcagttcatgggttttggattctattgcaggttgccaaattttagtcttgatataaaatagtgagaccatctttgtgtttattctgttgttacttgtttgtaggattatggagaattgtgttaatacaaggatttttcattttaattatatttataaggattatttatagaatgcaatggcaattaaccttttttatttattaataatatctataaatatggagagcaatgtcatcatcaacatttctgatatgagcccaagtctctttctagaggattatgttaattgttggaagttggtttcttttaatcaatagagacccttgtataggtcttcatacaacttatatataacactaatgcataaaagaaaacacttcaacatataaaaaaggaaaatatgaaaaccaaattcataaagtgaaacaccaaaactaattaattaaaacgtcataaccatttcctaatcaacctaacaatagtcacgtatcaatttcttacatgttcaagaaaacgttgagtttgttggattttttggtgtttctttttcttctcttcctgaaattggtggcatattggttattaccatatcaccatgaatttcagaagaggaagaaacacaaacagatctaagaaactcattgttctctttaacatgtaagaatgttgatgatgattaacttgttgggttgtgaaaaataaaataaaaacttacttgttggatatcaacagaaagcatatggaaaaaaacaaaaattatttacttttgcctgcttagcttcacgataacttcaatcaaccggtaagttcctaaaatctcaaccatgagtttatagtttttgttgtaaacagaatttgattctatcttagttacacattggacacacttgtggtgtcgacgtaactcagatcacaccaaattctgctacttcaacatctatatctcaaactgcattaattcaaaaaacaacttagataagatgaaaaaaattaacattaagaaagtggccattttagctctagaagaaaatcagagataactatgtttttcttgctaacaacttcaacttgtaactatttatattaatattttttaaagttcttaccatatatatattaatccaatcaatcttttttttctcaaaaatcaattagtgtgtggtcaaagaaataatcaattaatatagaaattcattaaattgttggtaaaaagtcaaaaaaagttttttcaaaattatctaattaagactataaaatattatatttcagttagtttctaagttttacataaatttatattggtcataatagatatgacaacttattttatttggatttatctatctaatttattatcaactactagttgattgacattttaggaattcattgtcatatatcatagtactatgtatttttgatactttcagatatgaaataatacattattttttacaaatttaaacaaacattatatttctcccttttacctatttagtattgtaagaattatgaatatatagatgtgtatacataaaataatataattatgtatgtgaaacatacataaagatatcaaagttttaacagattacagattattagtcaaattacagattataaatccgtaatttgttgcctataagactaattaaaagcatggtttcaatttcactccttcatcatggaaattgtttcaatttcctgtatttacgtataatggttgtaatggattgtttatgtatcttgtaaacactttttgatataaatatatttgaaaaagggaaaaaaagatatcatagtttatattggttcatgatcaagaaagatggagattgcaaaacaacgaaatggtgattactagattattatattattttacaatagattcgaaacaacaacgactcaaaccttaataattcaaaataaatagaaaacataaaagagaaacgaagactcaaaataaaactgagacattgacttattttataagaaaaggaaaaaacagataatattgttaagattcaaggaccatccttctccagatgacaaggatgcataatcacagagttgcggtatctgatcttcttgttatcatggttcacattcatgtcagatcctctgctacttccactagtgctatcgttattataattcatgttcatagtgttgttgaagctctggttccacttgaattgatccactggattcatgtgataaccgtagccaccaacttgttggttgaccaaaagattatcggacccaacatcgtaatagtcttgctcaaatgatccatcatggaaagctaagcgatgatttggtcgaacagttcgagttggatgcaaatttgttaccataccaccatgaatatcatacaaagaaccaaaaaggttcccaacagcaccaacagaagatgaagatgaagcaccaaaagatccaacaagatgaacgttttcttgaacattagagaaaggttgattgttacctcgttgggtctcaacagaaaccatccgagcaaccgaaggttgatttacccttgcccgtttggcacgactacttccaccaattggtatgtttcttaaagccccaccatgagtccagtatctacgacagttcttgcagaagtatcgtggctgaaactcacagtagttgttgtaataacaaaatttagtattatcagaatcacaccttgcacacactcgaggtggtggtggtgggggcttcacatcattcacttgattgtcttcatttgcgaaaacattcaagttatccatttctctcaaaaagtttttgattttctcttattaagaaaagacttgagttataagatcttgttgtggagagtgtcttcttatataggtttttgtttagtgaaaatctaagaagagtatgttttgggtttaagaaagtgagattatgagcaaaacgtgtcaaagattgtttattgatcaaatctacacaccagaaacctttggctaagtttagtcaaaaactaaagttttttattcttaactcttgtttgtctataaaaaaatggtgaatcaaaatataatttaatgaattagtcatataaacaaaataaaatctaaagatattgatagtgtaatgataattgaatatcaaaatagcataaattgcatacatttactataacagataggttttatgtgacgcgtgtactcacactctatttcatggtgcgttttataaatacatattataagatttgcttatatatagaatagatacaggggttggaatagaaaaaatttagtagttaacaattcataatatcaagataatatataggaaatctaaccatagtacatatgttttaaattgaaaataacctatttttagaaatcgacaaaagacctaattaattaatctttataaagatttagtttaatagtgatttgttgaggaaataaaatatattgtgtgtcgagcgcgttattttcactcgtgttattattggtgcatcagaaagatttgtcaaaaaactttcttttataaaatttcaatactttaaattggatactactcgtgagaatagaggaggtttaaattaagaatattgtctattaaattatatagataaatagacaatgctagcaaatgtctttgcaccacttgtagctactttagacaaagaatacaaaaacagtttttaattcatttgatctcatggaccggctttagaggtaactcaacggcccgacaatggcccaactaactcaacggataagatcacatgtcttttgggccttttctacttgttaacgtcagcaatatagcagaggtaagcggctactgaagttgaacgaaaacactgactaaagcgatttcaaatttctgatcagaaccaagtcaggcaaatcttttaactatctagaatacaacatggttttatagctttttcatgaaatatatattaaactcaagacacaataaaacaatgctgcaaaaaaaagctgagttgaaatctcaccgtctgaattacatttgtatgactctccgtaagggtaatttttatgtaatgggttttttttcgaaaaatcatttgctctgagactattaagtgactagtgaggttttggaacaaacccatcaaccgcaaaatttctagtagctgaaggaatggctaggcgtactccatctagctctggttttgcgatgacttgacatcccaatcgcgacctatataaattttcaaaggaacatgttaatatttttcaatgacacccgaccaaaaccatttaaagcgtagaatagagaactcacgttgctgttaacccgaaagcgagatctagcatatcattctcttcatctgttggttcttcgagtttgttgtagtatttggtgtcctattacgattacagtttcaactatttggtaaaactcagttcatgatattctatgcagatgagtgtttgtaagggcaagtgagttttaccataacaatcacatggcaggttgaacacgctagagaaccttcacatgcccctgaagagtaataaagaagaaacaacgcataaatttccaatgaaaagatcaatctgagatattagttactatcttgcattatgcgaaaaagcatcattggacaaagaggaataaatggaggaaaaatcgtaccttcgagttctatatcattttcatgagcagcttcaaggatgttcattcctactggaaccttgatatgaatttcctctccatctttatcaacaaaggtaacgtttatcctgaaaaaaatacgaaatacatgtatcttacattcaggcgagagtgctgttgtctcatttttcgttgttgtcaagagttgaatgttttctgagataaatttgaacctacttttctgttttttcgccacctttctcagaggtagtgctgaaagatgtacaaaacttatgattattcgagaataatgcttccttaaaactcctagtttgcctttgcagcattggctgtcgagatgaaagagcaaagatattaaactaaaatcaaatatgtaagagaacagcgcaagtcaccaaaaacccaagcttcatagctaagtcacttctaagcaacagactcaggcatttgctagcaccttgagccaaagcaaaaccctttaattctctctattggttgctgaacatatcttatcattaagcatcacatatctataactggctaaaccatttcatgatacggacaaagatggtgtatatcttacaagctcctcagattcctaacaaaaccaaactcagtatcaacaagcttttagccttttacctaatctacaattcagtcggagccgaccaattaagaattaacaactcatatcttaacgcttgatcgtaaatggaaagtgccatgtctagtgagtgaacttaataagattcatatgaaaatgcaacctagaaataaaaccaatgcaataaattttcataactgggattcagagagctcagactaaccgaagattgaagatactggccataagacctttgaagaatcctctttccacacattgacaaatgtctctctgcccaaaagttaaatcacgcaaacagtacatgagctctttactaaaagcagagaacaaattcaaccaaaaagttgtaaacagattgagatagtttatacctcttgggagctctttaacaatgcgagaacctaatcttgatagcctatggaagaccatgtttttggcgccgtccaaaggtataagctttaaacctcgaagcaattcaaaattaaacctaaaatgagtgcaaacaaaataagccaagaatctaaacatctggaaacagaaacattttctccaggtgatataacgaagaatcgacgaatcaaaaatgaacacagagaagagaaaggttattactttttgaaaggttcgacaaaagcagaggtttttggggagctcgaagatggaggaaaatgagtaaaagaggatttagggttcgtacgtggcgaagaaagaccaaacctactccgtcgcaaagtctcagctgattactttctctcttccaccagaagaattctaaacccttctggtttattcttcgacgttccgacaaatttctcaaaaccgtaccgaaccggatcagaccaatttaaaccgattctcgtggcacttgtgttttgctaagagaactacttttttttcatgttacaaaactttagaatcttcacacaatgaaactcttattaatataatcctcaaaatcgcattgttatacaaattgtctatcaaatcaagaaaagaaaaaagacaactcctcaaaaccaaaaagattgtcgagaaagtaacaaacgaaaggggaagaggagagcttggatttgcttcagtgaagcctagtgagttcttcaactctcttgcacaactcttccacttgaacatccatacctttggagatctcctccatcttacctctgctcaaatccaagaacgattcaataaggtctccatccaagtaaccctttgcttccgcagttcttttctcgttgttgaacgatctccactgctcgtggcttagaccaccaactcctttaatcactttcctcagactcgtctgcagtttctctagaaacgcatactgttcttgaggcagagacgctatcactccaatcatcccactgacagtgccaaatatgactgtcggtatctgaccaatatctgaatcaggcagcttcatgacaagagagccatggcggaatcggttcacaaattcccctatgtgatactcaccaaccacctccatacgagcacgttcttcatctgtagcaccttcgttgttcttctttacggtgaatatgttgaagcaattatcagtaccgaggtagatgtcatcattgagtatctcaactgccgtcatccagtttgcattatagtcccgagctctctcctcgatcgcaccttcctcgtgctttaaaacaaacacagataatcaaaagagtccggtgagttcttgtgaacataacaatctaagatttggcatgtattcatataaagacggaaaaacaatttcgtatccaaaacgttttaccttgtagatcaataaagagattgatttcatgagatcaccaacagcgatgaagtctccacgggtctgcacgtagagagctagtatgtgaccgtgatgtccacattcagattgcagctcgcgagtgccatcatcccgcagcatccacttatacaactgaatcttttgattaatagaagcaagaagtttgccattgaaggcattgagagaataaacagctcccttggtttccttctctgtgataagctgcaatcttccttcttcaactataaacacaagtatccttccctacatccacgaaacaatataaaaatgaaaagataaattttcacacaaacaaaataaacagtagtgagtctcactgaaatgataccttagttggttcattttcctcgggcaaaacatatgctgtaccaacacaataatagacatttttgtcgtctgtaaacgagcagctcaatatggagcaaccacattcaaaggcatccaaagggtaacttgacaagaactcgaaactttgggcatccagcagacggacaaaatgcgattcagattcttctgcacttggttcgtttctcaaacaggagatagcaaatgttcgtgtttgttcctgatgacatatccgacgagcatgctctccaatgggaatggtgcgtatgtgaagcttctgaatgtcatcgatggtaccaattgtaagttcgccctcccttgcaattgctagactgccaatggaagagaagtagagccagatttcaccacaatgtactttgatcccaaaggaaaataacagaggaaaaatatagtttacctgtctggaaaagcagcagagttgaagggacacatatgactaacttctttcagattcacgttgctgtataatagcttcttgttgttgctatatataacagctggtctatctgatgcagcgaagacatgcgttgcacttttagatgaaaaagtacgcagagttataggtcgagtccccagtgatacttttttccgatctcttaatttcccgcaacttgtatccaactggaagtttaagagatgaccgtctccaagagcacagagcaagtaagatatctgtgacaaatgcaatacactgttattaatatggcaaccaaaggttacattaacaagcaagatggccattccacaaaaatttaaagaaaatcataccccttcaaatgcacaaagaagaacagatcggggaatgatctctcctcctagttcctccttagtaataagagtcaagtctggtagcacaaaaatcctcacacttatatcagtccacatcccgacggcagctagctgactgtaattaggattatcaccaatggggtttatgtcaagacaagaaacctcgtactccaacaggacatgtttcacttccgtcaatgtcccatccccaatttctagatagaccaaatgcccacctccagtggccaaaagaacctaacaagtatatcattccaaatcacattgcatgtctagaaacgagaaagatactgaagttacaagtttgagacagaaacaaaatactatcataaaaacttcctagaactcttctttctgggccaaattttaaatatagtagctcgaaaaaaaagagaaagacaaacctggctcgcatttgcagttgcaacattaacagagaatccagctggggcatcccatttattccgcaactctctagttgtagaactaactaatctaacagaatttgaggtaacctgattaaggaaagatagtagttagtgcattctaggggaaaagataggatagaacaatatagtagacaggaaactatgtctgaagaaaaacaacaccgatgaaatacaaaatggaatcaaactacaagcaaatggagttcgacaaaaaatactttgttatctggaatatactttattatctataaaatggagttcgacaaaaaatttccctgtctggtgaaattaaactacaagcaaaggcatagaaactaatgaagaacactggcaaatcatacctgtacaagttggttgtagacagcatcatggcaaaataaagtctgaacttcagacaaaaaaccctcaatctctgtttcttccagttcatcctctatattcatggctagtatacgagtttcactgataaaactaactacaaggaatgtatcaaaggcttcatcaattgacgatttcaacgaccacattcctttgatgccttgaagttccacggacgcctgcaatatacagcagagttttattagattacatcagatgagaatattgcttacatgacactgagacaaattgacaatcctaatatacaccaaacctgttcatttattcctatcccattgcgaactatgcgaagagaaccatccttgtatgctccagagcaagttacaacctgaccttgcccctgtctctcaaggtcaactacacaaaaatcgacaataggccccaagttgacatacttttctaaaatttctacatatgacccttttgcatccggttgcaggtttagcttaataagctgcaataagaaagtaaaaaatgaaaacgtttggatgcttcaaagcttgtatttattagaactcgaagaaaaataacaattgaaacacatataactaggatagtggtaaccatagaactatataagtttacattcttcaagaaaaatatctttcaaacacgtaatgagaaacttattcaatcctagcgtacctgtgaatctccatagcttgaaccgacaaagacgacagcattgtccagatacgagatggaagatgcaatagaggtttcacccaaaagctcaattttgaggccagtgacccttcagataaataaagtcagaatatccacattatcattcatttcaaaagagctctgtagatgcaaaaaaaaaaaaaaaaaagagctttgtaatatcaactcacttttctttctcatgggttataacaagcaggtgaatcagtccggcatggtcaccaagaagatacctagaaccatcaagatcaactcttccatatgcttttgtgatggactggacatacaaattgaagtcacatgccaaaattgaaaattaaaaggggtactcactgaacggttatcaaatgttataggaccatatgacataacgtaaaaacaaacttacaggtcttattggtattgctttgaatgcattggcactacaatagacaattgtttcttccccaatgatgaggacgccacatagaggtgaaggtacagggatcaataagtcagcaccattgtcgagattgttctgtgaccatggaccttcgacaaagttcttatcctttagagaaacttcatatgttttgacatgacgagcatctttgttgtcctgtaaacccaagcattaattagttcacccagcaaacatccttgagcacattgcattagcaaagtaaaccaagatacaatttatttaaaaaatacagcagagctaatttgctcaattgctgccagcttaccaacagagcgggtattaagaaagaaaacagattcctttgaacaatattgcttacagaactaggttcgtaaatgaaagaaataaatatatatgattatctgttttccatagcatatccatttaaatatgtatgctaacctgataaagtactgcaattgttggtttcgtgcatccatacagaaacttgatatctaggacctgcaactcctccagcctgaaatgaagcaacatagtcaaaattagattcagtgtgtgttgattgagtcaattgagggtttaggacagaagctgatgcatggaaacatgggtgcactagagtacagacgatgtggacgattaaccaggcaaaacataagctagatagtctccacattgcagcattttaactgaaaacagtaccttatgttaaaggcttccttgagctgtcctttattgtcaaatggaatgacctaaccgaggaacccaagaaatagaatcatataattgatcaatggaagttcagtaatatgatatggacagcaaactagcatactataccttaaacaagccgtcatacagatgcagaccaattactctgcaatcaggatcaattataccaatctgcaaaatcagtgtccattgagaagtcagctcaaacatgccacataaccgttacaatatagcacatatacaactgaagaaggaaaatcaaatctagccactatgaaaaatacagtgcagtactactgaactcaatacctgaccattgtctgtcggtcggcctatacgatcagaaacatcccccattgccctacaaaatgttcaaacgatatttacaattagcggaatagcggtaaaggaaatgacagccatatgtatattgacaaatttaagttacagtgagcaacaactatgttagcaccagagaagtcttttgcaggatttagatatacaacaaagtacagatacataatgaacccaaagtaactgggatcctagaacacaagctgaacagataagacacgtgatcgacttttatctaaatgacacaacctgatcccatgcactactatgcacatagttagaaacagtgatccctttcaaactctaaattcgaataactaacattacaagagtattataaaagacatataacacatccagttgctttacttcatctgattgcattaaaagttgatatcttctggctaactataccttgtaataagctcagaggactcataatcccattgaagaacacagaatttatatctttcagttgcaacaaacaaaaagtcttgtgcttcaccctgcaaaagatgaagtgctatcaattaacattgttacttacgtattacctcagacagagaaaagtattcaataagaaaactatactcacatggggacggaacaattccatagttgcgattctcccatatagaggaacatccagtatagtctgcaaaagtctaaatcactcaacaaatccaatccatctggggagctctattttccggaacaagactagtaacaataacttttcacatttccactctaaaaatccaaggaactggaaatgaccttatcattaacagcaataaggatcattagaataagagattataaagtacctgaagtccctgtggagaaagcagatggatctcgattcgagtggatttcctgaaaagggtttgacattgttgtcaactaacagcaaatgaaccagctccagaagaagatactagatggtaaacagaaaacgagaaacaacaaaactgtatgcaaataaacttaaaattcccctgaatgaaggaactttatatcttcaaaagcattagcgtgccttctttaacatgaaatcaaatccagagcagtcactgatagatcgactggtgaatcgattgtgtacaattcccacataaacaaccatcaaccagatcagagaatcccagagagatcatacaaacccaatactcagctctcaaagcagatgcaatgagagtagaactattataaaccaatccgtgataaaactagctttcctaagaaccctaaaccccaaattaacatctacacacaataggtagacaacaaaggaaagaaaaaaaaaaggatagagcgaagttacatacgcaacaatgagattgagttcttgaggacttgtgaagttcccgacgcaagagtgagtgacacaggtcggtttctgagccgtaacggcgtagttccatacgctcatcttcttcttcgcccagaaaaaaactaggggttttgctttctattgcaacacacgtgagaaatttcccgcctcttttataccaagcttctgggttctctttgagatttaaacgggaaaaaaataagagaaagagacggagacgatgcaaagggagagaggaggcgaagaagaacgcaacaggttaagaagaacggccggttcagaacacaaaattgaaattttaaagacggtacgttccggtttggtatataactggaattaataggtttaccctggatctaattcggcccggcccaattgataacattcgataaacccaaccctaagaagactagttcatcgccttttgtattttgttgttcttcgtcatcgacctacgctgcgattatctctccctctcaaaattccttatctcgtcgattaatttctctcaggtaagcttctgagatttttcctcgtagatcgattttgatttcgcatcaatcgggttctttcgttggtaatcgttaattttgtccattttttaaaaggtttgtgtcaatctcaaatttcagagaatgataaacctaatttgtttccgttagattgttgaaatttgacctaatttaatcgggatttcaccgtaaagttttttaattgcgttgatttgatctctgcgatgtagaaatcctaattggatattttgcagtcactcagatccagccctgattatgtggctttatcattgcccttttgatgaacgacagaaaacaagaataatttgaatgtaatcgctgtcaatttagtgtcttgatttgaatactacgtatactttatcaaatggtttgttttatcagtatgttattgtttataaaatgtgttgttatctcatatattggtcaaatggtttgtctaatcagtatgttcttctatataaatgacttgaacgataatggttattgtgtggctatggaattgcagatcatgttgactgaaactccatttaggccacgagagaagcttctggagaaacagagattgttccagagcatccaaaggcacacttacttgaaaggaccaatggacaagatcacttctgttgctattcctattgccttggctgcaagttctctctacatgattgtaagttcatttccttgctgatttttcaaaaccatgtattcgttctcgccatcctgttttgtctttgtgtctgttcttccttattttactaatggtttgttcatttccttgctgattgtgtctgttcacaatggtttgaagttgaatgtcaccctttagaacttgttacttacatcaatattgcttcagctttctttaactttgttcatcatctaactatggaagaaacgtttggctaaatacagggaacaggaatctacaacatgtcgaatggaatcggcaaaaaggaataagcagcttcttgatttttccttcttttttatatgcttttggtttctcaatgtatcagtcactgcccatatgcagtagcagactaaggttgcactggtctttttcttgaagctgtttattccgtcttgccaaataattgcttagttgcagacaatgtcgaaagctaaagatgtttgatgttataaagttccaatattttggggattttctatttgcatttatgccaagttgaatcctataggttttgttacttccacgttctactaaactttgtagtttgtaagcatccgtcttctattcaaaatggaaatacaaaatcactacaggattcctgaaaattgtgctaaacttcgtcatcagaaaaacttttatgtaatttttttaaaatgtcttatccaatttaaagataacagtaaaagaatatttttattcgtaagagcggcccaagataaaccactcgttataccgatttccgaacacaaccctaaagaggcttcttcgacgacgttggttcttcttcctttgtcctgcgccgcgatctctccttctccaacttccctcgtcctgtccaaaggtaagcttcttcaatttctgtctcataccaatcttgcttcggcaccctccttttgtttcggttcttaaccctaaattttccccttctatcccaaaacacagagattgataaaccctaattgttcaccttctattactgaaactttatctagactgttctggatttatgtttggatcaaccctctgcgttgtattggatgtagccttgacgcagaaaccctaattttccggaagcgtccttgcttgttgtttcaattgcttaattgagaatctctttggaactatgaaagtcttagaatctctcgttttggtgaaagtatcccattttgcttaatttgttcctttgtttaacgttgtgaatttgcgttgtgtagaaaatgccaaaggttaaaactaaccgagtcaagtacccagaaggatgggagttgatcgagcctactcttcgagagcttgatgccaagatgagagaaggttagtttcatataaagattttgttatatctcaataacatatgcttttgcttgtttctttttcccgtgattttgctctaactatcgtgttccttgtgcagctgagactgattcacatgatggtaagagaaagtgtgaaactttatggccaatcttcaaagtttctcatcagaggagtcggtatgtatatgacctttattaccgaagggaagaaatatctaaagagctctatgaattctgcttggaccagggctatgcagatcgcagtctgattgccaaatggaaaaaggtatgtttttatatcattcttgaattaacttctgtttgtatgcctttttagttagttgtctaaggccaaattgaagcgatttggagtttctattatgtaaaatattgttgtattagtttagagagtctagtatcgccttactgcacaatgagtcttgaagctgtttctctgaaatatatgtccttagcatatgcacttacttggaatgatctcactaacgaataggttctagaattggtattgttgctttgtttggtgaagaaataagatttctggtaattatacttcgaacaaagtgcattgcctccacgatttgccaaattttggatagttctaacttctaaccatactcccacatcttaatgatggtcactcatgaatcgtttattaacaaactcctccctgtcaattctgttgcatcttctctttgtaggttatactatccagacatatacctagatttcacttttgttttctttcattgaactaagattttgtcatttatacgtgtctctatactttgtgttaagtaactctaaaaactctctgttttgtgttttgcagtcgggatacgaacgtttatgctgcttgcgctgcatacagccaagagaccacaactatggaacaacatgtgtatgccgtgttcccaaacacttgcgtgaagagaaagtggtcgaatgcgttcactgcggctgtcaaggatgcgcgagtggcgattaaattcaacatagctttattcgctatctctgactgtttgttacaatcttgtcacttgttaaatctggattatgtattattccataaaggctaaaaaccctgactaaaaatctccttgctcttacttatcaactctgggtggtattgcaaataaaaagaacgttccggtttggtatatagttgaaacttgaaagtagaaagacgtttcccggtttggtatcttactgaattaaaagagtgttttactattcccaaaagtgtcaatttctctaaattcgtgagatttgcagcaagtttatcatgacgccgtgagttatgttttggtcaaccggtgatagaacaagatattattgaagcagaaataattattaattcttgtatttatctagacgaaacttgattgcttgatccaaggaaattgttttgacttcaaaattgtattggttctcactacagttgacctgcccctatgtttccatgtggaacaagattcttcgtcttggtcatatggattagtattatttatttctaatcttatcgtgtaatgcatgtatgatgtatgttctaaacaagatgtccaccaaggtccaaaacgagaagagatgcccattacgctcgctctagatgctttgtgaaactcgatggactttcttctctttaaactcacataacatacatacatgatccaaaatccatgatcgttctttttttttttgggttcatttttcatggtttattggaagcacaaaagaaaccaaaaataggatcacagttcttggacatcgtttaatacaaaactagaggaagtaaacattaaaaaaaaaacttgaaaaattaggggaggctaaatcattttcttgacgcgcttgtaataggaggagcaattgtggtaagtggttggtgtgaattagaacccaattatcaactaagtcgagttttgtttaaaaccaataaatttcatatacaagtttgaaactgaacatataactttttctttatatatcataattttgagtataacggatataacattttacttaaatgagaaagtactattgaattatccagaagacgtgatccgatggaaaaattcgtatcacacatgatcttttctttttatggcacaccagattttgtttacatttataattcgatttcatctttttcttagaaaaaatggtcaaagaatgcagctggtgaccaactagtgaccatacaacaagaacaaaatctcatggactctatttaaggtttccataatttaatttaccgtatcacatttccagctaattacacaaaaccgtcgataaataattgtttatagaaagaaataaatacaagaaaaacgtcaaaggatagctactataagtaaggcagactttaggaacccaaaattctgttattaatttacaaaaactaaagagtttttcacttttcagtttctcttcttaccattcactctaaaaaaacagagtctttataaaaccgatctcagattctgaatctgaatcagaatctggatcaacataattttctaacaaaaaaaatggcttcgggtggtggtgacgatgggcttcgtcggcgaggctgttcatgcacaaaagacgatttcttaccggaagaatcgttccaaagcatggggaattacctaaaagcccttaaagaaacaccgagtcggttcatggatcgtattatgactcggtcactagactccgacgagattaacgagatgaaggctcgtagtggtcacgagatgaagaagacgttgacgtggtgggatctcatgtggtttggtatcggtgcagtcatcggctctgggatattcgttctcactggactcgaagcacgtaatcattccggtccagccgtcgtgttgtcttacgttgtctctggtgtctccgccatgctctccgtcttttgttacaccgagttcgccgttgagattcccgtcgcaggtaacaaaattatcatttcctctgtttctcatttatatttatattttcgttttttttttggtatgttatatttatattttcttgttagagaatttctaatttgaaaaagttgaaaaatattaaaatttacaagtttaaaatttcatttttacatctttgaactaaagacgcatcttaacagatcctatttttttgtaacgtcggtcataaatatgcgaatttcaagaaaatgttcagactatattttttaggattagtgtcataagtaggaagatagggaaaatacgtttaagcaggctaagagtctcttagctggttaaatttagttttaattacgatttacatgtttaaacgaaacgcatatttgaggatatcttttctagcgatattctaactatagtgtcatcataattagggaatagaaaaatgtagcgtacatttatcaagatctaataaatatgcagacgtatcatttctgacaacttcgtcaataagaaaatattctacttgattcaatcatttatgctggtgcatttttccggcaacttaatccttctttttttggttcggtgtcgattaagtttttgtcccatgttttgggagtcactagtggttatgagtcctttttttatatatcagttgcataattcacctcaatacaacgaccaataaaatattctgttgatgtacaaagagtcaaccatacgatatgcttttagtaatacttctaaactcaacattaattaaaaatgtagttattgtcttacttgtaaattatttaggttaaaaccaaaaaaaaaaaaactatttaggtttaaaatgtgtaaatgaataagatcagcttctttattacaaaaattactatagaacaaatattgaattttcaactctcgtagcgtgacggaatctctggggtcaactagttgacatctgacttatgagggtcgttcacactatctagtatcaatctactatttatcctccgtttttttccttttaaatttgatagtagctacaatactatcaaatcacaaattaaacaatcgaatgatttgattattatcttagagttgcaaaatatttgttgccatttattagattgttagctacttttaaaattgtatttaaaactttgtaatttcacaattttagtcatggggtctacctagaagacttttacatacagacaaagaaattaagctaaacagatgattacttacgtcaatgaccttatatacgtaagtcccaactatataagtcaagcttgtaaattgcctttattgacagttcaaaagtaaattaatttaatatagtattactactcaaaaatatatttttcattttcgaaataacttgtagtgaaatcccactagagattatgtttgggtcctagaaagtagaaagtggagtcattttcaaaattattttttacttccaagttgtttcgaactcaaattgaatattatcgtaaatagaaactcaaacgcatacattacttcgcccacaattatttgtaaaaacattatgtaatttctttcatatttactatttaatttacataaccattgagtcaatgtttaggcggttcttttgcctacttaagagtggagctcggcgacttcatggccttcatcgccgcgggaaacataatcctcgaatacgttgtcggtggagctgccgtggctcgatcgtggacctcttacttcgccactctcttaaaccataaacctgaagacttccgcatcatagttcacaaactcggcgaagactatagccacttagatccaatagccgtcggcgtttgcgccatcatttgtgttttagctgtcgttggcacaaaaggctcctcaagattcaattacattgcttctataatccacatggtcgtgattctctttgttatcatcgccggatttactaaagccgatgtgaaaaactacagcgatttcactccttacggcgttagaggagtgtttaaatccgccgcggttcttttctttgcctatattggatttgatgcggtttcaacgatggctgaggagacaaagaatccagggagagatattcctattggtcttgttggatcgatggtggttactacggtttgttattgtctcatggcggttacgttgtgtcttatgcagccgtatcaacagattgatccggacgcgccattctcggttgcgttttctgccgttggatgggattgggctaagtacattgtcgcctttggggctcttaaaggtatgccaaagattttggccttcattatttatttgcgtttgcgtttacatttagtatagtctaaaatctatactaatctttgaaatgtttaggtatgacgacggttttgttagttggggccattggtcaagctaggtacatgacacacatagcccgagcccatatgatgcctccatggctagctcaagtcaacgcaaagaccggaacaccaattaacgcgaccgtggtaatgcttgccgcgacagctctcatagcattcttcacaaaactgaaaattttagccgatctcttgtctgtttccacacttttcatcttcatgttcgttgctgtggctcttctcgttagaagatattacgtcaccggagaaacatcgacccgtgaccgtaacaagtttttagtgttcttaggtttgattcttgcgtcctctaccgcgactgctgtttattgggctttggaagaagaaggttggattgggtattgcattacggttcctatatggtttctgtctacggttgccatgaagtttcttgtaccgcaagctagggctccgaaaatttggggtgttcctttggttccgtggttgccttctgcttccatcgctattaatatcttccttcttggttccatcgatacaaaatcgttcgttaggtttgcaatctggacaggtattctgctcatatattacgtcttgtttgggttgcacgcaacgtatgatacagctaaggcgacgttgaaggagaagcaggcattgcagaaagctgaggaaggtggtgttgttgctgataattcttgttctgcaacttaagctcactagttggttttaatatattgttaaagtgtttggctttggattcgggtttattaatagttgtcagattcttcgtttggttaattagtgttctgatctcaagaattgtaatgtctttggtttgtttagattttcaatatgttaatagattttcttcacatttgcatcaaacatgataattaaggtctggtttaatccttctcaagtaaaatagatgtgtgacaaaagtatgtcgtatttgaaaccaaaaatcaacttattcgagttaccaacgttttaatttatgaattcacaagatacttttttccatttaatttgtttatgagtaagttgattaatttgtgggttaggcccatcatgaagtaaacctattaacctagtattgtttgcggggaaagttagggcaatttgtggatttcttatttaagacagaacaaagaagaaaacaaactctgtatttttttctccatcgccagtaaaccctgcgttctctctcgctcgcttgtgtgtgatagagagggagagaagaatgaaactcgagaagaagaaaggtattggggcgaagagaagagggaaaaagagttccatcgatcatgatcctttcttagaggaagagacagagaagcggagaaaattcaattacgatgatgatgatgatatcgaatctgtagaatctgaagaggaagggaaggttggtgaggaggtggaggatgagtttgctcatgagacggtaggcgagaaacgaaagagactggcggaggatactttgaatagaatcgaagaggcgaaacagagagagcatgaagaagataacgaggaagatgatgattttagagattcgcttgtggcaaagactctaatgcaggaacagctcgagaagagtggtcgtgttcggagagccaatgcattgaggtaatgaagaagaaagttgttatttttcatatttgagtccatgagctaggtttttatatttgaaaccactcctcaggacttgtttaactacgtattcatagacttcaaaaatgcttgtgatttaggttttatggaattttaggaattagtttacattagtttttatataatggcttggagattgtttgtactgatactctgattaaactttaccgtgtcagggttcaagatctacagagtagcgataagtttcgtgttatagtcaaacaccaacattctgttacaggagtagctctatcagatgatgattcaagagggttctcagtttcgaaagacggtactattctgcattgggatgtatcttctggtaaaagtgatgagtacaaatggccaagcgatgaagttttgaagtctcacgggttaaagttccaggaatcttggtatacaagacataacaaacaatctctagcattagctgttagctctgatggccggtatttagcgactggaggagttgattgccatgttcatttgtgggatatccgaacacgagagcatgtccaggtaaacaagcttaaaaataatcaagttaaggattctgttcattgtgtcttgctctcagcctcttttattagatatgtatctattgcaggcttttacaggtcactgtggcattgtttctagtctatgctttagagaaggaactgcagaactcttttctggttcatatgatggaacattaagtatatggaatgcagaacatagaacatatatagaatcatgttttggacaccagtctgaacttctatccattgatgctctagggagggagcgtgttctcagtgttggacgcgatagaacaatgcagttatataaggtaggtattgtggtctgtttgatttgtttgtctatatctaagcacgatttttgtttcctatcaggttcccgagtctactcggttgatctatcgagcttccgaatcaaattttgagtgctgctgttttgttaatagtgatgagtttttgtccggatcagataatggaagtattgcactttggtccattttgaaaaagaaaccagtgtttatcgttaacaatgctcaccacgtgatagctgatcatgattctgttaaccataactgtacaccagcatgttcttgggtcagttcagttgctgtctgtagaggtagcgagcttgctgcatcgggagctggtaatggttgtgtgcgtttatggggtgttgaaagtggatctagtgctatacaacctttatacgagcttccacttgtaagtttgttttcctaggtcggctcttattgctatttgtgtgttgcatctgttactgacatccaatgcttatgacctttttgcagcctgggtttgtgaactctttagcttttgcaaaatctggtcggtttctgatcgctggtgttggacaggtacacattttcctttaaccagacatatatattcgtctctgtgaatgccaatcttaactgtaactttgggtatatggcaggaaccgcggctcggaagatggggttgcttaaaatctgcgcagaacggtgttgcaatacatcccttaaggctttcatgaagggatctcaatttagattgcaacttattttagaacttcagttatgtagaggtactacagctatatttttgacatggaagggaagaaagagaacatatagaggctctaattaaacaaaatcggaaagtcccattcctgctttatgcttaaaagtcttgttttattgatcaaacaacatatacaatctgatctttacgcatagaggaactttgttttagtggtattcaaaagatcctaaagaatactagaattgataaaaatttgtggtttaagaactcagatacacaaacttgattattttaccagagatttggactcaataggtctacaaaaatagctagtgaactaaggaaacatagaagccaagaggtccctagatgaagtctaatgactacgattctctctagactagctacctcagctttcaaactatgatgatccttggagaatcgtggtctttgtagctttaggactcttgccattgcactctactggaccgggtaacaagatgcagaaaatgatatggagagcttgaagaaaatacccagaaactatgcatttgaatgaagaagcacaagcagatgcaggacatcctttcctacataacattctgctgaacttccaacacaaagctcacagaggacaaacctcaactcccatattgattaaacagttgtaatcttggtgcagaactgtagattccaagatagtctgcagttcttatctaggaatatggttttggtaaggataaaaagttataccaagtttgagctgatcatgacccagtggccttcctaaaggttagaatatatgaagagacaaatcctaaatgtatgagtgtacagtgttcatacacataatactgaaaaatgaagatttgaaagaagtatgcaaacaggcaaacacgatcaaggaaagagatacaaaagaggtttaacaagattccatttacatcctagacaacttcacctctcagaaggccgatatgaaacaatataaagtagaaaaagattaaactttcaagcttcaactaatattctatcatatagtagcaactgccagtgaccattttatttcaagtagatcacaaaaataaagacaaatgtctcaaagttatatccattgatcgaaatccaatcaacacaactaataaaacaagagaaaaccaatgacgcaaagacaaattcctctaaccttaacaagatcatctcaacttctctttaccagagctcttcctagccgcagcattcataatcctctccaaatacccttcaataggtggagtaagcgtaccgtacctcgactcaccggaaacggagtcaaatcacgcactaaagccgccttcttcaaattctccggcaatgcctcaaccgcagcgttcctcatcttcatcaaactaatctccgctacacgtctcgctctatgctctctcataagcactctactatactctttcgcaagtctaatcccatcctccactgtaaccttatactttggtaactcatcttccgtaaaaatccctaacgaaatgtaatccaatcctggagtcccaatcctcatcggcgcagtagtaactcccatcgtaaaggatccacctttcttctgaaaatcaatctctttttgcctcgctttactgattagccctagcttctctcgtctcgcttctcgctctctttccttaggtctcaggtaacgaacaggacaaggagcgtttatgcattgatctgagattcttccttttcccttatccacctcatcaccacctctgccaccgccgtttccaccgccttttttgattgtgagtttgttgcgtttcaatgattggcctgtcttcagcttcgattttcctttgggggttccactagcgtaacatttctggagaagattgtaactcactgagtcaattataggttttggtctcgcgaatctgatcattttcagattctgatttcctcagagctctctctgtttgaaatgaaaatggtgattgaagttgatctgcaaggtttagggtttcaaggtacgccgtcgtttcatgaagtgtaatttaagttcaaatcgagggtaaatcggtaatatcaggtagtgtcatcaaactcacactcattttttagccttctctctggttcgtcgtctggttcaaaagctatagatcgatcctaggcttacctcaaacctcagtctccgttgactactgagactcgtcgacctctgatccgcttcttcgactatacggatctacttccgatctgtaagaagcttaaatcttcggttgattttggaatccatccgtcgtagatgtgtaattgtattgatttggatgagtttatctgtttttttgagttttcttatgcagtgatgatggccggaggtaacgtacggtttctggttttgatactcgccgtagcaatttgcggtgctgcttctgttttccagccgatctcagactctcaccgatctgcggctctggatgtcttcgtaccagtcgatggatcatacaaaaggttggtttctctatcttaagtcggcattgctttgatgtaggggttttaaccacatttcaccgattacatattggttgctcgttaatgttcatgaatggtttttgtacggactaatctgatttttattactatcagcttggaggaggcatatgaagcattaaagactttggagattcttggaattgataaaaagtctgatcttagctcaaagacttgtgagaatgtggttaaagttcttcagtcgtcttcttctactcttaaggatgcattttatgcgttaaacgttaatgggattctaaaatgtaaaattggtgaagctggtcctaaggtaaacaattgtctcctctcagtatcataattttaactattaagcggctaaaataaccttatcttttcctcttttgaaggacattgtttctcaacttcaagctggtgttaaagatgcgaagctattgcttgatttctattattctgtcagaggcttggtgctggctaaggtaaatacgagttaaaacttttggtggacatcttgagtgagattgactacaccctttttccatagagtatttctaggagagttttcttagtttttcgtgcattatgttgaagtatgaaaatgttttggcagaaggtacctgtgatcgtgattattttattttattcaactccatagctttggcttcctgacttttctttttcctggcttcaagtttgacctcactgttccatgaatgcaggagcaatttcctggaactcatataagtcttggagatgccgaagccattttccgttccatcaaggtttgaacttgtttagctgaccttcaattttgttgttgttgaactatcagatgtgacattcatacactgtctttttggactatcaattatagactctggtagaagtatatatatattttcgatatgttaccaaaactcagttactatattaatactacttagattgttttccgggtattatttggctgatatagtgcatttgtatcagtctcttagccagagtgatggaagatggcgctacagctccaacaatcccgaatcaagcacttttgctgctggttagtagtacatattggattaacccttacctaacgttaatgatgagccttttagattatgtatcccttcctttcttgcttcagcttgttcacttcttttgctctttgttatttcactcattcttctcaacatgcgattttttttctcaggcttagcctatgaaacgcttgctggagtgatttcattagcaccttcagagtttgatccatctttggtaagtgagatgtttaatccactatacttctgatttcctgagaatatattttgatgagatatcactacgatatgttggtttagtgatgatctacttttgcttctggaatctctaagtaactaaaataaagagttttgttttgataattataaattccaaatcttagctacagggaattgtgatttgataatcacaaagaaagattcgtgttttgataattatgcatgtccacctgacttctcatttggttattctggtggtttctttttcattttatctggtagtttattaatcttggttatgtaatgatcgtcattcatgtttgtcctctgttagatccagtcggtgaagacgggtatcctgaagctttctgacagtatccaaaaatatggtatgcagtaaattacttgctatcctatgtattgcatgttatattctcttcactcacttcatagtttttgccagcttgggttttgcatatgtgggctttgaattattatttttggtcttttagatgatgggacattttattttgatgagaagtctgttgatgcaagtcaaggcccgatctcaacaactgcatcagttattagagggctcacgtcatttgcagcttcagaatccacaggattgaacgtatgtaatacccatgttttcatgtatcctattctgacaaatgtgttgatagttgaccttcgcattcccattatctcatgcagcttccaggtgataagatagttggtctggccaaattctttctgggtgttggaattcctggtgatgccaaggacttcttcaaccaaatagatgcactagcttgtttggaagacaacaagtaatactactttcatgcccctttgtgcattttctttgtgcattttcttattagtttatttcagtacacatcttagaatcatttcagtaaccttgaattgagtggtgtgaaagacataagagttacaaggacttactgttacttccattcttttgtgttaaagtaaagttgcttatgaaagagaaaaactgtttctctttacattgttagaattttgaacaaaatgattaccgaagaaatgatatctgtagggaaagagtagaagtttaaaactttgaacacttgtgaaatttcaaccacttgctcatttattatggtctagctgaaactttatcattctatgggaacaataatttgctctatggtcattctctatcatttcaggttttctgttccactcatcttgtctcttccatccactgtcatttcattgacaaagaaagagcctctgaaggtacccattcataagcttgcatcaagatttgacttctagtagtgaaagtcttaactttggactttctggctataacggttggatgttggattctagctggtatttggtttagagattgctcaggctcatagcattgcatcttttttgtagagatctcttatctatttgataatgactcattttagttgacccttcatccattacattttttcttattttagattttttttctctttatctggaactaggttaaagttagcactgtactgggttcgaaggcaccagctcttagtgtgaagcttacacaagctctaagttctaagtcagtggattcatctgtaattaataaccaggtaaataatgtatctcttactgtttgagcttgcaatagaaatgttccttattctctgcattaggccggtttacatttttccattacatttttggggtacaggagcttaagtttgacgctgacagtgcaacgtacttcctggactcctttcccaagaactttgacattggaaaatatacttttgtatttaaggtattgcacttctttggttttactacacccaagacttcatataaatgtatgatgacaacatgataagcttcgttttctgcagattgtgctggatgaatcagcacatgagaaagtatacataactgaagctcaaacaaaagtgcctatagctgccacaggagctattagcattgaaaatgcagaaattgctgtacttgacagtgacattggaagcgttgaatctcagaaaaagtatgtcacctgtattgttgatgaacaacttccttttttgcttattttgattgattgctaattgcttaaccatttttcttaggaaacttgtaccattattgcttacaatatatatttcaaactttttgttgttgtgcttagtgtcttctttttgtttattggttctctctgtaacatttgtaggctagatttaactaaagatggagcggtatcattatcagcaaaccaccttcaaaagctacgcctgtcattccagttaactactccacttggcaatgcgtttaagccacaccaggtttgttcattcttgatttttcgcttcatcaatggttatattctgttctattcactttcttgacttgcttacttccatgcaggcatttttcaagctgaaacatgagtcacaggtcgagcatatctttctcgtgaaaacttctggaaagaagtctgaattagttctagttaagttccttcaacttcatttaaaattgcttttgcaaaaaaagtttaatgatcaagtttggtgaaattaatgacgtcctaaatacaatattaatggttaatgttattttcttaccttcaggattttcttggattggttgagaagctctactacctctctggtaaatatgagatacagctaaccattggagatgcttctatggtaagtactttactttcaggtccaatgcagttgatgatttatgtcttctgagatttgaacagtgttattttcctttctcttttcccaggagaactctttactgagtaatattggtcacattgaactagacctaccagagcgtccagagaaggcgactcgtcctcctctacagtctactgagccttactcaagatatgggccaaaagctgaaatatcacacatattcaggattcctgaaaagcttccagcaaagcagctctcactagttttcttgggtgttatcgttctcccattcatcggtttcctgattggggtcagtctccctttgcttgtaaatagtatccgaaaaacatcatcacatttctttcactactcatatatattttttatgtttcagcttacgcggttgggagtgaacataaagagcttcccatcgtcgactggatctgcaatatccgctttacttttccactgcggaattggagctgttttgcttctatatgtgctattctggttgaaggcaagttttcataaccgattattgtttgtttgatctacagttgaatcattgcatcaaatcacaatttctttgttttgtttgtttgcattctacagttgaatcattgcatcaaatcacaatttctttgttttgtttgtttgcattctacagttggatctattcacgactctcaaggcactttctttgttgggagtgtttctgttgttcgtgggacacagaacactatctcaacttgcatcagcatcaaacaagttgaaatctgcttgaagaagaagaactcactatgaaggatctttttttggtttatgcgtattttcagttttgtagtattgcttatagattatggtgatagacaaattcaaaagaagttcagagtttacatactctctcagtttagtcttaaaaagtaatcaagagtctctttccttagcttttttgttgaaccaaatcaactaagataatgattagctcatgattagatcacatgagtttcttaattattcacactttatgagtgtttgtggaaagttaaaaggtctaacaaaattttgaaataggctggccataaaatcgaaatgaaattttatatataaaatcaaaccgaatttcattctagtcaaaatagaaataaatgctgataaaaatgtagaaattactttgggtagaaacgagtcaacgaaggaaatgtatttggtatttgacccttaacatggcaatggcaacgttacaacttttttttttttttttttttcttgcatcgttacaacttcacaaaactttacagttgattggaaaattaaattttagaagaaaaagcacgtagttgtcttttcagacaattatttgttcatcttgaatttgtgtcccaagaacatatctctctctctctctctcctcaccttggtaagaacgtccaatccaatctataaatctccttgatggaatttccgtacatattacttgttcctttctgatctcttcttcatcggttttatgtttcatcgagtttgaatatttctttgtaagtcttttcctgtcggttatgttttcgtcgttgaaatggtttcaggaattaacaaagatcagatttttggcctttttttctcttctaaatttgaatttcgattttgggaacacgaatcgatgatgctgatgatctacaaatgggtattgaaaacgatttgttcatggttattctgcggtcgtggtttccccaaaaaagtttggtttttaaatttgcaaagcagagtttgatctctcatttaacaataccatgttctaaccatattgtgcgtgatgggtgatttctttggtctgtgaaggattctctgtttgatgattgctagttctttagaagagcaatgagttattctggagccggactcggaaagcctggctcaggtaaaccatttatcttagcaaagattagtctttgtatgagagatatataggctgtgactgatttatccaccttgttggttcacaggtaaaaggagaataagggatcttttaactcaatctgataaccgagtctgcgctgattgtggcgctccagatcctaagtgggcgtaagttttgccatttttatgttttgttccagtaagcattttatgcttctctaagcagtttgattgaatgttatgatcttgtttccctacttgtgcattttttggtttgtttcgtttttcgtaaacccataaaactcttggttgcttattacaggtcagctaatattggagtgtttatatgcttaaaatgttgtggtgtccacagaagccttggcagtcatatctcaaaggttgtgactctttgcttctctttctagttttggtttatctttggtgaaaatttgccattggattccattaagatggcttacaaataatattgtggatttgttatctcgctccacttcttcttacagaatcttttgcaagtgtatttatagttttcaactttccaggtcttatccgtgacattggatgaatggtcagatgaagaagtcgattcgatgattgaaattggaggaaatgcctctgcaaattcaatttacgaggcgtttattcctgaaggtagctctaagcctggacctgatgctagtcatgaccagcgtatgaggttcattaggtaggttacaaaaacccgataagatagtgtatataccttcattaatagtttggtgaaatattcatctcaaatctttgtttcaggtcgaaatatgagcaccaagagtttctgaaaccaagcttgcggatcacatccgtgaggggctctagtacaaagactccagcatttctttcatcgagtctatctaaaaagattgttgatagctttcgcactaattcatcatcgcaacagccggtaaagcttctttatttttcatcttttttttaccatctaactgttagaatcaagcaagtagagcaaactctttgaacttggatactgctaagtcctctgattcatggtgttttaaatttaaacaatgacagcaacttgaaggcatggttgagtttattggattgttgaaggtgactattaaaaagggtaccaatatggccatccgagatatgatgtcaagtgatccctatgttgtgttgactctaggacaacaggtaattatagtgaatacttttgaaatcttgaaaggttttctctttatatgttcttaccattgtttaagtgatcattattgtcatctctttttctgatcgttatcatcgttttaccagaaggctcaatctactgtagtgaagagcaacttaaaccctgtctggaatgaggaactcatgctctctgttcctcataactatggctcagtgaaattggtaaaagcttggtctaatatttccaaaatcactttctactcttgatgaatcattacagaagtttttcccttacattttatgtttttgcagcaagtgtttgactatgacacattttctgctgatgacataatgggagaagctgagattgatatccagcctctgattacatctgcaatggcttttggagaccctgaaatgtttggagatatgcagattggaaaatggctgaaatcgcacgacaatgctcttatagaagatagcatcatcaacattgcagatggtaaagtgaagcaagaggttcaaatcaagcttcagaatgttgaatctggtgaactagaactagaaatggagtggctacctcttgagcaataaataatcaactatataatagggtcattatatataaccaaacaaattttattactgtattcattattttaacattcccccttggttcttgtttgacaaatttttgaaactttgatctcattgaaaactttctttcgtactttgttgttgtaatgttcttttggcagattagatatttgtataactcatatgattatatgttttgactcatgttcttcaaaagatttcatttgaaacctaagataagacgcttataggttactaaatcaggtttcaaacccaatctcaacatttcatcatgggatctcatagctttcttcatctccttcacacgacacaacccttgaatcataattgtaaaactcttgctgttcactgaatttatctctttcatgtactcaaacactacaactgcttcttccaccatctctttttgcctcatcataagccgatcaagaaccgcgttataagcattcacatctaaacttcctttcattttctttatcttttcatgtagtaccagtgctttctctagtttcccgcttctgcagtaacgttccatcaacaatccacatgcaaaagaatcgaaataaacctccatttccataaccgaatcaagaagcttctctgcggatttccatcttcttttcctacacatagatgctaaaacttctgatagcttgtgtgtacaaggaacaaaaccgcgctttataacatctacaagcaattcctcttcttcctctgagctattatcatctctgcaaagggcatttgcgaattcgatatagcaactctcatcaagtacagtaatacctttccgacaaatcattcgatatacatcaacagcttcttttgttctcttctttcttgacagtgcttttaacatacaaccgtatgtcgaatcccacaatctcactgtttcaccattgcaggctttacggaaaagcatctcagaggcaaacgttttccccatatcgcaaagtctttcaatgattttatcattcacagccgaatcacctaaagtaacaaactttttctccaccatcaaacagagaaccttatcaatgaactcagcatctcctaatctacatgcatcatctaatacgcaaccgtaagaacaaaaactcaactctagtttcttgtcatccatctcatgaattaaactaaacacagcatcaaactctccatttctgctataacattccacaagattagtgtaaatcttgcagctttcaacacctgtttccatcaatttaaaaacactcttggatctcccttgttcgcataaaatctgagcaatcaaatcccaagtcaactcatcagagacaatcccgtttcgaaccatggcactatacaaacacaaagccactctaaactggttttctttaaccagagaaccaagaagagagttataagcactttgagaaggtgaaagtctcaatcttctcataaaaccaaacacttccaaaccattatgatgactaccctttaaggcataatactcaagcactaagctaagcgagacagacagtgaaacttcaccttcaaaccaccgatgcatttctccaacaactaaagacacagaattggtttcaaccagaggacgcaagagcatttctgctcgttccaagagacctgattcagcagcaacttcaattactcgacaatgagacttaagatccggctcgaaccgaagatgggttttggcaaaatcgaagaaatcaagagtggttttagggcattttcgagtttcacggaggatctggaggaatacaggtgaagtaagtgttgaccttgggagcttggatttaacatattggagatgagtgatccagttacgacgttgtaagagaattgaagatatttctgtggctactcggaacagagtctgttgggttttccaatcggaagcagaggatgttgatggagtcgctgaagtcgagaatcgtttgaagaatccaacacttgtgtggataagaaccatttaggtgcttcaccaattcaaaaatctgtcctcttttttctaacaaaccccaaaatcgattcttcaaccaaaattcatcctcaaagcccaaagggtttaaggaaagttgatcaagaacaacaaaagatgaaaacttgcctgaatcttagcattgacgttcagagtgtgagttatcctctgcaggtcagtgcacagaggctcagctgcgcaagcgcttcattacccggagatcttctgcctaattcagtcaacgtcattactcaatttatcttaacagtatccaaaacgcggcgtatatgtctcattatcatcgttacgtgtcgtcttttcattcgctgtaatgattcatcaccttctcttcttcataaacctcacttcttcttcttcttcttcttcttcttcttcttcttcttcttcagtttcgcaattcgattcctaaagtcagcagttttgtttcttcagtttcttctcaaaccgatacttgatcaaggtaaaatatttcttgcttctctctcgttttgaatggtatgcaatcgaaatccaattttttcctgaattttcctttcattcgtacgttgttctttgtaaattagacaaatttttgtcttctcttgatctccttcacgtttgttctgatgtgattttaaatcgatttgtaaatcaaaatttacttctgattaatcatgttaggcctgaaatttgaaaaaatgtgaggcaaactttaatctcaatgtctgataatgcaagcataacagagcaattttgttttatgtagaatctctgattgaaagggctctttaaaataagaagaagggtctaaaagatggcagaatcagaagagaatagcgttttgtttcccattttcattttgacaatgatggcaattccattggttccttatacatttgtgaagctaagccgcgctttttctaagaaacaacggagtatacattgtcaatgtcttgagtgtgatcgttcagggaagtacaagagatccatttctcaaagtgttagtttttctttttcccccacactaactctttccgaataatgattgatttaactgtatgatgttcttacctcttgaacttgtttgattttgtcttctgcagatctctagcttcacttcttgtagcaacttgacagttgtcctactttggattgtaatgatcttcttgatttatcatactaagaacatgagccgtgaggtaataactaataattatctcttcaagcttagtccaagattgcttcatttgcttattcattatcttgggtaaatattatagagtcaactctttgagccattcggtatactcggtttggaacctggtgcttcagattcagaaatcaagaaagcatatagaagactctctattcaataccatcctgataaaaatcctgatccaggtcgaaatgcttcctggtcctcttccttgataatcgtttatttcctcccttttgatacattgttatgtgttcttagtattgcttatttgtgtattgtaatggtacagaggccaataaatattttgtggagtccatagctaaagcttaccaagctttgactgatccgttatcccgcgaaaactttgagaagtacggtcatccggatggtagacaggtaatgactatataacctccattgtttgtttgtttttacacttacatgttagaatagtgttttttcctcaaatgaaaattgagacttctttgtaaattgtgctcgcaatttcaaatgcaaatctaaaggagtgtttgaaacaattgaggccatattctcatgtttttgtagcatattatgggctttgccgtctccaaatgataattgaaatatttgtaaatgtgattgatgcagggttatacaatgggaattgctcttcctcaatttattttaaacatgaatggagaatctggtgggatattattgttgtgtacagttggtttatgtattcttttgccactagtgatcgcttcaatctatctctggagatcatcaaagtatactgggaatcacgttaagcttcaaactcgtcaagcatatttcgagttattgcaaccctctttaactccaagcaaagttatggatattttcatcagagcagctgaatacgcagagatttcagttcgtaaatccgatgatgaatctctgcagaaactctttatgtctgtcaaaagcgagctaaatttggatcctaagaagttgaagcaagaggaagctaagttttggaaaaagcatcctgcaactatcaaggttggtgtttttttaatacatgagtaacacaaaagtattggatagaatcttgaaagtgctaactttttttcccgttcatttttctctgcaacagactgagcttttgatacagaaacagttaactcgtgaatcatcagtcctgtctccgactctgcaacgtgatttcaggcatgtgctagagtttgcacctcgcctgcttgaagatttgattaaggtcttatatagtctttattttttttgcataaaataaaggttattacaaagttgatgatgacttgaatctcctaattttacataagatgtgaaaaaggtttcaagcttaagcatagggaaatttcaacgcgaaactatatgatattgtgagtttcttacagatggccgttataccccgcaatgaacaagggcgtggatggttacgtcctgcacttggagtaatggagctatctcaatgcattgttcaggtattaagatgtttccaactttacatttgccaaaaaaaaaaaagatttttcagcctaattatagttgtttgattgcaggctgttcctcttagtgcaaggaagtcatcttcagaagacattgctcctttcttgcaactccctcatttcaatgaatctatcgctaaatcgatagcgttgcaggttaaatcattccaaaagtttcaagaactgagcttggcagaacgttctaaactgctcagagaggttgtgagtttgtcagaaaccgatgttcaagacatcgagaaagtgttagaaatgataccttctcttaaaatcaacgtcacttgcaaaacagaaggcgaagaaggcattcaagaaggcgatattatgacagttcaagcttggatcactctgaaacgtcccaatggactcataggcgctattcctcactcaccttactttcctttccacaaagaggaaaacttttgggttcttcttgcggattcaaaccatgtctggttctttcagaaggttaaattcatggatgaagctggagctatagccgctgcatcaaacactattactgaaacaatggaacctttaggagcaagcgtcaaggaaacaaatgatgcagttaaagaagctgttgagaaggttaaaagtgggtcaagattggtaatggggagactcttagcacctggagaaggtacttataacttgacttgcttctgcctaagcgatacttggatcggttgtgaccaaaagacatcactgaaagtcgaggttttgaaaagaacccgtgatgtggagggtgagaatgcagaagaaggattagaggaagaggatgatgagattgaagaggaggattacgaaagcgaatacagtgaggacgaggaagataagaagagagggtcaaagaagaaagtaaacaaggaatcgagttctgaagagtcaggatcagatgaagagtaaaagaacaaaaagtagttaacgttgatctgaaattattgtctgaaattatacaataatttttgttttcagagcttacacagtcgtactaaaagattttacagtatttaatctttttgctgagtttaatactctttttagttgactcttcaaatctataccttgttttgactcttaagctcagatagttcaaaacttttctggtcatgttttcgtcagaaacccaagctcagccccagaaagcttctttgaagaaccttggccgtctatctattttccttatagatgattcaacggtagatacgatctcaaaagctcatgaagagtccaaatgatcaagactgggttctctagaagtaatctgtccttgacttccacccaaaagttctttttcatcttcttcctcttcactgagatcctcaccatcttcttcttcactctcaatctcattgtcaatcttatcttcgtcgctgcttaaaccaccttcaccttcgcttagctcattcagctgctttgccttgaccttaacacgtcttcctttgatgtatctaaactcccactgtggtggaggatatttcttcatcagtttctcgtacttatccttcatctctagtttcacaaacacttttccaaccatagacacaatcgcaacattcggtttcactccaagctcctccatgtcagcaaagacctaagaaaacactcaatagtttcatacatcaacttctctgatagaatctctgccagttgcaaatacttagtaagaaagattttttaagtgtacctcgaagagcttttggtgcatatctctcttgtaatatatagagatcattttgttgaagaactttctaggagttccttctaaatgttccatgaacaatttgttccacaattcctcagcttcgtcaaggcgattatcttctgctaaagcatttagtaatgagaagtaagttcccattgttcttccttggcctttactcagcatccattttgtcacctaacaaaatccataaacattattctacattcatctaactaaaaaaagaaacacagctcttactgcttaataaacaagcatacctgaataatcttcttccattctttttcatcttcaagtataactaatgccttcttaactataacaagagggaactctaattcccaagcaatgaaggaatcaagcgctccataaacttcttctttaacattcgacaatccttttatctgcagattaacaatactcactaactctaaaagagattgcagaacacaaaaacatatgaagagagcattacacaagcaatcattttggcagctttagagatagttccaatcctcttccttgttttccatacacgaggagaccgaggtcttggacctctcgccgcacaaacctgaaagattattgaattcgaagacaacatgtgaaattttgaaaccaagagactgtcgaaatgtttagttaaagaaggtataagaaacataaatacgaaccacaacattgttaggctttttggtgaagagcttagttgatgattcccttgtttgaagaagaagataaggtaatgaatatctcaagcttagcatcctgaaaaaaatcaattcagagaagaagaagaagaagaagaagaagaagaagaacccagaaatcttaaagctttctccttttcagccactagagatatctagtgaattcaatttacaattgtgtaagttttctagagaatcgaaacacatattgttcaacttacctgtgctttcttcttcttcgttctcactctgtctgataatttgcgcttctctgtgtcctccaagttccctctgatgtctgattctcatccaaaacatacgaaatgcgtttatggaagtaacggataaggcccattaactagtaaagttaaataggcccattaactagtaaagttaaataggcccattaacctgaaaattttgacccgtcgtctgtattcttcatctctttcctcttcgccatcgattctctgagctggaaacgaattctctctctctcagcttatagatacccaaattaaggtaattttactcttcttcgtgattcttcttcgattaggttttggtttgaatctcgaatcgatgattttcgaactgatttgctcttgaaaatcatgtggttctgctccatgttaaattgagatccgaaattttagaatattagaatgacttgtgaaatgttagtatgatacaaaaaccatatctttccttcttttgcttcttcaacataagggtcttttgcttagttttgctgtaaattccttatgggtttttagcagagaaataaaagatctgatttttaacatccattacaagcgattcagattttgcttttttcttgcagaagaagtgaaagatgcatcctccacttacaccacatagacatccaatgtgtctggaggtgagagtttgctcaacttgtagtttcaatcctctgttagttttaacctctgtgactgcttctttgagaataagatcaatcttataacagtgtattagagctgtacgcaaatgagatgagagatttttgtaaaatatatgcaatttatgtgataactcctatgtgtgtcaatctctagctttagtaagcctttgcaaacaagctacatgactgcatttggaaagagcaaacctttcaaaagaaatcagtttgatatgttttgttctacttactaattctttctgtttgtcatatgtttggtagataattgaggaatttcaaaagtgtcatatagaccatccgattgggaaattctttggagaatgtacagagctgaaagtaaagcttgatcgatgtttccgccaagaggtaataagttactaatagtcgattaagtatgtttcggttcaaagttttcctcttagagatgatatctttacaatatatttgcagaaagctgtgaagcggaaggtaaatttcgaacaaagcaagaaacttcaagaaagactgaaagctataaggaaagaagaaaccgcagagacttgagcattgttgtataataatcctataaagaacatgtgcgtgtgtctatttcaaaagaacacatttctaaattgatccacaaagaagagttttgatactcttttgcctcgtaaatgagtgaaaaacatagtattgcacttgtattgattagggtttagcgttttgaaatactaggtctgcagcaaaattgtttcttacacctttatctatggaagtaaggcgagtagctacacgattttcattttattgtggctacaatttagtttccattgacttctaaagttccttaacattgagtctgttttggaaactgctagttctctatcttatgttcgatctccatgacagttttagcgaatgttgaatctctagtataacaacatctctaaaggactgagttcaaagaaacattatgcaaatgttagaaggtctgttctgaaatgatctgttatcattaaaacgtccttacaaacgagaacaagaaatatgttttgcagttttgctttgctttagttgagcaattaaattctattgactacaaaacatcactcttaaaatgttacagaacataacgtttttctgtaatcaaaattttgttctaccaagattttataccactgaaacagaggtggtcaaggaaaatcagaccatgtgtttgttagttttctgttacacagtgtttgttggcacgtggtctccaacatttcaaagaattttcttccagaagtcatcagaagaagaagccaaccatttgactgatcaatttatttcacaagtaccaagaaaaatgctatttaataagggaaagaaacaacaattggaacattgtttgatgcaaatatttgcattcgagaaaactcgggccaaaaattgcatgtgatcgtagaaatcaccacgtatgagccgacaaggtttcagggtaacggttattttgctggatcttattctaatcatcacatgctttgtttttcttttctatttttattgtctacgacttgttggaccaattcaagaccagaaccacctccatatcttcgttctcacttgtgtcaatgtatcataaaatcaatttttttcttctttttttggtgtaatgttaagatcgacttgttttaacacgcctagttcaaatgattgaagttggatgtcatatctttattgcatttttttcttttctattgttggttcttgcaggttcgattaactgattaacctgcaaatatcgtaagttttatatggacatttcttttgcgactcttcatgttagaacttaaatgagaaacgttttttcgtagagcgataaccactagacgttcactcgtcacgtcgtaccaaaatagtgggggtggatagttgaatcttgaaaataccaagagtttactatctaactaccaaaatgctatcttgcggattttctgatatccatcaagttgtttcgaaatgtcatggtgttattatatatttagggtcgacctaatttaatgttcacatacacttgccaatcatttttgatgaccagttatctttttgagagagagaaaccaaacaaaaatgaaactaattagaagaaaacaaataaattaatacccccttgagtaaatcatcaaaactagttaaaaatttatttaatttaatttgcataatagaaatcgtcaaaactaattataatttatttaatttaatttgtattcaaagttataattatctgatttgaaacaaagtttttttctaagacatcaactaaaaaaatagaagggaatgttaagaagagccgtaagaccgagaacatctcacattcatgttttaaatggatatttcgtgtaggcggccaagatattaatttgtttattaatgattcacaaccctataaataaaagatactagtataagattatatagagcatgtgacctttccaatctgtgtatattaatgaaccaagtatcctccttatgcccaaggcacgtttccgatatatgtgggtcacttcttatttcttgtcatgtttttagttcacaccggatttgccaaattgatcgaatactaatcacggcctaaaaaattctatgttcccactataatatatagatcatctattgcacaggaaagaaaagatgaacagaaacaatagttaaagaaaaaaaagatgaagattttgttcaagctaactgcaaccctagttttctgctaaagaaaaaaagaagagaagtagagaactatattttattagaaattaagaaagcttttgtacgatgctcttttgtttttcttttcttaaaccgtgggagtacattccaattttttaaaatgtctttttgttccaaatgagaaaaaaaaaactaatcttcatattaccactaaaccaccacacctgtagttacgatgttctcttggtggtgtcgtggagaattgacggagattgggagattccatttctaaggacatggtaatgatatcttgactggtctcaagtgtctaattaatggatattaaatttgaattgattggttatatcagatcgtaggattttttttggagaaacttaaaaatcaagtcgtgggttacgccgacaaaaaaaaatgttgacaatgaaatcatgggttattaattagagaaaacaaaaaaagacgtaaatatagttgaaaccactaaacttttgattagaaatttatgttaagaaaatgctttgatttgtttatttggttcttgttcctccaagtctcttcgttctactcctcaatatgcttacatgatacataataaattataaatataaagaaattctgagaatgggtagtttttaaggaacaattagtacaaattttcaatccatcgtaattcaagaaaacataactaaattgtttttatgtgtgtttaacttcagatatcaccaaatatagatagggcttataggctaatgcatgatttttactaatttttattccagattaaatttagaaaagccttgtgtgagttatagatgataaaacagaataataaaaatgagatttattaataatattatgatacaaaatcatgtagaaattcttaacaatttaagtaaaaaatttgagcgctatatatagtgaaaggaagaatgttcaaaagatagtgaacgaatatttacaaaactcgaaatgcagtgattttttttttccataattctgagtgtcacaatttccatccagattcagtcaacgttaattaatattatttctttttctttttttggttaaggtttcgaacgaaatatattatttaatttctgtgccggagaaatattcgtcgaatcagaaaacaatgcgttttcatatatgtatttaggacgatatttttttagatgagtgatagaaaacttgcgctaccatgcaaataaacttaaatataaaaagtagtagagcctacatgcgagattctatgggttacatcaacattatcattgcaaacgattggacttgtttatcaatttagatttccgacaactcattttccttcaaccacattcaaatatcaattttacaaacaaaaaatatgtttgcaaagtcaataattttttggtgttttacaactaaagattgatttctacttgaaaaaagtattgttaccggattggtgtcgaagtttgcgttatatgcaatttctttagcctccgtgttattttccaaacaagccgagtcaatatttcatagccttttaaggcggaaaactttcgaacacagaatgatcatttcactccagattataaaatttaaaacgaaaaaaacaaaacttttttgttcaaagaagatttgcttgattagtcgtttccaattcgaaaaccaaattaattttcaaaatctatgaaaataggtactttcttatttacagtcttacaatacctaaccataatcaaaattgtagtgagaagatttgaatccttagttctcaaaccttatgatgaaatttataaccactggatcattatacattgtctaccaaagggagttttgtaggaagatatatcaagcttaatagaacaaataagattgccaatactactcaatagaatgtgttttatgtctcacaatatgtgtttttattactcgaattttcctttaagcttaaatgagagagttcaatattgaaaaaatatataataaatttaatataatgtgaagttaagttttgtgtaaaatatgtaagttctaactaacatcatatttaatatatctagatatgttatcaattatctattttgtttttaaatttgatacgtccacttttacatattttgaaggaagtttataagttattattttaatacgttcttttttatatttgaaaatagtgaaataaataaatgttagaaatatataatattattttgtacacgcaacatatattttctttttagctgaaactgcgataggtgttatatatatttttctcttattatgtgaataatgatgaggtcgtcaagaaataaatttttatatgtatgaatactttgtatacttagatcatatcaataatcaaattttctacaaaaaaaaaattacatatcttaaaaaaagactaaaaacaaataaatgaaagaaaaaagaaacataacattattaattggaggcctactggagaagtcgcgagatcgaaacaggatggcccactattgagtattgactctctagagttgtcaattgaaataagttttttttttttcctttttggtgtcgacaaaaccaattaaaataatttcaagtggtccttctcaaaattttgggtaatttgactatgttagaaaattaaaattaatacaacatttgcattaaaaaggaaatgcggcagtttgaactacaatttgcagtatttataaaactaagaaaattttgtaattcgttgattcattgtatatatatactatatagtcttgttcagtcaaacaaaaagtttattcgttgacaaaaaagaagtgatctaaagattctgattagttatatatgttactgttgaaatagttaatttcttggattaagtttattattagatttatatagtattagctcaagatttgtagataatataagtttgagttaattcatataatatatgaactcagctaagctagctcatgagatttttaacaaaaaaaaaaaaagctagctcatgagatatacactaataaattgagtttaggtgagcgaatttggtcattctaacacccttctcttgaagcaatgtataattacacagaatagtgtttgtgaagtagctctatacgtcatactacacgtattatagaaaaaaactcacaaaaagatattgtaggattaagataaagcgagagaaagaacccagaaaaactaaagtcatataaagtaattatactgaatatgatctgtggactaatcggcaaagtgccttcctaggcttagctagttaaatcatcactttcttgaatcactattttctttagttatccacgtctaagaaaaaagcgtcggtaatcccttaggcacgtttccttttgggaatggatgcaagcagcaaattgctcaaagatctttatttatttttatgacaggaagattctgcataaaaacctgaaatgattttcaaagtctataaaatttctaatattattaccatttaaaagtatatgttagactcaagttgccaaaaaaaaaaaaaaaaaaaaacgttaaagacataaaatatgagaatgaagtgttgttggtgctaaataaataggaaacaaaaaaaaaaaaaaacgagttgaggaaatgcatgcattggaataaatattcattggatgataacttcaatattatatttttggtagagttttaaaagtatatttcattataacaatttaaataattttttaaacatatgcatgacggatgttttccctatatatatatatatatatatatatatatatatatatatatattctttttaataactaattcatacgtataagaaaaaaaaacaagtgaaacatattccatattgtgtcacaactcacaacatttggagctgagccagacttaacatgttgatgttccgttcacgatcttatctcttttaccttcttttcgtgaagttgaaaacaaagcaacattttttttttgttaaggaacaaagcaacatttggataaaatgttactagcaaagcaatatttataagaattctgtaacgctttgagttatccattaccattagtaaatttacacttattttagtagagaattacaatgggtcggtatgcatcctatctttatcaaagttaatgcaattaaatttgattttttttagtattaccaccatgtttgtataattcgaagtactacgtacatgcatgcattcactgcatttgtcaaagacacagacgcaaaaaaaaaaaatgtaaacggtttcaacttttgaatgttgtttggtttcgggtttgtatatatatatatatagatgggttactatttactaaatatggtaaaaagctcatgctttcgttggtgtacaacaaataataaactaattacctcagtgaaataatacacatataatataaataaataattatgtaaacatcgacagtgcatataatgagaaagcaaagtaaaagtcgtcgtggttctttttcttggaccccaagcttctcttgcttccataagttctcttattttactaccgcttttaaactaatacgtaccaaacaatgcaacataatgtttcttttattattgggtcttatccagcgaaggaaaaggtactgattagtctgattattaataattgattacaataataaagctaaatatatactgtatattattatagtagtaataacagtacaacatagaagcaagtgaaaaacatgagaaacgaaggacggtgtccagacaagcaaatattcaaacctttgaaaatgaaacaacatcatgttctccaagacagccccaacttaatttattctaataataccaaattcattaatccccattatcgtatcttgtccaccatagatatacaaatatacacattacccatatcgcatttttctaaaatctttttgtatttaatttctacatctgttacaaatatttgacaggtgaattttgatcttagagaatcaaataaaaaaataacattacgatcttaagagtacaaatactttgattagtaaactatcccatttccaactactaattagttgctactcttatttttaacccccccatatacttatttagacgttgcaaaagaatgtgatgaatatacaaatgatgactactcattaaattgtactcccaattaatggtgagtaattaacaatgtcgatgggcggcaaacaatatattttttctttcaaatatttgttttttttttaattgtcaacatggtatgctaaaaatcaaaatgttaacaaattgcactcgtatgtaaatgcatatgcatataggtggacgtgtatataaatgtaagaaatgtgtctctcctcacaacacgtattttgataaccttcacttcccataattctctctaactcatcactctttttcttcttctgcatagatcttctcatggatccaccattcaacgaaatatacaataaccttttgtataatcagatcacaaagaaagataacgatgtttctgaaataccctttagcttctcagtcacagccgtcgtcgaggaggtggagcttcctgtgattgacgtcagccgtttgattgatggagccgaggaggagagagagaaatgtaaggaagcgattgcgagagcttcgagggagtggggattttttcaagtgataaaccatggaatatcaatggatgtgttggagaagatgagacaagagcaaattagggtctttagagagccttttgacaagaaaagtaagtcggagaaattttccgccgggagttaccggtggggaacgccgtcagccacttctatccggcagctttcttggtcagaagcttttcatgttcccatgacagatatttctgacaacaaggactttactactctcaggtacacaaatattgttatcaattacatttttttagaattaatttacttattaaacttaattatttgaaaaaatatgtggagaattatcccaataacaagatgtaaattaaaatacaactttacctttcttttggttaagttaccttctaaacaactagtgttttgaggattagtaagtaaattttaatgacatatataatgatacaactatagtattaattaatatcaagtttttgactataagtaacactatttgcaaagaaaattaattaattagtcaaagattagacatgggagacaaacacagtttttaattcagtatatggtggttttgaagcatataatagagtgttgtcatttatatttaattaataatagttttggatattttagaaatttaatcctagaaaataaagttgttgggcattgggtcaaagatttattccccatatctcatgcgtttctatgttttccatttttaatactatttttgaatacgtctaattttgggatagcaagttggcatgtgaaatacaatgaataaataaacaatattaagacttttcaaacaaaaataaaatattatgtatttggaaaatatataagaaataaatcttaacgtagattttttttgtttgttaaagaacaatcttaagatagttaattaaactctagctaactttttttaagatacctctaatgttgttatttattctttgattcttcgtattcgtaggaacttcgtcaacttcaaattctttaacatgctagaaaatataatggacttcttagaattaatattctgcattagctgcgccgcggaatgatttttttatgaaacaaacctttttattgttatatatccaaacaatcatcattttttagtagttgttgtcagattttttcaatagaaaatgggatttagaccaactgatgattttggtcggtttttgtcgggagaaataatcgaaaaccattaaccaactcatggttccgaaaaaaaaaacccatcaaccaactcattagaagacataagttgcttttcaaaacaatatataaacattatactacgagtctgcgaacgtttatatctgaaaactttcaaacaattaacacgcctatacataactggaatcaaactaaccattttacatttacaatatcttagttatatctcttttttttttgtccaaaagagattatgtatcataacttttttcatatgtgtgttcaattaagaatttttgaataacctttaccaaaaaaaaagaaaagaattttctcaaataaaattttagtttactcagaacctctaaaaacaagctaggtacgatctagaaacatatagtacacactatttgtgtataatacataactacagtactatatggtgagaaaagaaaggaagagtcacgagaaaactgtctgtttggcaaatgagggataatggaagggaagaagaagtactcggacatgccaggctagctagctatatataaatacacacgtatataaattatcttgtgatcagtgtgtactaatgtgtgctggaatctgtacacattcttatatgtacatatgtatttgcatgcatgtggttgtcttacacatctttatgcattgtttcagcttctgtgcgtgtttgtgtatgtgtgaccacataccgttgttacttttcatagttggcgttctcttgataagtcactgttagtgtggcaatttgacaataaaatctaaaatgttattaattataacaccccaattcaatatatatatatatacacatataagaaaatgtatgtggaaagttcaaactataatccatgagataatagaaatatagatccgaattttattatggttttacagtgatctaatatattgtagacaaaaatggtttagaaaacacttgaatgcaaatgcctaaaaaggctaaaacacatgcatcaccgatcattttgctaaaatttcagttgaaaataagatgcaatactttatttttaaaaaataaaattagagatgaattttttttgtattaattttttttaataacttttgatccttaatctctttgaaaaaaacaaaacaaaacaaaacatgtataatccctttattaccgtctggtatttatatattagactgaccggattgtggtatagtcttccaaatgtccaatactttctagaccgagctaatccaaccggatgataaagtgaatagagttcatcattcaaatgtcaaatgaactatagtctatatacatagatgcatgcatataaagagtatccaaaaagagaaataatatagaagactcaaaattggaaaaagggtcccatgttcctaacaggtaggagatatctctatcatagagaaacaatggatcgtacacgtacacgtacatctcctctcaacctgattcatacccatttttccttctctactcgtccttgatttagtctcttgggacccttctccattatatctcacatgtctctcaaacttcctgccatttcacctccttacatgtcaatttgcttcgatcaccttaattatattatgggcatgttataatgttcttatcttctaatttgtttcacagctcaacaatggagaaatttgcttcggaatcagaggcattagcatatatgttggcagaggttcttgcagaaaaatctggacaaaattcaagtttcttcaaagaaaactgtgtgagaaatacatgttatctaaggatgaaccgatatccaccttgtcccaaaccatcggaggtgtacggattaatgccacacacggacagtgatttcctcacaatcttgtatcaagatcaagtcggaggactccaacttatcaaagacaatagatggatcgctgttaaacctaatcctaaagctctcattatcaatattggtgacttatttcaggtaattgagcttttattatgtcattctaccattaccattatatcattatccggagcttacaaattagtttggtattttatgttttgatatggtttggaaggatttaaacaatttgttcatacgcatgcatgatcaataattaaaaatgtggatttcttataaagataacatctaaggcaatgtattaaaaatgtctttaaattactagattgtacttatatatgtgtttggttaggcatggagcaatggcatgtacaaaagtgttgaacaccgtgtgatgacgaacccaaaggtggagagattctcaacggcttattttatgtgtccatcatacgacgccgttatagagtgttcaagtgatcgtcctgcttatagaaatttcagcttcagagaattcagacaacaagttcaagaagatgttaagaagtttggttttaaagttggccttcctaggttccttaatcacgtctactaatttatacacccaaatttttatttttcctttataatttattttaggttttatgatttatttgaattgtttttggtttgattttttccatataatttatttttcatgtttttccttaagaaatatattgttcctcattatcaaatttaattaaaatcgattagaaaaccaattttaagttacagaggaaaaaactgaactttattaattttgaattgtacattgcaaaaaaaaaaaaaaaactcaatccgataaaaagagaaaaaaaaactaatgaaaaatatttggcatttggttttattttatgttataaaaaaatgtcagaagatattagacgaagggtcacgataaataattagaaacaaaaagaattaaaaaaaaaaaaaaaaaaaagaataaagaaatggctttgctctcggcgatgaagttgcagggacgtccaccaccgatctcgtccaatctcaacccaaattccaaacctgcaggttcggattccgtttccttaaacgcctccgaacctggctccgaacggaagcctcggaaattcagctcacagctaaaccgctggaacagagcacgaaccttaaggtctggcgcgaagctggacagtacgattactaatggatcaaacaatacgaccggtccgatgcgtccgatcgaaagttcgagtcgcactgatgtttcgacattggacagcgacgtgtcatcatcaagtaacggagttagcgaggcggatatgacggcggcgaagtcgatttacatagtctctgacggaactggatggacggcggaacacgccgttaacgctgctttgggacaattcgactattgcttggtcgaccgtggttgtcccgttaatacacatctcttctcaggggtattatcgtctttcatctctcttgtctcaatactcatttttactaaaccaaaccaaacgggaatgaattcggtttacaatttaaatttccttaattgttgaaatcgaactttaaaccgaatccaaccaaatgacaattcctactaatttcagctgaaaatgtctgtaattcaatttagccgttgtgaatcggaccgaaattatttctgttttcttgaaccggaataattgattccggttatcttaaaccggaattgagttagtttacttgattggttatttggttttttgaagattgaagatggggagaagttaatggagatcataaagcaagcggcaagagaaggagcaatggtaatctacactttagctgatccatcaatggcagaagcaaccatgagagcttgcaagctatggaaaatcccatcattagacattcttggaccaatcacagagtcaatctcctctcacttaggcactaatccttccggtctttcacgtggcataacaaactcatctctcaacgaagactacttcaaaagaatcgaagctatcgaattcactatcaaacacgacgacggtgccttgcccgagaatcttgaaaaagctgacattgttcttgtaggtgtctctaggacagggaagacaccactctcgacttacttagctcaaaagggctacaaagtctctaacgtaccgattgtgaacggtgttgatcttcccaagactttgtttgagatcgacccgagaaaggtttttggtttgatgattaatccattggtgttgcaagggataagagaggctagagccaagagtcttggacttggttcgagttttaagactaagtactctgagttaggttctgttaaagaagagcttgagcttgccaagaaaatctttgcagagaatccgacttggccagtgattggtaagactatatatatatgatcaagaatttaagagaatttgacaaagtttaatctttctatgaattgtgttgttttgcagaagtgacagagagtgcaattgaggaaactgcggcagtggttttaaggctttacgatgagagacaaagcaatagagcaatgcctcgcatctctaaaagctactaaatgattattattcaaagaggatttgaaattaaggtgtaaggatatatatagagaaaatatgaattgataaaactcttttgtaaagcccattggcacatttttacatgaccatattattgggtcaaagctaaaatccatacaaatatttcactatttatatgctaggctgctagcccaagttggagagaattgagtgagtttgttttcccacccacaaaaactattaacaatcatatgtaataaatttgtatggattttagcttattatgtatcatatcatttgcttattttttggcttattatttggaacgagcatatttttagagtttgagttaaagactgcactagaaattaaagactacactagctaactttttgcacaactcttttgggaaagagaaaatgacatgatatacgtcaagatgggcaaaacaacatatttgatcatggcctcgttcctcctttgaaatattttttcctcaccaaccatttatgaatacaagtagcaactgcaacagcttagtttgagcagtataattagtcaaggaaatgtaggtttggtttgaccaatgatacaatcataaacttcataattactgaaaataacaaagcaactaaaatattttcttctaaaactctgtgatcaacaactgcaattatctattgccccatcgcataccccagttcatactctaaatctacaccacaggttttatgggagttttggatttgtttggcaaaatttcaacatcaaacttttttaaaccatgtgtcgactttggttgatagcagcaaaattcaaaatgaattacataacgtaaattggccagtaatacattctacaatttagcctatgatagtggggtgatgtgctttatgatcaaacacttgaaggaacctaaatatggtaatagcttaggtgaatagcatgtggtgacatttattcttccacgcttctgtaggttctatttgctaagatggtccatttattacccaagtttgattttttagtttttcaaagaaagaaaaatacagtagctactagctaacatcaaatattaagtgcctgtatatgggacatgtgatataataatataaatccagttagttatgaatgagtctttaatacgaggaaagtttttgtggaaacaaactatcaagaaattattagctctcgtaacagaaaattgattagatggggcaaggaatattttcaagaaattcaaaccaaaaatattggtctatttgacttcactcaaaatgatcaaaatagatatcacttgttttacacatgtccttacgctgttacagtttggacttcagtatgtgtcaagttgatatgacgcacaaccacatccaattggtcctaaacgccccaatcacttatctagtatttcaagccttcattcatcatttgtggacagagatatgggaagaggcaccaccagccttctcattctcctcttcatcagccatcgacaaagttattaggagtggaatagtatcccgcgccaatcatgcactaccggcaacaacaacgagctcttcttaagatcaacatgtgcgtcataagaatgggctgatcaacatgtttgtttttgctctgtttttataatgaaagtttaagttcatttgtttttcttttttccataactaatcttttcttttttgttgatcaaataaatatcaaatttcaacccaaaaaaaaaaaaaatcctgcaagatattggaataagagatttatttggaaaaaaattatatataacacgaacggtgttatgtaaactcaacataattcgatcgtaagagagtttctcaatatatttggaaaaggtaaaaccaaacgaaactaaaattactcaccagtcaccacaattgatatgtacacatagagaacacattgaagacaatcgaaacacatactcgataaataaatttaaagaaaaaacagagaaaaaagaatttgaaagaacagaagagaagattctctgtctttgtcacaatagtcataaactcttgtcttaagctttcttttccaatctcccatatgatctcgtgcgtgcccacttcccactttctctctctcttactgttgtcttcttcttttttttcatttaaaaaaaatcatacgaaataaaactattatcacaaccttaccctcttcattttttgtaatgttcttctgtctgatacatctccttaaaatgtaggtcggtgagactgtggcatgttctatggccacaaacttaggtcggtcgatgatatatatgcgttatatataatgctcttcgtgtgtttactattagtctagaggcatatctccgggattggacttgctgatcgagagtgtgaatatgattaacaagattgatcccatgcttgacctgtcatcaaacaaattaaccctacgtcaatatattcgtcaaaaacaactttacgtattaaattctgataggcaattccgatattcagtagcaatgtcgtacacgacttatgataatttaatacattgactaattcagacttttaaatttaatatgataatatctaataatgatgtaaaatgactaaagtaaataaataaattgatctatatatgcaatccaaaaatttaaattatataattaatactaacaacgatgtattttcaagtaactaattctatatatgcattttgagttctatatctttgggggttaattaaatagatatattatgatatgatgagattaaaggaagtgtgataattacttacaaagttgcaaagaagaggacgattttcttcggatcaagcatccaagaagtgtgagagcgtttaaaactcgatttcctcgaaaaaccgaaccttctttctctattttggtcggtaatcatatttcctgcggccgtggcagccgtagtaacggtgatctgatgaagcggcgaggctgaaacagctgtggcagcggttgtggccgtgcctgcatgttctgtggggcccacggtgctagccttttccggcgtgcttgaccctgcaccacatcaatttccataccacaagctttaattaatagcaaagagtaatgattctttttctttatttgacaagacaaaataaattgaatcataacgtagtcattagttattgtacgccaaatttaataaaagtatgagggcatgcgctgcactggtgcaggagaattaaaaagttggaatattggttcctttgtggtatgcataaagctatgtagctaacacaaataatttctaattttaattcaaaataaagacaagaaagagataaacatgagagtttttcctattaattgacttgtagataatgtacacataatatgtcgtaacatagattgcaagcatgaagtgaaaagttagttagtaaggtgaatgaaaatttcctattaaaaagggagaattggtgaagttttcaaaatatataaatgtatcaacctaaagttaaggtttacagctaaaaacgcatgggttggtcacaaactaaaacctacgtaacacttctaatgtctacctttccaagacgaaaagatcagtggaatttaaataaagggttattattcaattttacttagattaggcaaaccgatccctcttgcattagagatatataaaaaaaaaaaaaaaatgctcaaagacatttcacgaagagaaaaaatatctaacctcaactaacaaaataattccaattgcattatgatgaaaaaaatctgaaatatagtagtatttgttttcatcgtaaacacccaccatttttttgttaagtttaagatttttttataactcacagtcacagataagcccaaaccgaatttatttcaagaatctgctagggccattaattagatactattacaattatatggtaccaaaaaataagcaaagaaacaaaatgtacactcatgggcagtagaaaaatgcatttgtctatatacgtgaaattaaaacgttactgtatgtttaatatatgtagtagtttaataaactgtattaaagacaataataaatcaagaatatgacgtatatattaaattatgaattgatgatattgaagaatgaattttacctctaagtggggactgaggaaatgagatctccttgtcattaccatttgcgtcaaaatggagttttctctcgttgttgcttcttggagaccctttcctcgatacattcctctgcaacttttattttctttatttatttcagttttctagtttcacttcataataaatatctcaataattgagttttcactagaaaacactccaaaagagaaattaaaatatctgaaagaagcttcatgccaaatgccaaatacaagaaaagaaaacagagaaatccgtgagatgatagtaatagtttttgataacacagaaaaatatttataaaaaataactgacacattaaaagtcaacttttgattagggttttttactttatacttgaaaaaaatattaaatgagacgaaaaaaatgggcagaaaaattaaatcgaagactcaagagtagttattaaaggatatgggcgtttcttccatgattctcaccaaaattaaatacccaaaagacaacaaaaaaaaataaaacagagaagaaaatagaaacaaagatatgagaaaatagaaattgtggtgttcttgatgattattaagcaaagttttgattttagaaaaactcacagtaattcttggactagaagaagagaagtctttgtggatgacattagagaaactttcaacatcgatcgtcacaaacccatctgggttaacgggtttttgaagccctgatccgatttcttgacccggaattgttccaccgttttccatcgatcttcaaggaacaaaaacaaagacatgatcatcaacatgttcatgaagaaactagagaggacatataaagaaaagtgaaataaacttacttaggaattgaaacaggggagattaagacagagtgggaacgaacgtctctgttgtgctctgtttgaagaagaagaaaggtgattaaggttttgttttggttggagacaaaaagggaagagagattctggggaatgtcgaaactgaaagaaaggagagagagcccttttactttttatttatgttgcccattttttctaaatgggttggtgtctattttttagtattttatttctcaaagataagtcacaactcacacgcacgagagagagaagagatagactaatgagtgattacttattcataatcatgattccgatgtttactttatgattagttgatctaacttagtggaatggcagatggatgaatatgttatcattaaaaccctttgatttattcgtttttattatgagtccgatagttttggttttgcgtatgtgtttgatttggtgttgtcttgctctctacgatagttacaaattttttctttcttaatatgttaaaaagaataagaaaaatataaatttgttttgttttagatatgtaaatccatatcaacaaaaatatgaagaagagtatagatacaagatccatagatttaatcaagtgaacattgactattatttttgtaagaaaattatttacatagaccgttaagtagaaaattctaatattggtttaagataaggtttgtaaaattattgcagtttatgggtacaatgtcttggagatttcaagtatcaaaatgccatcatagatccttttttgtggtatcaagttccatcatagttctcatatgctgtggttcgaattatccacgtatagatagaattttgtttgtttgctacgaacaatattattaattagaatctaatcagtgttaggaacttaggatttataaatgaacgttatttaataatatgacattagaatttttggttataaaaaagaagaagaagattggtgatcatttgaggaatatgcgatgaataatcattaaggtgagcaactaacttccctattttatgatctgcttgcttctgaaggcactccttagcttctttctttctttttttcatttgactcccaattttcttcctctttaaaaaatatttccatcattccatgttgtaatttcaaaattgtcaaataattgatgaagaatgtccaacctttagcttttaataaaccatcagttaagttgcggtcgagtcataatgtaaaattgtggtaacacatagaatatatttaaataagaaaaaccacttaattaaatttccatcaatttaaggatcaaactatccaaaattttgaaaaataatacttgaaaagattaaattatcaaaattgactatatacctaatcaccctcaaaactatagcaacaagcacatcaacaatagttgcaaaacattcattttaagatgttgtccaatatcatatttaatatgtttgcagcctaaaaagtcgtttcttccagaaaaggaaattagtttgtttcaaaaggaataaccaaaaacgatagcttgtaattataagctatatatttttttcaatatgatttttacagctttccaccacacctaagaaatacgatcgcatgtagagaaagcaactgagatttttttttttaccgaagtctgtaaacagttatttaaccatgtataaaaatagaatttacgactttccaagatattttttcgttttggggtctaatgggcgaaaaacaaaacaaaccgaaaaacaaaaatgagagacataggcgacagggagaggactcgagctatatgacaattttttaaaaaaaaatcacaaataatgaaatatgttatcgagtgtttatgagaattgagaagaataaaataaaataattaatactatctattatctcgaaggtgtttggacgttagatattttcaaatggaactatgaaaaagaaaaaaatatttgtactgctagacattatctcctcttatgattattgttttagtcgatgagtacacgatttttttatatagaaatactatttgttgataccgcaaattgtagttatttaagcgtaatctatgtaagaaataatgtaagaaagtttaagtttgtgcaaggttgtcaaggaagaacagtgtctttgtggcttgagatttggtatttcgatcagattcatcaacgtgatacacttttcgatagaagaataatttatgttctatcaaaactcactaatccagtaacaatttagaatgtgatattcatattttacttgcaaagagtctcgtttgttttgtttttttagcattcttatggactatgataaaaaatgaaattgattgttatgatttttgtcttattatgtcagtagaaaaactagctaggatgcatctagtcaaatcttgtacgttccaagctttaatcaaagttaagtgtgacttgacagtagccctaaaccgtaaatccaaattttacaaaaaaatacaaaaatatacgtcccgatatacttattaaaaataagaaaattaactaagatgtgatatatatcaaagagttggtttcgtcactttcagtaagatgaatcattcactaaatcactaataatatcgtatttgtagagttcgtacacttgattcatgtgtaaccaattcttataccagaaaaaaaaacaatactagtggctaccacaaaaccatgcaataaaaggaaaaagaaacatggtggaccgtaatatatgaaagagattagagaaaatataagaaaaaaacatttgattaattgattaagggaatgactcatactaatgaattgtagccagagaagctgtctcacaaaaatacatttgaaaattttgaataatgcaacccacgcatagtcccatactaataatagtaccaaaataaaataaatatccaacttcctatatatatacatacatatagatagagacaattatattgtatagtcttaataattcacactttgttgtactattaactttgaagttttaaaccagttacttggtctcgacgtaaaaaacaaaacaagtccatcatcgaagacatgttaaacaaaactaatctctgtcttctcttttcactgtcctttctcttttctataaaaaaaatgttaatatggcaaaagcaattcagcatagagaccgttggattatgtccacaaatctcgggtaatttattttggatttttgtcacaaagttttctaaaattagcacgagaaaggaaattaaagtacatcatacactttttaagagatattattggttttttactctgcaagtctaaatcactgtttagttacaatctttacttgtacatgaatcttgtgactatattgttgttcaaatagtttttaaagctttgtttttgctacatttgatatccttaaaacctgaagcaaaattagtaaaaaaactcaaatcaaatgacattatacaacaacacaattttagcacattgattcagatttctctcttgttcgcaatctgagctcgaacaatctgctttctccattcgtgaattggtacctgaagccattttcagctctgttttagttagatatcgatcaatttgagttaatgtttttactaattcttgatgaaatgtcgaagcaacatttaagatcttgatgaaacttgggaaacaaaaaaaaaaaatgatatagcttaagagattgcttacagcaggaaagcctccaaaatctcctggttcagtgatgtttctagtaacacaactattagctgcaagtcgaacctaaacacaacacaagaagtttttgtgaaccaaaccgcatcaagaactgcttgttttgaaaccggttaacacctattataccttggatacaatggagacatggtctcgaacagcagctcgtcctcctaaagccacatagtcaccaatcctgcggatttgttttttaactttttatgtcttgaaaaacttcaaaatattgtttctttcaatggaaccaaaaagagttcagatctgtacttacgttactgaaccagcgatgcctacttgaccacaaagcaagcaacactttcctatgatcacattgtggcctatctgcaaaaaaacaagaacgaataaagcatgatactgttttctccatttaaaaaggccaaaaaaacaaaaagagaccaaacctgcactaaattgtctatcttagtatcatcttcgatcactgtttctctccagctgcataatttttcatacagagcgaatgaaaccaagcatagtgcactgatggaagttagtcaatagatgcagatctgttacctgcctcgatcaatgcaagtatttgctccgatttcgacacgattccctatctttacgtttaaagtctagagatgacaaagaaaaacagtggataaatcaagtaaccgctaattgttgattcagattcaagaaatgcaataggggattattacttgaggcttcttcaccatgtttccatgttcatcaacgtagaaaccaaagcctgaaagaaaaataagcaaacaatcaaaagaacccaattctcaaatcaaaacctcctccagcctatgatcttggctaatctatgtgagtttgattcataccatcttgacctatgcagactccattgtggataacacaagaatcaccaatactacagttgctgattgaaacattatatctggatagaacaaaagaaactcagcgaatagaatcttcgacagatgctgaaatacaacaatggtctattcgaaacatgtacaagaaatgttacccgattcttgtggaaggaccaatgtcaactgatggtccaatcacagtaccagatcctacatgaacctctgcacctaagaccgctttttcatgaaccactgcaccaaactcaaccaaagccgaggaataaatttgagccgagctatgacatgtccctcctccattttcccatctaagaaatccttccttaacaataataccaccaccggtctttaaccctatgacaacaaccaatcgcaggacttacagtaagtttaaacatcttgatacaaggatccttaacatcatagcagttcaaagagtaagatgcagacatgcaccagtctatacatatttagcctaagtcaattgctacaacttcagcaaataatagtcttacttcagtgtttttatgctcttaagtcttaggtagctttgtatccccatcaggctgtaaagtctaaaactttaatagatgaagcagagctatatctcatacaccaattaatctgaatctagtgcaatatacggctactaggcattctctcagtggcatttccacaaacacttggtggtcccaatacattcttcgaactaaattccaacagaactcgaattaagcgggaaatccgaaactaaactcacctgtatttgaacaaacctcagctgtcgcagagccaaactgagaatctgaggaaaaagataaacttcgagttctcgaagaaagaagaagctgtttctggataaagggtttgttcaagatgattccttgaagagaattacatatagatttggagtataatctccaaagagtagccgccatagtcacaggaatggagaagacgaatttaaaaaacaagttcgtattttaaagctcgaaactttatttttctcccaactaaaaaagcattaaactttagcagaatacataaacattcctataaaagtaaatttagggtttaaaaattgaatcttcctccattgtgtgactgcaaaaacctaacgtgcagacaaatctgtgagagaaacatcatttaaagaaatcgaaaacgacgctgatcttctgaagaaaccaggctgcgatggttttggaagctgacgagactcagaatcagagctaagcattgaaacaactgaatccatagttggtctttttgtaggattctcttgaacacaagacagagcaatttctaagcattgcattgattctttcttgtcgtgagtttgcagaagaacaggatctattagttccattgatgttccttcaatccaattttgccaagcctgcaacaaagatgagagattgagattgattcttgtgtgtttgtctgtggttgtgtgttgtttcttgttgtttacttacaaatgtggggagatctgttccttcaccaagacctaatccactgtttcttttacctgtaatgatctcaagtacaagaactccaaagctataaacatctgttttcactgagaatcttccgtgcattgcatactctggagccatatatccactacagaaaacaaagacagatgagacattgagattgattctggtgttagttttgaataactagacttactaagttccaacaactcttcttgttactgcttgagtattatcgaaatcgaattgtcttgccattccaaaatctgagatcttaggtagcatttgttcatctaaaagcacattggaggatttgagatcacggtggattatcggaaactccgagccttcgtgtaggtaaagcaatccccgggaaactcctacgatgatattgtaccgtttttcccagtctagttgcttctgcttgataggatctagattcattagcagaggaaagaaatgaaacagagaaaagctaatcatcggaaggagaaaagatcgaatgagagactatatataccgaacaagaaccgatcaagacttgtatttgggataaactcatatacaagaagtctttcagattctttgatggagaaaccaaagagtttaacaagattcttgtgttgcagcttagtcattaagagtacttctgtcttaaactctgcattgccttgtcctgaatgtatggataaccttttcacagctatctctagtccatctgggagatgaccctgatggattttatgacaggcttattgaatcacagtgagtaaagttaatctgtagattaagattagggtaaaaaagagtatagtaggatgagtttaccttgtagacaacgccaaaaccaccttcaccgatcttattcgttaaggaaaaatcatctgttgctactcttatggtctcaaaatcaaaatgcaatgagtctgtactctcaaattcatctgcagatcaaaattagccagcgcaaactttcataataaggtagaagaatagggtttagcatcattagttatctcaatcagctccaaaaacttactttcagcattttccttcagggtcttctttttcctcctcctctttaagtagataaagagaaacacaagacctaatatgatcgccacaatgggaaccaccgcaaagatgagagttttagaccggtctttactttttcctgcaaataacaacagagaatcaaaaggtagattctaaattcctaatcaatttgatgatattagcttaacttgtaatataccttgatcacttcttctggtgttattattatgagaagaaagaggttgcttctgttctgaagtaactgaaagatcgaaaaacggatacacttcaaacctgaaatagcaacttggattagtccaccatccacctgtctttccatcacaacaagtgggaactccagcaaagatctgagcaagacagattctacaatctgattcagacaaatctggtgtacactgagccaacgcgtagatcgttcctttcactcctgctgcaaacttaacctctttggtctcattcgcagcatcgatttttgctcctaatgaatccaataggtcacctaaacccttgctgaaaccttccttgtctgtcacactaacattacttgatgtataagaaaaaggaaccggctccatttgacctaagataattcgacttgtgtaacgaaacatgcatttctcaagccaaatattggcttcgatgatgtttggacagctctctacgagctgctttgcggcggtggtgatgcaactgatgcaatcttgatttggcttgacatctcctctgcataaagctatggcgttgacttctccattgatggagatattgtagaagccgttgatggttggagttagatcaggtaaagacgagatcagacggttgagattaagggaatatgaagtgttggatgtgaagttacctccatcgtagtagcaaattgtgtgaacggtgacgttttgctgagcataagtgacaaaaaaagtcaagaagaagaaggagaagaaggaagaaagcattattgaagtagaagccatgaaagagtgaaagacaatgaaaagcagagtaaatcaagaatctgacaatgacagtttttttaaaaaaaattctcgttcattcgccgattctcgaaacctttgaccgaattcgttattcaaagaaaaaaaatcagtcagatgttaaatactcaaatatattggttacaacttacaacacatttgctgtgtctgaacagagtcttgcatagaatggaactgagaaggcgagtgggcatgtttgtgagcgcacttataaaaataaagggccaaaatattcttaaggcccataataggcttacttgtactttttccttctatcaggagtctaatttattagaagcccatcatcttaaaacaaccaatttgtaccacatgatagagtagtccgcaagcattgacttggacactaaaaagtagcttttaataaaaaggaagacttgcaagcagcatttgccattttttactactatatcatcgtaaaaattaggaatattggtaaacgagagtggtttgcgagtaagtcgaatgacgtaatccctatatctttttggaaactttctctattgaagtaacacattaacgaagaagaataatgtacatcgattgtttctttttttctttttgttcacgttacagcatcgtttaggttcgtatttttgcttacttggtatatatgttagacattttttataaaaagttaaaaactaaagaaaaagagtgggtcgccgccgatggatagacgagaagaagaagaagaagaaactggatatggtgagaagggaacaagaaatcaatctaaagaagacgagagccgtcttggtaagattttcgagctgatacctcttgatatgattcctgatatactcttgagactgcccgctaaatctgctgtgaggttccgtatcgtctcgaagctatggttatccatcaccactcgtccatatttcatcaggtcgttcgcgtttccttcttcaactcggctttgtcttatggcctgcgtcaaagcaagagacatgcgtttatttatctcactgcaccaacatgatgacggatcttacgctcatgtggaccgttgtgagataaaatcccctaaacatgattattacaatccgagttccgaatctgtcaacggtttggtgtgtttcggagacttttacaatatcgtagtttggaatccttcaatgagacaacatgttacattacccgaacctaaaccacacagtactgtcaggtactttatacgtagctgtttaggatacgatccggtcgaggataagtataaagtattgtccatctcaggctaccacaatggcaaccacgatcctctcgtttttacattgggacctcaagaatcatggagagtgatccaaaatagccctttagatatccctctaccaaccggaggatcacgagtaggtacatgcatcaacgggcacgtgtactatgaagcgcagatacgttttaaagtagatgatatttttaattttgaaaatatccttatgagcttcgatgtgaggtacgaaaagttcaacacaataaaaaaaccagctgatcctacacttcgaaacttcatgctcaactaccaaggaaaattagcatggttttgctccgattattcttctataaggttttgggttttagatgatggagacaaacaagaatggtcgctcaaaaactttattttgccttttccaatctctcctgaaattgaccccatctttgaatgtagagtgatgctgactggtgttactcatgatactggtgagttcatttttattaatgcgacaatgtgtgatgcattttgtgttttatattatgatccaaagagtgggagtgaaaggaggatcgagtatgaagggattggagacagagaattctgtattaatactggaattttggagtgcaaacgtttcactattgattggtttcccaatcataatgagagtctcatgtctttggttaatgtccttaaaaaggccgattagtaagaaataggaattgtgtggtattatacttttgttgtactatgactattggttttattaagtattaataaaaaaatctggttggtagtaaaaactagaagaatcgtgattgttattttaaatactgtagacatccttttttgtttttttttcaagaatatgaattatgcccattatagcatatatagttatgtaaataacgggataatatagaatcttgttacgtacactgcctcttttagcgacattcttgtcctcgccacagattctttactcacaagctcactatggttccttcagagatattgttttcaaacttctgtttatgctatctggcgtgaaaggaatagaagaaggcatggggagttcagaattggggacagtcctctctcgctagatcatcctattgccactatagatatatccctgaaaagagtaatgatgtgtgacttacatattttttgatcgattttgatcaaaaattgtaacttattaatgtcgaaatctttttttattattgagtaattgtttttaaaattgtaacttattaatgtcgaatttttatttttttttattttgaacaagatattaatatttggtttctaatttttaggttttggaaaaagaaagaagagaaaattaaatattttggtaaacgctaaaaaaaacttataaatctatttgcaaaaattttcaaagtgcatgacaaaacttttatgaatggcaaaaatcggggaaaaaccgaaaaacaatagttattgacaatatgtcacatcaaaaccattttcttaattaacatttgacaaatgaactctaaaataatcaatttttaatgtaaaaaagaataaattaatatttgaccaacctggatctttcatgaattcctgttctatgaagttcagaggagacgctcctccgtacttgtccccttcttaaaatcaaattgaaagctgtttttctttaataaataaataaatgcaaagagacttgtcttaagtatcaaacacattacacgaaacattcaccatgtcaaatctagaaccatttaaataacattttcttctcatcttaaaggacacattccacagtttcagacaataactatttcttcaccttcttcttagaactgttcttcatctgaattttgccacagatcttaggtaaatcaatgaatctatttatctatatcttaaaatatcattgtttagtacgtaagtcaatgagattacttgcagactactcatccgaaagcaacttgcaaatgtaatgtgcttaccactctttgaaaccttcaatataaagaacaacaatggttaattagatcataagcaaacaagaaacatttcaagctttgaggcaaagaaaatgaagaccctatttgtcctttttcttctccttctctgtgttttcgcgatcaacgcaaatcaagaagaagagaacctaccacaatctcatcataatctgcttcacaaagtccaacaatggagaacatctctgaaagaatcaagtgctgcagaactcaagctatcttcagcaatcattatggccggagtgttatgtttcctagctgccttaatctcgagcgcaggtggaatcggcggtggaggtttattcattcctatcatgactatagttgcaggggttgacttgaaaaccgcgtcaagcttctctgcttttatggtaaccgggggatcaattgctaatgtaatcagcaatctctttggtggtaaagcattgcttgattacgacttagccttgcttcttgagccttgtatgcttttaggagtaagtattggtgttatctgcaacagagttttgcctgaatggctcatcactgttcttttcgctgtgttcctcgcttggtctatcttgaagacttgtagaagtggagtcaagttttggaaacttgagtctgagattgcgagagaatcaggacatgggaggcccgagagaggacaaggccaaatagaggaggagactaagaaccttaaagcacctttacttgaagctcaagcgaccaaaaacaaatcaaagattccatggacgaaacttggtgtcttggttattgtttgggcgtctttctttgttatttatcttctccgtggaaacaaagatggcaaggtatgttaaataacttcatcgatcgataggctatatcgaatttgctacagcgaaaatcgactgattctccttatgtttgtgtgcagggaattataactataaagccttgtggtgtggagtattggattctgctttcacttcagatacctcttgctttgattttcacaaagttggctctttcaagaaccgaaagtcgccaagaacaatcccctaacgatcaggtaaaatgcaaaagctaagtataaaactgattgaagtcaggaaaaagaaatcagatgctaaacatttacatcttacatgagcagaaaaatcaagaaggtacaagactggacaagtccacgcggttaaagttcccggcgatgtcctttttagccggtttattaggaggtatatttggtattggaggtggaatgcttataagccctcttcttcttcaatctgggataccaccacaggtatttataaaagaaacaaacaaagcttctctcacatttttcatctgatttttcgcaagtctttaatttgagcatgagattgatgcagataacagcagcgacaacttctttcatggtgttcttctcagcaacaatgtctgcagtccagtacctgctactaggaatgcaaaacacagacacagcttatgtattttcctttatttgcttccttgcttcacttcttggactggttttggttcagaaagctgtagctcagtttggaagagcttccattatagttttctcggttggaaccgtgatgtctctgagcacagtccttatgacaagttttggagctcttgatgtctggactgattacgtggcaggcaaggacatgggtttcaagctgccatgttaagacatcatgcctttggatcatcgacaatagagatctaaagaaaatcatctgtttctttttatcatcttctttttcttgtttggcaacagaggctctgaattgacttctatgtaagagggagatttagagcaatatggcattgtaatgtttatatgttttgtaaaattaatactttgggagtgtaactatagttcagaccttcactggaaacaacagtttatgtgtcgcagttaagtagctgctaatatagttgtaatgttgtgttgattctaagattttgtaagcaaggaaacaggttgcaaatgaacaaaatgataaaagacagtggctgtctgaaattttctatcatacaacatgagaatgtcacatttctaaaatagttaagctgctacataataacactgggagtataaagatccagaataaacgctgtattttcgtagcactccaattatttgacactccttgaacatccatgttccatgaagtgcagcggaggaacttttctttcttctcagctttttaaaacaataactgattctcgaaatatgcaaagagactctgtcagaaagatcaaacacaatacacaacccatcaccatgtcaaatcctaaaccattcaacaaaaaatttcctcgttatctgaaacgacacattccacagtttcagatattaataactaattctccttcttggtctgaatgtttccacatatcacagataaaccaatgaatctatcttcaatatcattgtttagtagttaatttaatgtgattacttgcagcctactcatcctaaagcattttgcaatgaaatgttcttacccctctttgaaaccttccatataaagaacaacaacggttaattagaacacaagcaaaagtttcaagctttcaggcaaagaaaatgaagacactttttgtcctttttattctcattctctgtgttttcgcgatcaacgctaatcaacaagaagagatcaatcaagagagcacacaacagactcatcaaaatctgctctacaaagtccaaaaatggagaacatctttgaaagattcaagtgatgcagaactcaagttatctccagcactcgttgtggctggagtcttatgcttcacggctgctttgatttcgagcgcaagtggtattggcgatggatttttcttcattccaattatgaatttagtcgcagggatagacttgaaagcagcttcaagcttctctgcttttatggtaaccggtggatctatagcgaatctaatcaacaatcactttggctgtaaaaaattgattgattacgacttagccttgcttcttgagccttgtatgcttctaggagtaagtgttggtgttatctgcaacaaagtttttcctgagtggctcatcactggtcttttcgtggtgttcctcatgtggtcttccatggagacttgtgaaaatggacatacttcttggaaattgagtctgatattgcgcgagaaagaggacatgagagactcgagactggccgaggtgaaacggaggaggacaataatattcttcaagcacctttacttgaagatcaagaaaacagaaacaaagcaaagcttccttggaagaaacttggtgtcttagctattttttgggcgtctttctttgtcatttatcttctccgtgggaataaagatggcaaggtataatgatatataactccaaagttcgatagattttatacaaagtcgactgattctgtttatgttatgtgcagggaatcatatcgataaagccttgcagtgtggagtattggattctactgtcacttcagatacctcttgccttagttttcacaattttggctctctctagaaccgaaagtctccaagaacaatccataagcaatcaagaaggtacaagactggaccaccagttcaagcggttaatgttcccagtgatgtcatttttagccggcttattaggcggtatattcggtattggaggtggaatgattataagccctcttcttcttcgagctgggataccaccacaggtatttaacaaaagaagaacagttttagttactgttctttctgatatttcacaagtgtttcaaagttgaatatatgattgatgcaggtaacagcagcaactacttcattcatggtgttcttctctgcaacaatgtctggcgttcagtatttactactaggaatgcagaacacagaagcagcttatgtgttttctgtgatttgcttctttgcttcaactctcggacttgtttttgctcagaaagttgtacctcactttagaagagcttccattatagtgttcttggtcgggacaatgatgtatctgacgacaatcgttatggcttcctttggaattcttgtgttctatatagataatgatgcaggaaaagacattggtttccaactgccatgttaagacatcaaatctttggatcttaaacaccaaacaaggtcatcggtttcttctttttcttgtttttgcttcactatgatgctctgaattggcttctatgtaagaggcagatttggagcaagatggcattgtgatgtttatatgttttgtaaatgtaagtaatttggggaagtaactatatttaagaccttgactggaaactgtgttgcagttgagaaactgctagtgttttataaagttctgtaaggaaatgaaccaactctgatttcttttagaagaacaattggataataagacacttcctgtctgaaaaaatacatttaaacattgaatagcagaggattatgtttctcatacaacatagagaaagccacattgctaagacagcaagctgctctactatcataaagatccggaaaaaatgttagtaatgagtttaagaggttacaagataagagattgatgtgtcaaaacccacaagagaagagttgtgaatcaataattggcagatcttctgaacatttttagccatagcttaagcgagagtcaaggagcttcgttgaagtttgtcgcctaggtataccaatttcacacgcatttactctagcagcaaaccggagtgagcaaagagactctccagcagaagttgggtcaggcgaaatgtttacgaacatcaaggtctttgaatctcctcctaggcaaggctgcacaagcatatgccattgttactaaattttgaaatgacattatgaaaaatgatttatgtagccacaatttaaacaacgaaaacaaacctggagcagatatgttagctttgagtttctgaaaggaacatgatcttctttcttagccaatgcaaatattacatcactcaaagctgataaacttttgtttatagcctgttgttgtgtagaacaaagataagtaaggatatgctgaaagcaaaagcttggaaagattatgtttgaaacaacaaaaaacctgtgtctcttttaatcgatctccagttgccccactcttcgatagcctctcgcttccagcaagatctattaggttgagaacaccttgtacctgctgttcggtgctctgaaagaggaggaatgtgttgataaaaagtgttgataaaaaaggatttcaaaaataagaacgaaaagtctacaaggcaagaaaaaacattattacctcattaacacctgaaatcctcatagtaaacacgaaatgacttctagatgattgctcattcatttgagtcttccctactgacctgcaaaaagagaattcactctatgattggtcaattgacagagagttatttatttgttacgttatgcattcaagaaaatccaatttcaaataccatgtattcgtacaagaacaagaatgttactatattctcataatccacggctctcaaaagaggccagaaatcatcataaaagttccaagacaatacctgctctgagcagcctgctgcaagagtgaggatatctttccaacgctgcacacatcaaatatggtcaagtcgctgacatgggtgtgtccatttacgtcatgagtgattgtatattgctttcctgaggtgccactgtctgctcgcaccaagtccatagaagttgttcgatttgtagagagcaaatctctgatggtctcattatatatctccaacatcgatacctacattttaaagataaatttgaaaatccaacaaataaagttagaaaaaaggtgatgccaatgaaatcaatcagcaatattggatgaaatgtacacctgcatcttgtacttccagccttgtgcaccgagtgattgactggcttggaatatctgttcaagtgatcgagggatcagtcctttctgatctggcgcctcaggccggcccatcatggtgtaggtctttccagaaccggtctgaccgtaggcaaagatacaaacctgtatccaaaaaatatttaagatagaggcatcaacaatagaacctggcttcaaatttgacacttaaaaaaggagccatatctacacaagcactctgtgcaacaaacacgaaatactccaacactacttcaagcgagttactctaactagaaatatttaacatagcaggtatatccagagtacgtaagttaatgaagagaatagaccttatagccatccaatgcactctgtacaagttgagatatttcaaagaatacttcctcctgggaagcttcgtggttgaaaactttgtcaaaggtgaaaggatgtttgttccctgttgacatatagaacagcacgaggcaggaaaaatgatttaatgtctttgagaatagtcattcatagcaaaaagtaattcaagtcaggaaatagtcataccactctgaaccaaatcaacacctcttccttgggcttctgttgaagtaggataggctattacagttgcttcatgtcgtcctccatcgtctggtaacaagggacgcactcggcagaagacacgtatatttccttttaattcctgaatttacagcttctcttagctcagatcaagacagccacatatataagggaaaaaaaaatagtttcttacaagaatagtgttatgaagcttcttccgcaataactctccctcacacagttgatgctccatgtctgcaagccggtcttgtagttcgcacagtagatgcttctgctcctcaaactctgtcctagtaagagatactgatgcatctgccatctgtattcacagttataaatatctatcaaattagctatttgaaatcaagagcatctgaaggtcatgtacatcattaacttccgagataaaattgatcctcctggtaccttttgcctttcattggcgattgctaattgctgctctaacatatttaaacgctccttctgcaacgaacatgtctcctgcagggtaaaactaaatatgagacaggaatgcgaaaaatgcacaactttgaactgacatccaatactaaaacaaaaaaagtactaacctccaacgatcctgattttgctgtcaagatgtctagctcttgcgatgactttccgacattctcctggtacttcctgatctcctcagacagcttctgtgactgtacaacttggcgatcacggtcatcccggacttgttggagctcattccgaagattagtaacttccgaaagcaatgaatccttctgttttatagcgtcatcttgcaacaccttgatcacaaaaaaaggaagaggaacaagttaagaagaaatgagaccaattaaagttagcacgcgacagtaaggccagtggtagagaagaaaaacttactctgcttgaagatagttgatcctgcagcgacttgctgtgtcccctaagtgtactaagattctccaggatgcttgacttctctttttcagcacgtgtgagtgcagctcgaactgtttcaagatcagtctgaagtttgctgttatattgttgcaaacttgtgttgtactcttgcagccttttgtacatatcctcaagtgacgtcacctataaacacaaaacaatttccatattaactaacagatcatgtggaactaacacgagaaacagaaatgaaacacctaagaaaacaccagaagacatatgttatataccttctgcttggcagccattttctcttccttaactttatcaagttcttctccgagagaagcctgcactttttcagctgcaactctagcttctttttctcttctatgacattcaatggcgtcctagtgttcaataagtaagaggaaagcaaagtcaagtaatgaatttcattaaaagaaaacattcacaattagaaaaaccaggcaccaaaacccttgcctgtgtactagactcctcctttgcaagcttttcatgtagtgacactacattctcttccaactttgagatagtggcctgtagctcttcctcttttgtcctagcctccaactctataagagtcaaaaagttagggactaccaccaaatgagtgaataacttgtttcatgtaaaaaaatcgcaagaagaaaataacctttgtggttgtatttttgttctgaagattccaaagaaaccttcaaattttccttctcttggacatgggtttcatcagcttgttggaaccattttacacaaaccttcagcctcttgataatatccgtcatttgctcaatcttagcctgcagggacagagacaaaaaaaaactccttctgagtgaaaccataaatgaaaacatctacaatgcttagagcacagagcaagtgtaactcaatcaatataccttagtatcaaactttccagcttttgctctctcactgagcaacgccaatatttcatcttttgtaaagtcaactttaccacattcttcaatgctccctacatcgctgttcatcgtgacatcttgtttattcacagccgaaaaagcttgtcttctcccagtacctccttgcgtttccactttccttcgcttgtcaaatgaaatgccaccgagaccctcctttttctgaaattgaatcaaaagccacagatttttcatcagtttcataacaaaaccaatatccagctacaagaaatgtagaatcccagaacccacgaccactctaaattctattgataacacccatcagagtaagaaatgcaaagccgatgaagataacaccttaataaattcatctggtaagctcacaaacaaaacccaaaatgcgaaattaataattcgaccagtcctagggtttttctcaaacccatcctccagaacactcaaaagtgacgacgaaatgtagtggaaaagcatgaaaaagggagcttacggcgtttggactgcgaggaggacgattctggttgcgagaagccatctccgagactcaaaattgctacaaatttcttctcctttcgctcgtcaagtgcataaaaatcccaaaatggtagtcttctccctaaattcgggttaccgacaataaaatctccgattgattctcaagatcttagagaatcaaatcgaaaaccttctcaatcgaagtcgagaaactaggattcttactttttcctaatttggggatttttgtgtgtgtgtaagtgtgtgactgaagcaggagcctgtagtttcgaaattcgaacgattttgaaattagatgtggcggacttctggaattatcataacgttatcaatcaataaagtatttaaacatatgggctaactttgggcctacaattcggcccaaatgtttaaataatcttgccacgtggctttaaggcggacaaaaatgacacgtggttttatatgagtggctacaaccatatccaagttatctaaagtacagataaggcgctctgtgtcggagaatgaaaccaaccaatcatataagcataaccaataatcatcggcttcaattttcgtcttgagaaagaaaaacaaaatggcttcgatgggtggattacacggtgcatctccggcggttcttgaaggaagcttaaagatcaatggctccagccgtctgaatggctctggaagagtggcggtggctcaaaggtctagacttgtcgtcagagctcagcagagtgaggagacttctcgccggtccgtgattgggcttgttgctgctggtttagctggtggctcgtttgttcaggctgtcctcgccgatgctatttcgatcaaagttggccctcctccagctccttccggtggccttcgtaagttaactaacaaactaatcttccaatatgatattcattctcattgttaatgagattaggaatttaaacgtgatttaagttatgtagatgaaaaaaccataaaatgtagtctttaaatgtggatgtttttgtataagaatataagagactccataataatcaagcatgtgtatgaatgtttcattcggatttgggttagagttcataataagcaagcaaacatgtgttcgagttagttcttatatcgatttttctggtataaacacacttaactcgatctctatatgacatacgacggtagatatataacacttacacattgttttatgttttatgaggtgacaacaatttgttttgtttggtgagcagctgggacagataactcagaccaagcaagagactttgcattggcattgaaagacaggttttacttacagccattgccaccaacagaagctgcagctagagccaaagaatctgcaaaggatatcataaatgtgaagccattgatcgacaggaaagcttggccatatgttcaaaacgatcttcgttccaaggcttcttatcttcgttatgatcttaacacaatcatttcctccaaacccaaggatgagaagaagtcactcaaggatctcaccaccaagctcttcgataccatcgacaatgtaagtttctcatctaacttcgatcaccatctatcaagattttgtaatgtttcttgtttgtctgatcgaaagtttgtttatgattgattctccggcagctggattatgcggcgaagaagaagagtccttcgcaggctgagaagtactatgctgagacagtctctgctttgaacgaagttcttgccaagcttggttaagcattttaatttctgcatttttcttgtaaattattattcttggtttttgttcttgagtactttagactcaaattcgtgaatctgaatttatgtttcacgttttcaccaagtaatggcaatttcttgagtatgcgttagctttgtttgcatggtgatttagcaaacaacaacataaagtctattcgtacagttcttaattcagtttcatttataaatgacaacaccaaagtattagggtgaattataaaatggatcaactctttcattgaaactacaaaataacgaattgaatttgaataaaacatttctagctttaatttcactatagattgtccaatagtattaaataactctgttgaaaatcaaaattgtacatttttaatctagtgtcttacaagttacaacaaaactttccatctatttcagggtttaagctaacattgtttactttagacaaactaaatggatctattcgtggaagctcattggtttattttaatacttctacactatattgaattccattctcataaaatacgaattatgaaaattaagtaaaaaattatattggagatctccaccatggtgaaacaaggttcaaaaccgaatcaaaaagaaaatagactaaccgaaaacaaccaatacttaaaccaagcttggtttgatgtggcagcgattttacttaaattgggcctaaatactcaaagaggcccatgtttatgttttgcacgtgtgtttgtagtcttcgtctgccctaattccccgcgccattttcccggttacttctccgtcgccgtcgtcggcaactcgctgacttagtgagtccccggtgaagagatcaactaatctttgaatgtttgcttctcatttctctatttcaccaaaaagactatgagtatctcctcagtcgctaagcgcttcgcgccagcaatcgctccgtacaaaaaatcccttccattgagaaattcgtctcgatttctcgaagaaactatccctcgtcgacttagtttacttctacaagcttgctctaacccaaatcttcttcgacaaggtaagcaagttcacgcctttctaatcgtaaacagcatttccggtgatagctataccgatgagaggatcttggggatgtatgcaatgtgtggtagcttttcagattgtggtaaaatgttttacagactagatttaaggcgtagtagcatcaggccatggaattcgattatcagcagttttgttcgaaatggtttgttgaatcaagctttggcattttacttcaagatgctctgttttggagttagtcctgatgtatctacgtttccttgtctcgttaaagcttgtgttgctttgaagaattttaaagggattgactttctttctgatacggtttcttctcttgggatggattgtaatgagtttgtggcgagttctttgatcaaagcttatcttgagtatggaaagatcgatgtgccgagtaaattgtttgatagagttcttcagaaagattgtgttatatggaatgtaatgcttaatgggtatgcaaagtgtggagctttggatagtgttataaaagggtttagtgtaatgaggatggatcagattagtcctaatgctgtcacctttgattgcgttttatcggtgtgtgcatctaagttgttgattgatctcggagttcagcttcatggtctagtggttgtttctggggttgattttgaaggctctatcaaaaactcacttttatctatgtattcaaaatgtggtcgttttgatgatgcgtctaagttgtttcggatgatgtctcgtgctgatactgtgacgtggaattgcatgatatctggatatgttcagagtggattaatggaagaaagcttaacctttttctatgagatgatttcttcaggtgtcttgcctgatgctatcacattttctagtttgcttccatcagtttctaagtttgaaaaccttgagtattgtaagcaaattcattgctatattatgagacatagcatatcgttggatatcttcttaactagtgctcttattgatgcctattttaagtgtaggggtgtttctatggcacaaaatattttcagtcagtgtaactcagttgatgttgtagtgttcacggcgatgatctctggttatttgcataatggcttatacattgattctctggagatgtttaggtggcttgttaaggtaaaaatcagtccaaatgagataactctggtgtctattttacctgtaattggtattttgttggcattgaaactcgggagggaacttcatggtttcatcatcaagaaaggtttcgataataggtgcaatattggatgtgctgttatcgacatgtatgctaagtgtgggagaatgaatcttgcttatgagatttttgagagactctccaagagggatattgtttcgtggaattc

SEQ ID NO: 606 - DNA, 89219 bp, Arabidopsis thaliana
cacagtagatgcttctgctcctcaaactctgtcctagtaagagatactgatgcatctgccatctgtattcacagttataaatatctatcaaattagctatttgaaatcaagagcatctgaaggtcatgtacatcattaacttccgagataaaattgatcctcctggtaccttttgcctttcattggcgattgctaattgctgctctaacatatttaaacgctccttctgcaacgaacatgtctcctgcagggtaaaactaaatatgagacaggaatgcgaaaaatgcacaactttgaactgacatccaatactaaaacaaaaaaagtactaacctccaacgatcctgattttgctgtcaagatgtctagctcttgcgatgactttccgacattctcctggtacttcctgatctcctcagacagcttctgtgactgtacaacttggcgatcacggtcatcccggacttgttggagctcattccgaagattagtaacttccgaaagcaatgaatccttctgttttatagcgtcatcttgcaacaccttgatcacaaaaaaaggaagaggaacaagttaagaagaaatgagaccaattaaagttagcacgcgacagtaaggccagtggtagagaagaaaaacttactctgcttgaagatagttgatcctgcagcgacttgctgtgtcccctaagtgtactaagattctccaggatgcttgacttctctttttcagcacgtgtgagtgcagctcgaactgtttcaagatcagtctgaagtttgctgttatattgttgcaaacttgtgttgtactcttgcagccttttgtacatatcctcaagtgacgtcacctataaacacaaaacaatttccatattaactaacagatcatgtggaactaacacgagaaacagaaatgaaacacctaagaaaacaccagaagacatatgttatataccttctgcttggcagccattttctcttccttaactttatcaagttcttctccgagagaagcctgcactttttcagctgcaactctagcttctttttctcttctatgacattcaatggcgtcctagtgttcaataagtaagaggaaagcaaagtcaagtaatgaatttcattaaaagaaaacattcacaattagaaaaaccaggcaccaaaacccttgcctgtgtactagactcctcctttgcaagcttttcatgtagtgacactacattctcttccaactttgagatagtggcctgtagctcttcctcttttgtcctagcctccaactctataagagtcaaaaagttagggactaccaccaaatgagtgaataacttgtttcatgtaaaaaaatcgcaagaagaaaataacctttgtggttgtatttttgttctgaagattccaaagaaaccttcaaattttccttctcttggacatgggtttcatcagcttgttggaaccattttacacaaaccttcagcctcttgataatatccgtcatttgctcaatcttagcctgcagggacagagacaaaaaaaaactccttctgagtgaaaccataaatgaaaacatctacaatgcttagagcacagagcaagtgtaactcaatcaatataccttagtatcaaactttccagcttttgctctctcactgagcaacgccaatatttcatcttttgtaaagtcaactttaccacattcttcaatgctccctacatcgctgttcatcgtgacatcttgtttattcacagccgaaaaagcttgtcttctcccagtacctccttgcgtttccactttccttcgcttgtcaaatgaaatgccaccgagaccctcctttttctgaaattgaatcaaaagccacagatttttcatcagtttcataacaaaaccaatatccagctacaagaaatgtagaatcccagaacccacgaccactctaaattctattgataacacccatcagagtaagaaatgcaaagccgatgaagataacaccttaataaattcatctggtaagctcacaaacaaaacccaaaatgcgaaattaataattcgaccagtcctagggtttttctcaaacccatcctccagaacactcaaaagtgacgacgaaatgtagtggaaaagcatgaaaaagggagcttacggcgtttggactgcgaggaggacgattctggttgcgagaagccatctccgagactcaaaattgctacaaatttcttctcctttcgctcgtcaagtgcataaaaatcccaaaatggtagtcttctccctaaattcgggttaccgacaataaaatctccgattgattctcaagatcttagagaatcaaatcgaaaaccttctcaatcgaagtcgagaaactaggattcttactttttcctaatttggggatttttgtgtgtgtgtaagtgtgtgactgaagcaggagcctgtagtttcgaaattcgaacgattttgaaattagatgtggcggacttctggaattatcataacgttatcaatcaataaagtatttaaacatatgggctaactttgggcctacaattcggcccaaatgtttaaataatcttgccacgtggctttaaggcggacaaaaatgacacgtggttttatatgagtggctacaaccatatccaagttatctaaagtacagataaggcgctctgtgtcggagaatgaaaccaaccaatcatataagcataaccaataatcatcggcttcaattttcgtcttgagaaagaaaaacaaaatggcttcgatgggtggattacacggtgcatctccggcggttcttgaaggaagcttaaagatcaatggctccagccgtctgaatggctctggaagagtggcggtggctcaaaggtctagacttgtcgtcagagctcagcagagtgaggagacttctcgccggtccgtgattgggcttgttgctgctggtttagctggtggctcgtttgttcaggctgtcctcgccgatgctatttcgatcaaagttggccctcctccagctccttccggtggccttcgtaagttaactaacaaactaatcttccaatatgatattcattctcattgttaatgagattaggaatttaaacgtgatttaagttatgtagatgaaaaaaccataaaatgtagtctttaaatgtggatgtttttgtataagaatataagagactccataataatcaagcatgtgtatgaatgtttcattcggatttgggttagagttcataataagcaagcaaacatgtgttcgagttagttcttatatcgatttttctggtataaacacacttaactcgatctctatatgacatacgacggtagatatataacacttacacattgttttatgttttatgaggtgacaacaatttgttttgtttggtgagcagctgggacagataactcagaccaagcaagagactttgcattggcattgaaagacaggttttacttacagccattgccaccaacagaagctgcagctagagccaaagaatctgcaaaggatatcataaatgtgaagccattgatcgacaggaaagcttggccatatgttcaaaacgatcttcgttccaaggcttcttatcttcgttatgatcttaacacaatcatttcctccaaacccaaggatgagaagaagtcactcaaggatctcaccaccaagctcttcgataccatcgacaatgtaagtttctcatctaacttcgatcaccatctatcaagattttgtaatgtttcttgtttgtctgatcgaaagtttgtttatgattgattctccggcagctggattatgcggcgaagaagaagagtccttcgcaggctgagaagtactatgctgagacagtctctgctttgaacgaagttcttgccaagcttggttaagcattttaatttctgcatttttcttgtaaattattattcttggtttttgttcttgagtactttagactcaaattcgtgaatctgaatttatgtttcacgttttcaccaagtaatggcaatttcttgagtatgcgttagctttgtttgcatggtgatttagcaaacaacaacataaagtctattcgtacagttcttaattcagtttcatttataaatgacaacaccaaagtattagggtgaattataaaatggatcaactctttcattgaaactacaaaataacgaattgaatttgaataaaacatttctagctttaatttcactatagattgtccaatagtattaaataactctgttgaaaatcaaaattgtacatttttaatctagtgtcttacaagttacaacaaaactttccatctatttcagggtttaagctaacattgtttactttagacaaactaaatggatctattcgtggaagctcattggtttattttaatacttctacactatattgaattccattctcataaaatacgaattatgaaaattaagtaaaaaattatattggagatctccaccatggtgaaacaaggttcaaaaccgaatcaaaaagaaaatagactaaccgaaaacaaccaatacttaaaccaagcttggtttgatgtggcagcgattttacttaaattgggcctaaatactcaaagaggcccatgtttatgttttgcacgtgtgtttgtagtcttcgtctgccctaattccccgcgccattttcccggttacttctccgtcgccgtcgtcggcaactcgctgacttagtgagtccccggtgaagagatcaactaatctttgaatgtttgcttctcatttctctatttcaccaaaaagactatgagtatctcctcagtcgctaagcgcttcgcgccagcaatcgctccgtacaaaaaatcccttccattgagaaattcgtctcgatttctcgaagaaactatccctcgtcgacttagtttacttctacaagcttgctctaacccaaatcttcttcgacaaggtaagcaagttcacgcctttctaatcgtaaacagcatttccggtgatagctataccgatgagaggatcttggggatgtatgcaatgtgtggtagcttttcagattgtggtaaaatgttttacagactagatttaaggcgtagtagcatcaggccatggaattcgattatcagcagttttgttcgaaatggtttgttgaatcaagctttggcattttacttcaagatgctctgttttggagttagtcctgatgtatctacgtttccttgtctcgttaaagcttgtgttgctttgaagaattttaaagggattgactttctttctgatacggtttcttctcttgggatggattgtaatgagtttgtggcgagttctttgatcaaagcttatcttgagtatggaaagatcgatgtgccgagtaaattgtttgatagagttcttcagaaagattgtgttatatggaatgtaatgcttaatgggtatgcaaagtgtggagctttggatagtgttataaaagggtttagtgtaatgaggatggatcagattagtcctaatgctgtcacctttgattgcgttttatcggtgtgtgcatctaagttgttgattgatctcggagttcagcttcatggtctagtggttgtttctggggttgattttgaaggctctatcaaaaactcacttttatctatgtattcaaaatgtggtcgttttgatgatgcgtctaagttgtttcggatgatgtctcgtgctgatactgtgacgtggaattgcatgatatctggatatgttcagagtggattaatggaagaaagcttaacctttttctatgagatgatttcttcaggtgtcttgcctgatgctatcacattttctagtttgcttccatcagtttctaagtttgaaaaccttgagtattgtaagcaaattcattgctatattatgagacatagcatatcgttggatatcttcttaactagtgctcttattgatgcctattttaagtgtaggggtgtttctatggcacaaaatattttcagtcagtgtaactcagttgatgttgtagtgttcacggcgatgatctctggttatttgcataatggcttatacattgattctctggagatgtttaggtggcttgttaaggtaaaaatcagtccaaatgagataactctggtgtctattttacctgtaattggtattttgttggcattgaaactcgggagggaacttcatggtttcatcatcaagaaaggtttcgataataggtgcaatattggatgtgctgttatcgacatgtatgctaagtgtgggagaatgaatcttgcttatgagatttttgagagactctccaagagggatattgtttcgtggaattcaatgatcacacgttgtgcccagagcgataatcctagtgcggctattgatattttccgtcaaatgggagtttcaggaatctgttatgattgtgttagtatttcagctgctctctctgcttgtgcaaacttaccttcagaaagttttggcaaagctattcacggtttcatgataaagcattcacttgcttcggatgtatatagtgaaagcacattgatagacatgtatgctaagtgtggaaacctgaaagctgccatgaatgtgtttaagacgatgaaagaaaagaacattgtttcatggaatagcatcattgctgcatgtggaaaccacgggaagctaaaagattccctctgtttatttcatgaaatggttgaaaaaagcggaatccggcctgatcaaatcacatttcttgagataatatcttcttgttgtcatgttggagatgttgatgaaggagtccgcttcttcagatccatgactgaggattatggaatccaaccgcagcaggagcattacgcttgcgttgtggatctgtttggacgagctggtcggttaacggaagcttatgaaactgttaagagcatgccgtttcctccagatgcaggagtttggggaacattacttggagcctgtcggcttcacaagaatgtcgaacttgctgaagttgcttcaagcaagttaatggatttggatccctcgaattctggttactatgtgttgatttcgaatgcgcatgctaatgccagggaatgggaaagtgtgacgaaagtacggagtttaatgaaagagagagaagttcagaaaattcctggttatagttggatagaaatcaacaaaagaactcatttgtttgtttctggcgatgtaaatcatcccgagtcttcacatatctattctttgctaaattcgcttctcggagagctgaggctagaaggatatattccacagccttaccttccattgcacccagagtcatcgagaaaagtatatccggtttcaagattcattgagaaagaaatgagagatccagacaaagtatagaaaaccaagtatatatctcttttagacaagtttaaacattgggttaaatttatagaaaggaaaaaacgggtagaaaatttttcaagcgtggcctgcgcttgtctgttctcgtgttgaagcagttgcagagatgtaataagcaacagcaaagaggccgtgaacgaaacagaggatccctcctatggacagaacccgatggtgtgatatcccacagttttttctcgatcttgagtttgccatcgtccctactatcaacatcgaaaatgcaatcgccaatatgatcctgagacaaacaaaaagggatcttaatcaaatctctcggtagatttacagttgttctgtttatgtcgtgttttgacttaccacgtgaatatcagagaagccacagcgagctgtttattggcagaggatttttcaaggtcttgtcttgaggcaacacagagacacccaccaagaaaattagccgttacatgggctaacaccaaaaggatgcacgcagctaaaccgtacttgaaggctgtgtaactcgggtctctacactcgaatatccacatcttcaaatgcttcacctgcacccgaaaataaacaaattagtgaaatctgcatctcctatcgacttgtggctgtgtaatgtaccttgttctgagctatttcggcttcaatgccgagaattccagccgaaacatccatggctaggatcaagatgcagatgaagaaccctacattcctcgccattgtcgatgaaacaagttcttactagcaaacaaagaagcaggaagtattgttgttgaagtaataacttgttcttgtaatttataggcaattagagttttaagctttgagagactctcttcgttggatggaataagaataaagttcaacataagtttccttttcttgcatttgtactaaagatcatgttaagagaataaaatttagctgggatcctctctttttcaggagaaaattttaacttttataaaatcatatttgatgtttctgaggaattgaagaagtttattagtaatgtgcaatgtcctcgaaaagatttgttttctttattcctctcttccattccatgtttaataataaaaccttttcaatattcgattcttgacagagcagccaagcaaagaagaggacgtttgcgttttgaatcgctgttgaagacaaaaatttcgttttccagtcgctctggcccaataaatttaagtgggcctttacagagacttatcctaaatcccgtctcgttgatgataatgacgtggctacgtacaaaagagtaacaaattcgagaacatgacgtggcatatttctctagaagcagctccattcttcgacttggacatttgtcttcttaaaagttttcgagaaatgttcgattcttcgagagttcgaattctcaggagaagaagaagaagaagaagtgaacagagaaaatggcggcttactacagatggaagagtttcgaggagaacgaagatcgtccagagaagcctcgccgttacggtgttacggagatgcgaggtcctcattactccgttctcagccagaaccttcttcaggtccctacacgttaattattccggttatgattcacaattttgcttgagattaaaccgaacatttagcggatttaggctcttacaaatttggttaatcgttttgttaggaaatttttgaatcgatgggacagtttgttgatgggttaaagttctctggaggatccaacagtttgattccaaaatcattcatcaaacaagctattgaaatggctcatgaacatggtgtttatgttagcactggtgattgggctgaacatatgcttcgtagtggtccttcagctttcaaagactatgtggaggtaaaaatctttgacattccataggaaatggttggtattggagaagaattaggtttttgtgaggttaaattgtgttttatggcgcaggagtgtaagcagttggggtttgacactattgagctgaatgcaaatttgcttgaagttcctgaggaaactcttctacgatatgtacgtttgattaagaacggtggtctcagagccaaaccaatgtttgctgtgaaattcaacaagtctgatattcctggtaggaatagagcatttggttcctatgttgttccagaacctcggtcaagcggtaagaagaaacaactaggagttatttgttggatttgcagtgagagtttcagatttatatgcttactgtgagaatgcctttgtttcacagagtttgtggaggacatagatctcttgatcagaaaggctgaacggtgtttagaagccggggcagacactattatgatagatgcggatgatgtctgcaaatacgcggattcccttcgagcagacataattgctaaagtcataggacgtttgggaatagagaagactatgtttgaagcatctgatgcgaagttggttgagtggttcatcaaacgttatggtccaaatgtatttgctgatactctagtcctctctattatttttaaccttctgtttgaatggtcaccctcacaagattcatatctcttcgtcttggtttttcaggtgaatctctatgtggatcattctcagattatggatctcgagtgcctccgtggtcgtcatctgggtaaagatcaccaatctgttctcagttcctcctacttcttgttttaaagtagtagctctcgcactacatctagtgttgtgtgaatttcctatatatgtattatgtcgtatgtgtctgatgttatgtgcttctttgatgctgtaagaatgcaaatgttttgagaataatgtgatatgcgatttttcggtgatcacataatatcttggtccatctcctaagttaagtctctcagaattgatacaacctagtatagtaataatcgtaagccttggttgttctcgtatgtcttatattattaagagttttactcactgaaacacgtgagcaataaaataagctgttcattatcctttaagttatgaacccaagatatcaattctgtaaccatgctttgtactattttgatagaaacctctctgtaatatcttttgaaaatagagaagactcataaattcctaccaatcataatcagtggcctaattttaccccaacacatgtgtcatgatgaaatttcagtatatttttttgcaactattgtaaccatagtcatcataattatattctaaatatagcttgtgcctaactgtcatatgacaatagcacctattttcgtacgttgatttttgtgcttgttagtagttacaacgtttatttactgcaagatacaatcagtatgtgtattaattggttattctgtcattttttggagccaaagtttgttaatcagtttagcttaaaaagtaaaaacaatggagatctatctataaaacaaggaaaatcttttgagaacgaacactttcgttgaaaaatgattcaaactttgaaaacggatagttcttttagattgtgctttgcagctatagcatttggttttgtgtttataatgaatggaaagctaagctctggaacaacaccccacgaggccgatcctcctcaggcatcaaacttggcattgtctccagaggctgctcctccagacactgctatggacgatgcctctggtataaattttggacctctcccaccatttgtccccgagttcccggtatgtactcttaactgttttagatatgtgaggaacattttttgttgtaattgctcattggttcattatctttctgataataataggtttatatattttacttgggggaaaggaaacacgatgatcctaatttggtgactcaatcacatcttgaaatcctgaaatcggttcttggaaggtaaaagagtagttgcattgaatatttttggttgtataacttgcttctaaggtggttactgcattaattttctggtttgaatcttgtgttacagcgaagaagcaaccaataagtcaatggtctacagttatcaccatgggttttctggctttgcagctaagctcaaaccggccgaggcagagaaattgaagagtaatgttctttatctcatatttctcgcttgctcatgagttcttaaagttccaaaacttagaatgtatttttactaagctattttctatatttctgtctactagagcatcctgaagttattattcttctggaaaaccgaaaacttgggttgcaaacgacacggacatgggattacttaggccaattttcaactccaacttcttctaaaagtcttctacatgagaccaacatgggcagtggtgctattattggtgttattgactctggtattatatcaatatctctattaggttgttttgttctcaacttttcttagcagaacgttaacaaatccgacattatatgagcaggtatatggtcagaatcaggctcctttgacgatgatggatatggaccaataccaaaacattggaaaggacaatgtgtatctgcagaccagttcagtcctgcagattgcaacaaaaagcttattggagctaaatactacattgatggtcttaatgcagatctggaaacaagtattaacagtactacagaatatctatctcctagagatcataatggccacgggactcaagtatcatccacggcagctggttccttcgtttctaacatgactttgcttggtctctcctctgggtcaatcatgagaggtggcgctccaaaggcgcacatagctatgtataaagcatgttgggatgtggaaggagggatgtgttcagttgctgatgtctggaaagcttttgatgaagccattcacgatggtgttgatgttttgtcggtttccgtcggcggctcggccctgaaaacacttgatgttgaaatcgacatcgcaattccagcattacacgcagtgaataaaggtattcctgttgtttctccagctggtaacgaaggatcccgctcttcatcggttattaacgtttctccatggatattaaccgtggctgcgactacccttgaccggtctttctccacattgatcacactcgaaaacaataaaacatatctggtatatacaagatataatacattttaacttttaaatctcgaatgatccaaagcttgtgattcatggtaaagttgcctttccatgacctgtttttcagggtcagagtctgtacacaggaccagaaattagcttcacagatgtgatttgtactggtgatcatagtaatgttgatcaaattacaaagggtaaagttataatgcacttctcgatgggtcccgttcgtccgctgacaccggatgttgttcagaaaaacggtggtatcggtctaatttatgtgagaaatccgggtgatagtagagttgaatgtcccgtaaactttccttgtatctacttggatatggaagttggatccgagctatacacctacatccaaactaggaggttatttatcttttacaaactttgctcggtcaaattaatatctcatcttcttgcatatgagaatctgaattgctgttttcttgcagctcaatgaaaattaagataagcccatacaagacaataattggcgaaagtgtagcaagtaaagtcgcaaagtcatcggcaagagggcctagttcattttcacctgccattcttaaggttttgtttccttcatctcttattccggatcactaaatctatcatctatgttttattcttcaactaacttgtttgtattttctctgtaatgcagccggatatagcagctccgggtttgaccttgctaacacctagaataccaacagacgaagacaccagagaattcgtttactcaggaacatcaatggcaactccggttattgcaggaatcgtagcactcctcaagatatcgcatcctaattggtctcctgctgtaatcaaatcagctcttgtcacaacaggtttggtttaatttatgtctctctaaaactcttttctcaataagaacactgcatttaaaacgtaaaactctatgtctttcagcaatgaaaactgatccatacggcgagcgtctgactgtagatggagggaactataaggtagccgatgcattcgattacggaggaggtcttgtgaatctggagaaagccacagatcccggtcttgtatacgacatggacatcaatgattacacacattacttatgttctcaaactctttacacagacaagaaggtttctgctctaaccggaaacgtcaataacaagtgcccgagctcaagttcatcgattcttgacctcaatgtaccgtccattacaatcccagacctcaagggaacagtcaatgtgacccgaactgtgaccaacgttggacgtgtcaaatcggtttataagcctgtgatagaggctccattcggattcaatgtcgtggtttcgccaaagaagttgaagtttaacaaaacaagaaacaagcttgcttttacggtaactgtgtctccaggctcacatagagtgaacactgcgttttactttgggagtttgacttggagtgataaagttcacaatgtcacaattccaatctctctaaggacacgtttcatcgataattttttcctgtaaatctgtaatttgtttaaaccccgatgattaacaagttcatgttttctcggcattcatgtatttactctccagttagtggatccgcgctatgaatttttttctaacaattattgttgctaatattgtccctcacaagatatatagactttagttcaatatgtaattcaccgttttactatttctgcatgcttttgaatcgtgtaacagtagcacatgattaatgcattaaaatgaattttgttaattgaaaacgtgatttgtaaacagaatccaaacttggccgaatatggaaaagaataaaaatggctaaataaaaacagcgaattgatgaaataggtaaaattgaagaaggttactgcgaattgatgaagaagcatcgaattccagaaaagacacgaaagagattactgcaaatgttgctaattcgtcttcgtcgtcgatcatcattaacctaagcttctctatttcctctctatcttttttctctattttcctttttgttattgaaataattgcgaacgtaacctaaatttcgaggtatctaatttgagatcttgttaatagttcgaaattaaaccctaattttgttgttgctagctccttctactcattcaaatttgatttcttagaagaaaaaaattgatctttttttgttcttctaatctatcggtatgtcattgtaatcttatatcccataaatagattttacaaatgcaagtaaataaagtaacgggagatgaaatttttggttaagagctgttttcagtaacagccccaaaattagcaggaagaaggacatgttgtaaaactgataataaaactgtcttctgtcaaaaatggattttgtctcgtttaaatctatttggacatttgttttttttcgttggattattttaattgttgtttgtgattattgtctattgtgagcaactaactacctgctaagctgttcatgtctatttgttgttctgtaagttttttcaacaccataaaatccaaactttaaggcttaaaccaaggaggaaaacaaaaaacaattcttcccaaagaatattgggaattgtgaagggaaggtccagagctggtctctttattggattcttgttcattgtaaatgttgggttttgtgtgtttgctcaagaaagcagcaatgaggagagaaaggtctgtttaaatggtttctgtctttgttcttaagtttcgaccttgttgtgttatgtttgctcaaaattgtgactgatagatgaaacgtgttttgttttgtttctgattgtggtagatatatgtagtgcatttaggcgtgaggcgacatgatgattctgagttggtctctgaatcacaccagaggatgttggaatcggttttcgaaaggtatatgacaaaaaccgagttcttgatttcgcttttctgatgatgatgtctcatgtttttcgagctaatgattttgtattgatgatgaagcgcggaagctgctcgagagtccatcgtctacaactaccaccatggattttccgggtttgcagccaggcttactgactcacaagctaagcaactttcaggtttgttttttagtatatcaaccaagtaaattaagagcccttgtgaagccttgttatacacatcttctgacacattttctggtttttctatgggtttgtttcatgtttatatccagaccgtcctgatgttttcagtgtcgcaccaaatcgaaaagttgagttgcagagcacgaggatttatgattatttgggtctttcgccgagttttccctcaggagttctccatgagagcaacatgggaagtgatcttgtcattggttttcttgactcaggagtatggccagagtctccggcttataatgacgaagggcttgaaccaataccgaaacattggaaagggaagtgtgtagccggagaggattttgacccagcaaagcattgcaacaagaagttagtaggagcaaagtacttcactgatggctttgatgagaacaattctggaatcagcgaggaggactttatgtcccctagaggttatagaggacatgggacgatggtctcttcaattgcagcctcttcatttgtgcctaacgtgtcatatggtggccttgcacctggtgtcatgagaggcgctgctccaaaggctcgtatagctatgtacaaaattgtctgggatagagcacttttgatgtcatccactgcgactatggtcaaggcatttgatgaggccataaacgatggcgttgatgtattgtcgatttctctcgcctctgcggctccttttcgcccaattgactctattacgggagatttggagcttggatcattccatgcggtgatgaagggcattccggttatagctggtgcctctaatacaggccccgaagcttacactgtggctaatgtattcccatggatgctcacagtcgctgcaactaacatagaccgtaccttttatgcagacatgacttttggaaataacattaccataattgtatgtgaaatgttttttcaggtcttttcaccatcgggtttcactagtcttggaaacttactcttttcccttaaaaactgtttcagggtcaagctcaatatacaggtaaggaagtatctgctggtttagtttacattgaacactataaaaccgacacctctagcatgctgggaaaagttgtcctgacgtttgtgaaagaagattgggaaatggcaagcgcattggcgactacaactatcaacaaggcggcggggctgatcgtggcacgaagtggtgattatcaaagtgatattgtctataatcaaccattcatctacgtagactatgaagtcggagctaagattctacgatacatccgctcgtcaaggtatactatcctttattttatattttttgtgattgatcatccttccgagtcacatagagtatgtaaaactgatcatcttcttatggcttgcggtctcttcagttctcccacgattaaaattagtactggtaaaacgctcgtaggacgtcctattgcgactcaagtttgcggattctcatctagagggcctaatggactctctcctgccattcttcaaggttctttccctaaacagtgtttcaaaatcttgtctgtcgtttccaatttaaggatcacctgttaatgatggaaatttcttggggtttataaatgatgcagcctgatatagcagcccctggtgtgacgattttaggagctacatctcaagcctaccccgattctttcggcggttattttctaggcacagggacatcctatgccactcccgttgttgcggggctcgtcgtactactcaaagctttacaccctgactggtctcctgctgcgctaaaatctgctattatgactacaggttcttgaaaatggaaaaccactttcttctcctcaccagaaaaccaccattcgttaatttaatcttaccagagtttcttctcttgttattatagcatggaagactgatccatccggggaaccaatctttgcggagggagaaccacggaaactggctgatccatttgactacggtgcaggactcgtgaacgcggaaagagccaaagatccaggactagtttatgacatgaacatcgacgattacattcactatttctgcgccactggttacaacgatacatcaatcactataatcacgggaaaacccacaaaatgctcgtctccattaccgtctatcctcgatcttaactatcccgccatcacgattcccgaccttgaagaagaagtgaccgtcacaagaacggtgactaacgttggacctgtggactcagtttacagagccgtggtcgagcctccgcgaggtgtggagattgttgttgaaccagagactctagtgttctgttcgaacacgaagaaacttgggtttaaagttagggtttcgtcgagtcataagagtaacactggttttttctttggtagtttcacttggactgatgggactcgaaatgttaccattcctttgtctgtaaggattcgtgttttgaacccttgaataagaagattcctcaattcgtcataaattgttttttctctctataatgaaaacaaaaattgttattttagtctctgtatttgactctaactgaaatcacattcacttaataacaaactgagactaagattctctcttttattctctctccactaacagacttctatctacatgagaagcaactatataactcatgtcttttaccaccattacataaataagaatataaacacttttgtctgaaaaattatcaaagaagaagaaataaatgggtggaggaagcagatttcaagaaccagtgaggatgagccgtaggaaacaagtaacaaaagagaaggaagaagatgaaaacttcaaatctccaaatcttgaagcagagagacgtagaagagagaagcttcattgtcggcttatggctctgcgatctcatgtccccattgtcaccaacgtaagtcccaaatctcgattattattttatgggtattttggtgatgattgttgttgtttttgtttcgttttcagatgactaaagcaagtattgttgaagatgcgattacttacataggagagcttcaaaacaatgttaagaatctcttagagacatttcatgaaatggaagaagctcctcctgagattgatgaagaacaaacggatccaatgataaaacctgaagttgaaactagtgatcttaacgaagagatgaagaaactcggaatcgaggtttttaaaatttctctaatcgatttttgattcattttctttatctttcttgatgattttttatttttgggacaggagaatgtgcaattgtgtaagattggggagaggaagttttggttaaagatcataacagagaagagagatgggatctttactaaattcatggaggttatgagatttctcggattcgagattatcgatattagtctaacaacttcaaatggagcaattcttattagtgcctctgttcagacacaggaactctgtgatgttgaacagacaaaagattttcttttggaagttatgagaagcaatccataagtattaattatatacatcttggaaatttcttgatctaataacatttccattggtttttattacattgttgttccattttaaatatgatatgattcagatgaaaaagagtttgtgttacaagccaatgagcttcttcttgtcttcatatatgttgctgcaaaatgttcatgatcctctgtttgaggtcaaagaaagaaaacactagatattatctctaggatccgagcaatgggggtttctttttaaaatgggcttagaatgaattagctcttaaatgggccattctcaagttgagcccatttaatttcaaccatccaaatggtgagtagtgaatagtgatgttcatttgtgtaaggttggaagttggtagaaacctaagtttttttattcaaatatcaaaactattcaatagagccaaaatcaaaagacattttcctaacctattaactatttttttataaaaataataatatacctttatcatctctgactttccctactccacgacatatttgattaacaatataaaataatttatagtttccactctcaatgaaataaaacgatggaccgtttcctcatgtcaaatgaatcaaatcaacaatctctatatagtcttaagaatgttggtcttaaaattctattgaactcaaatcgtatgaaaacaagttaaattgtatataaacagaaaaaccagtgaaggttgattaattaataatttacttggttaaattcttcttattgaagttggtgtactgtaacctaagtcactcgaagtctacaaatatttaatatatctattgactaaaaatattaaaataatttgctgagtcaaaccatatgacatgagcacatattttgggaatctttctaaatttaaagatcaaacctaaaataacccaaatggattggaggggacggtctgacttaatccatttatacatttatacagttgtttgttagtgattatatccgaatatcaacaattcattttaataaatttcagaaagtaaaaatatatattttaatcatgtccattacaaaacaaaaattataattaaagaaagtcttcattctttggtgaatgcatatatggtatacgtcttattaactacttcttttcaaatagttgtattaatttatattttctgttcaattagggaaaaaaaacttatttcgataactctctttttgttgtcatatccatatataaagcacaatgaaactcaattaagtgtaatcctaattcctataagttatgatatcatttggagaggcttgaagcaaaaccaataagctattttctccaaagagcaagattgatctaaatccatatatttcaaaaaaaatttgtttacaatgtaaatccatatttgtttgaagtttttacatttttttttaaagagtcgacacgtaggtcagatatgcgcacgtaactgtgtacaaacaaaagacgtccggagtcgtatagatcaaaacgaggccagccaacaactacccttttgcgatggatttggtaacgctgactttcttttccttgtacgtattcatcgaccatcccaaaaatgagattattttttggacgacaaacatattctttctatattgacatatataactgtgacgtcatttttgtttttaattatttgaatcagtaaacccccaaaacagtagttaataaatatgcattgctatacaaatatacaatttgcaagtaaaataaataccatatccgtacgatgacttaattaaaaatatattcacattatttgtttaactaaaattttattacttttttccccttgacaagttaatacttcaactgcgttcaacacataaaaataaataaataaatatatatacttcaacatatatcaaacattttagtattaccatcccatatcaaagagtaagaaaagtagtaattatgatgatagtaagaaattaactctgttttacaatgtttgagaagatagggtcacaactcacaaactcacatgtacatcaaagtttttatttgattaaccaaaatcaaaactaaactttacattgtacgtacgttggtaaaaaaaatttgtcatcttttaattacttaatttgcttgacctaacttcctatcgactactctgataaacatacattatctaaataattaatagattaattagggaagtaccaataacatataaaactcttgtacaaaacttttttttaacaaatattataactttgttagttgacttaaacctcatcgctacatataaatacaatccccatcatcaacatcattactgtctcatgcaaactctgacacttacgaagaaataagtctacacaaactaaaccattgtctacgtaaccaacaaaacatgacagaagaattcgacactacgggagtttgtaccggaacatggtggagctcctccaacggcatgttctcaggctgttctctgccacgttccgcggagattgttgtcgattttggtgagattgaatggcaaaacattgatacccttgatgccaaaacttacaacgagaactaccttagtacttccacattcttaggcaatgcaaatcttgataccacatcacaaatctacgtttcgagtccatctaacatgtaagtccatttatcatcttacgtgacgtataacgtaaaatcatgatctttgttcctgaatcctgacattctttttcttttctcttttttaccagccatgaagaagaacgatacaatcagataaatagttttctagaaggattgtttgattctagtgagcaattattggttcctaactgtcccaaaccagaactattcgaaagctttcacttctttgatgacgttttcccgaacgaatcaagaatgatatcagtatttgatcaccaaaaacccaaggaagacatgcaagcttgcaagagtctgactacatgcaaggtgggcaaatctatttaattagtttcttttaatagagatattttacaatatttctgtagattttgacattgtgaccaattatttttagagagcaagtgagaaaagtggagaactcgaagatattgagtcatcacagccattaaaaaggccaagacttgagacaccatctcattttccgagcttcaaagttagtaacaaatgatcttactacagttttcaaggattgtcatttatcactaaaaaaagttagttatgctaagaaacacatacccatgcacaaactattgctgatatttttccaaaaactattttgattgataaggttcgtaaagagaaactcggagatcgaattaccgcgcttcaacagttagtttcaccctttggcaaggtttgtgttcatcatgaattcatgatctgttatattgatatctctactatatattatccatacataattacgaaatttttttagctacttctgttttcaaatttatttattattattttgtgatgatttttacagacagacactgcttctgtcctccatgatgctatagattacatcaagtttctacaagaacaaatcactgtaagttgataatctctcaaatatgaaatactactactaattaattgttggttttagttaactgttatatttattctttttataatcatttaaataggaaaaggtctctactagtccacacctgaactctataggatctggtgaacagaagcaggtacttaacttagttaacggttaaacaactctataatctaaaatcaattaagtagtttgatttttgttcttttgcttatgatcattaataagattctttcaatttctagtggtcagacaaatcaagcaataatactcataatcaaaattgtagtccaagacaagatcttcgaagccgcggtctttgtctgatgccgatctcaagtactttctccactcctccgcagcatttggacacatctagtttgtggaattagactcttatactgaatcaaaaatgtaacattagtacattacacatgaaaactcatagattagttttgttctaagaactgtaaagtctggtgttaatttgtgtataaaatgtgatgtctcgttccattacttcctacaaatttagagcctacttcgtggaatggccgaaagattagataatttgtgtttctttttttgctgttttatcaatcaatactattttattgagtatgttcactttttctgttatttttttattttttggtaaaccacttattctgtcatattaaagacaaaaaatttttaaaaaaattggtcttaatttaatgatttattctcacaatatcgtgattccactacacattatttaatttccacactctgtaataataccagtcacagtcagaatcttataaaggtatatagaatattgtggatttttaaaaaggattaggaagacaaattagatgattttttgtcaactataaattaggtaattaatatctccattaaggagatctttaattagaaaaacaatcactttaataaagcagctcttttcatagtactcaaaggctacacacgactctgtcttgttttgtttgtgtgtcctcaaatcaaggcatatgattgaataagaaacataaagcagtgatatttcagcactgttttctataaaaaaaagagcacgagtgttaaaaaaaaaacaaataacccatctttttgtgaaggaacattaaatcattgtggagagaattcaacagagaccatgtgcttttggtacgagcacgccacaactgaattgaaaacaaaaacctaaatcgagtagacatggaatcataaagtacagttactggtttgtcccagtgactattgtagtaaaaaagacaggtttgtcttatggaatcatcacatttctttggagaataaagcaaaagaaagatccggaatattattttcttctagccatgaatgcttcaaccaaattgatcaatcaaaattctcaaattatttctgaatgtgattcaactagcaaacagtataaataaaatgctattactaatggcttttcatgtaaaagcatgggagaaaatgttaggcttgacgatttgagatgatttcgcggacaagaacacttgtaacaaagggttaagattcaacagagaagggattaattaaatgctttggaaatgtaaagattacaattctcttgatgatgaacattttgaaacacttgaagaaaactattatgtatgatccttttattactataatgtacagagaaaacaaaaaaaaagcatttgcattttgctttgttgaaaacgtaagtctttgttttgttcttcctttcttttgtacatgaacactacaagtcgaaaatccaacacagagatcacccacacttacctccatatccagaccagataaacaaaaccacaacaactatcaacaccaaaaccgccaccgaagacaaagccccgatcctttcaacatccatttcctcacactcccaaaatcatgaactcattggaatcccaagtaaagtatgaactaagatagtagcattccttctgattttctcactctcattatcctcaaaaccaaagcatatctctacaacaccttctctcttaacctcatcaactatctctccgctacaacaacacaagcaattgaggataaacagagaatactgaatccctttcaaattcccattcctcaaaacgttaaccaaaacctcaacaaaaccacttactttactcatctcttctcttcctcctctacacttaaccaaaagtcccaacacttccactgctctctctaaccctgaatcagcagcttcaaccaaaataggcaccgacccacaatccacaacccgtttccgattatcgggaaacgagcaaagagcgtaaagagccgtagctgattcctttctctccctatcattccctacccggagaagagaaacaagagcagagattgcatcaggatatgatccaatagtagctttattcacttcaacaacagctaaactcgttaacagagtagcagcaatcgctttacaatccggtgacccgactcgtaaaacagtaacaatccgtcttatcactccatcagcgactaaaccaactttgttatcatcttctaaactaagattcaaaagcaaagacagagacttttcttgtaaaacctgattacaagagtcaacacaatccagagccgcacgaactgctcctgactcagtaactttcctcctgattgacgagtctcgcttcgtgagtcggacgagtcgagtcaaagactcgagctttgatgcattagacgacgattgagagacgagagtggagattaaagcttgggattgagagtgagagtgttcttgttgagttcgaggacgtgatgattccttaagactcacatgggcgaagtttaaaattaagctacgaagtgcgtgattgggaatcagataaggggtttctgataagggtagcttggtgattggacaagttcgattgccggagtcaatccattgttggatagagacccgatcgaaagtatgacccgattggaggataactgggtcggacatgatctcaagggagatcgggcatctgaaatcgtttggtaaatcaaaggccatctacacttttagctctttcgaggttttgaatgagaaagagataagattgagactgagagagaaagagtgagagaagggtttacaagattcttgcaggaacagagcagagaacccggaaaaaagacgcttgcttttctccgtcttagaaattaaaacagagagagagagagagaggggctcgtggacggtgaacctttttgcagcaatggctaccgtttgagatgacgaagttgccccttttgtttcgtggatgtccgggtaagggtattttgggtacagatgatatttactgtcctagaatttgaaaggacttttttatcttccgtcaagaattttgggtatgtcacacattgataccacagaaagtaaaaactttaatatgtttacgtaattacccgtcgttagacgtacatgcaaatatgcaatggcggattagaaaatgatattgattggggtcaaaacataaatttaaaattcagtttaaatatgtaaacatcagttcttaacaaaatcaacgaccatatatatgtatttcatagcaatgatcaaaattgttgtttcaaattgtcaatatatatcttgtctaaagttaatattaaattgataattttctccgctgcaactgcgtacatgcattaaatgtttaattttgtctgtattttacacgtaaacacaaacacacaattttcatgtttttatgcgtaattggttttttttttttttttttttttgttgggtgtgtatataatgtgataaacacagcttgcatcataccacataaacatatttttatgtgtttgcttataaatttctgtgttattatgctcttccctttaaatcagtttgtttccaggtacgcaccaaaagggtggtgatctagtggtacattcctttgtgccatggattcactccctttgtgatacggatatatattttttaaaaatcaaaaatatattaaacgttagttgaacaacaacaaaaatatattctcaaggtacgcaatattgatccttgattaaaaacactatacattatagtctaactattttttttagtcaaatttttcctctaataatgtggcattaaaaattattttctccttcgagtcttatacgtagattttctatactgttatttaacttgggcttaaaacaaaaaaaaaacttgggctaaaagtaaaattttctaataaagaaacatagtagacgaattatttttggttataacaaaggcaagctataacaaatgtcaaatattataattggagaaaagaattgcaatttgtcttagtttaacaaacccctacgtaactatacaaggattgaaatatattggttaaaggttaaaaaattctggcagattaaagtatattgttgtacaaaaatttcgaaaataggtaggatatcgagttatcgaccacgtatggaaatttaaaatactactaatcaacatgtcatccttatctgtatctgattcgaatattttggatatataaattacatatactgtatatgtgtgtgaatgtacctatatatattttaaccgtgtaagtatcttcttaaacaaaaatcaataataataaaaactaaaataaattgtacagtttatttttttccccttatagaattttacgatttacttgtatactgtatacaaatagtcaaatagacaactaattttctgaaaatatgttttttgaatttttatttgaaaaattcacaaaaaagtataaacctcgaaatagaaatttaaaatgagaattgtcattcttattaaagcttttatatatgcacttcttgctttttgtttcatccgcaattccgcatgctccaaaaattgggttcgtagaagaactttttaatagaaaacggaaatgaggttgaaacatcaatattcacatgtaaagttgtttttaattttaccagaagctaatttcttttaatttattttgtttttaattttacggtgttggcatgtctcataaagaataattgtttcgatctaaaatttattttcgaaataaactaaaattatctgttatatgttttccaataactcaactatgtctcacataaaaaaaaaaaaacatttttacctcaatgtatttcttctctttggggtattttatgatctccgatcccatcgaatttatctaattcactattttatataagcttagtaatatattttgccttttagtgtagactttgataattttcttactatttttggcaattgtttattgtgagcattgagcaacatatctgcttgatgttacgtaaatattctaggtgtattatttatgcgtaactacagatttaaaggttaaaccgtactatacgaacgagaataatatatcatttttttttatcaaaacataaaataataaccccaagaaaacccttcgagtcctattattataataacataaaatatatctttcttttaattaaaggtcttgtttgcattctttgtttccgttattaatttccacatgctcctatgaaaaattgcatggattatcatgaacctcttcaatggagcatgtggtaacaatggggaaaaagtatgcatttaaaactttaatggcgctggaaacaatattttttttttcaggtgtaagttttttttttaaataatccttgaagtgtaaattttcgaaaatgaagaaagttatatgaattaagggtttatttgtgttctacacacatattcatcgttaagtagttataccagccttaatttctttacaataacatgtaggattaaattagtacttgtacgatttaattgtatacattcgaaacagataattatttttagacaataggttattacatatgcattttttcttttaaaatttaaagccgtttattgacaactctttatttttggttgtcatatccagagccgggcgaacgttagcgagtatcggaagcgactaaaactaaagtgcctcaattttattttttaagtcaacaaaaaacaaacatcatcttcttcgttcaataaccgcttctttactttgacactcattaatattctcaaccacttcaccatttccgacattattgtcatgtttttatctttattttccacatattcatcaaaattttcaatttttgaagtacctgaataactcattttgttaagattttgctggttcgtcttttaggtctctttctttttattttatattgtcaatttcagaaaaatgatttttttgttggcatttttatgtagtagaaaaaataaacttacaataattacttgcaattttaatttgaaaaagaattggatgaaacatcactaatttgattttaatagaaataatttggtgaaataacgtttagataaaatatttctcatagtatcaaaaaccttagaatcaaaaacttgaccaaagacaaaagctcgacggacgacggaagatgtaaacgaaagcgaaagccaacaaatctttttttaaccctagttgatgtatatgtctacttatttaattaattaataaattagaacctctgttgtaaaattaaattgtagaagtccatatttttctaagatttcttttcattttaagtttcactgtttataacactcatatcctactatattatttgggaagtacattttaaatgtaaccttaatttttgtaagtaattacataggtatgccattagaaataaaattttaaagagtaaattaatttatctctttaaggattaaaaagtcaaatactaatttaattaattaaattaattaaaaaatgaaatacattattaatttccaaaaataatagccaatcaaaatcaacatataagatttgatatctaaattttaattaatttaatttaattagaaaaacgaaatacattattaatttccaaaaaagtaaccaattaaaatcaataaattatatttggtatctaaattatcatattaatttttttattaattattatatttcacttctcatctttatatgattctatttttacggaaaaataatatcatcattataaaaaaataattagagttttttcgcatatgccataatttgaatttttaaaaacgaatataaactgttcaatacatgaaataatataataacgggtgaaaaatagatttaagaaaactttctactgagtaacgggacataaatttgaaatatttatattcaatttcatacatattatattgaaaatttataatattatatactacaatagttaataacatattagatgtgattcaatttttaatacaagctggaaaatcttagaattgacgggtttagatcgatattaatacaagatggtatgctacatgtgaaactcttaaattaacaatcaaactacaagtgtataatcttaaacactaaacaatatagataatatcaacaaaacatatacaactcacagtttactatacatttaaaatcaaataaaataatatcatatatttttaaatcatctttataataaaagtttttagtttaactaaaatataagcctacctgcggtatactgcagattaatctctagattatagggcttattggaactaaagacgggtcatcaaagatttcctaaactgaagcaaaatatactgaatattcaaatatttatatgttaccaaattataaacaaataagtcaatttaatattttatatatgaaatcaattaaaattataatcacataaaaattagcacaaaaaaaagtattcaacaattaaaaaattatcaaatctctgtgttatataagttatgatactatatttgaataaagtgtaatatacctttttaatttgtattctttaactaatttaagctaactaatatatttgctaatcttatatctatcaaaaccgactatcgtttcttatctctatagtatttttgcaagacttttttggtggatttggataaaaatgcattcgggtcatatggtacattcccctattaaataaatatggtgcactcctatgttattagctaaaatatttagattataattcagagtcatatcattaataaaactaatattaataaaataaatgactttttggcaagacggatttggagggacatgtttttgaatcaacattaataaaaaagtaaaatataattaatccaccgtttcaatatgggttaaatctttaatttattattttttaagaccactaatattaaacatatcaaatcatcctaatttagaaaaaattatataaaacaaaaaatgttatgttgtatgtataatattactatatataaaattaaactataaaatataaatgtattagagaatgatacaatttgcaaaacttttatatataaaaaataattcttaaatttttaaaattactacttaaaaaaaaaatcatgggacgggtaaagaaattacagaacgtgttttattttggaattgggttatatggtggatgtatttgaatcaatatttataaaattttaaaatattattaatatgttgttttaataggggtcaaaacttcagttttttttaacaattgtctcatgaattcgtggtatagcgttacttaataacaattataaactgtaaaatataaatattttgtaaaaatataatttgcaagttttaatatatattacttttaaaaataaatcgtcccgcgatataccgcgggttaaaatctagttaatttatatattttagctaaggataaactacatatcactaataaatatatgtcccataatttgttttcaaaattgcatgccccaagcaacggcttttttttttctttcattgttgcacggctctggtcatatccatattttatctgattgctctatactgaacttgtatcggtttccttcgcatgatccagaaagtggtttcatagaaatacctttataatggatcatgtggtgaaaacagatataaagtatacgtttatggtagtcaaatgggtgtgataattacgggttaaaccaatataaattatgatggtctgattatgatcatgcctaaaatcaaaagcctatatatactaaaatccaatttaatccaaacacaaataggttgaactcatctgaacatagaccatccaaaaaactataaaaattaggatttttttaaatttgggagaaaatttattcctttcagcaaattaggatttactttatttacccatttagatctgaacaacccatttgacatggttggaggacgatgatacgaaaagaaactacctttgtcactgtgattgattagatatgagaagttgaaacgaagataagctgtgttgttacaactccgaacttcgattaaacgattctctcacaactctcaatcactcgtttgtactctcaagaacttgaatcacaacaaagagaaagaaaacagagcacacgcgtgatttgttacccagttcaacggatcgatgtgatcacgtctacgtttggggccgaatcaattcggcaattcactaacaacaagagatgaacaagtctcaagctcgagctcacaacaatggagtctctcagctttctgttacaacagaataacaaactctcactttcgaaatgaatacaaagaagaagaagaagaagactttatatagagtcaacttaatgaaaccctctctcgcgaaaagagtattccatttaaccagcttccaatgtgattcaatcgtcttctgtaaaccggtcttcaattctcaataaccaagcattaaaccgaatgcaaagttgaatcagaaccaaataccacaacactccaccttgattctacttttcatcatctcctagtgaactgcacttcatgaatttaaccttcggaaacaagacttaagagtcttacctttgtagctttagaacatccaaagcttcctcaaacttctttactggtatgcactttgtgagcatatctgcaggattcacagaagtgtgaattttcctgacctttacctcaccagcttctatgatgtctctgatgaagtagaacttgacttccacatgcttcgttctatcatggaaggcattgttctttgacaaacaaatagctgactgcgagtcacaccacacggttgcaggttttggctgcaatcccatgtcttctagtaaccctctaatccaaattgcttcctttacagcttccgtaagggcaataaactcagcctgtgtagaagacaaagctacaacatgctgtaaacttgatttccagctcacagtgttaccaccaactgtgaaaacatatccactgattgaccttcttttgtctaggtctgctgcatgatcagagtcacaatacccttgtacttcgagattagctcctttagtgaacaccacaagtctcttgagccctttaagtaccttagtaaccactttactgcttcccagtgcatctcaccaggtcgactcatgaacctgcttactaaacccatggcataagcaacatccggtatagttccaatcatggcatacatcacactacccactgcacttgaatatggaaccacttcaggatccacacttccaatctcatcaatgagtgatgttaacttgaagtgagctcccattggagtactcactaccttagcatctgccattctaaatctttgtattaccttgtcaacatatctcgtttgagataagcgcagagtaccctctttcctgtttctgataatatcaattccaagtattctgctagctgctcccatatctttcatttcaaatttaagactgagagcttccttaagcttgctaatttctgacttactcttagcagctaacaacatatcatccacatacagtagaagataaacaaactcaccagggttaacttctttcacataaacgcatgaatcatgttcacttcgagcaaactgcagactcaacatgaaagcatgaaacttcttgttccactgccttggtgcctgtttcaagccatatagagatttctttagtaaacatacctgatctttctctggatttacttcgaatccttcaggttgttccatgtaaagcacttggtcaagctctccatgcagaaatgttgttttaacatccatctgttccagctccatatcatctttcacaacagctgacatgagaatcctgattgaaatgtgcttgactactggagcaaacacctcctcatagtcaattcctttctgttgtgtaaaccctctggctactaaccgagccttatacctctgagcttcaactcctggaatacctggcttcagtttaaacaaccacctgcagctaatcactttctgctctttaggccattcaactatatcccatgttccattcttgagtaatgaatcaatttcttctttcattcctccattccatttaatccaatgtttgtctttctttgcatcatgatagcactgcggttcttctgactcaatttcttcagccataaccaatgccaaagcaaaatgggtatagtcggccaacttctgaggtgggtttggtgctcttctttctctgtctctagctgactgatagttactgagatcaatacttgcaatgagtggttcttgagttactgagttctctgaatcagactcttggtcaatttcttctatggtaactccacctgttttagaacactctccatgttctttaactgaaacctgaaactcattgtaaccttctaagtcactgatgtctttcacagactgttcactgctctcccttatatccttgtacacctgattttcattaaacactatgttccgactaatgacacacttctcttcatccaatagccacaccttgtaccctttagtaccttgtggatatcccaagaaaacaccttttagtgcccgcggttttagttttccttgatccaaatgtacatatgctatgcacccgaatcttctcagatgtttgtatcctggcttcttgtcgagccacaattcctcagggacattgtgatctacagcagatgcaggtgatctattcaccaagtaggctgcagtagcagctgcttcagcccagaaaacttcttcaagacctgactcattcaacaagcaccttaccttttccattaaggttctattcattcttttagcaacaccattttgttgaggagtgtaggtacacgttctatgcctctcaattccattctgcttgcaaaactcatcgaacttgagattgcagaactcaagaccattatcagttcgcagtatcttaaccttcttgtttacttgattctcaacaagctctttccattcacagaacctttcaaatgtctcatcctttgttttcaggaacataagccaaacttttctggatttatcatctatgatggagagaaaatactgttttcctgatagtgatggagtaacatttggtcaaccccataagtcagcatgaatgtatcctaaaacctcatctgtgatgtgctttccaacattaaaactcagcttcttagattttcccataacacagttctcacagaagcttaactccttaatgtctttcttttcaagcagacctttctctgctaagatcttcatgttatttaaactcatgtgtccaagcctgcaatgccacaactcagtcttctcatttgatccttcaacattacagttttcattaaccacagtgtgtccatccaagacatacaagccattcactaagttcccacacaaagcagtcttgttttccttgtaaaatctgactttaccatctccaccttcatgcttgtaaccaagcttgtcaagagtaccagtggagattagatttcttcttagattcggtacaaacctgacattcttcaataccctgatggatccaccatgagtattgactttcacagtgccacttccctttgactcaactgtgtgatcatcaccaagcaagatcatagtagtctcattttcattaaactcagaaaaccaatccattctagatgtcatgtgatatgtacacccggaatctatcacccatttgtcctttgcttcctgatcatacatactcaaagcttctgagtataccaacttttctgtaatcacacctgcttttccttgtccttcattctcaagctttctctttccagcatagcaatctttcttgacatgtccttctttcttgcaaaaccagcaagttagacgactcttagagtttgacctgccacgtcccttaccttgaccctgagtgttcttggtctgaggtctgcctctttcagcagtgtagagtgccgttgatgcgggtgctctaattgtttccttttgctcagacagttcacgttcaagtgactttgcagatgacaccacgtcttgaactgagagagtcttgttgccatacttcagagtatgcttcaattgaatatagcttggaggcaacgagttaagaatcaggattgcttgaacttcttcgcctacttgaatctgcaggctacctaattctgcaacaatcctcaagaattcatcagtgttttgatcaatactcaaattatcaaccatcttgaatgagtaaagccttagttgagtgtagatccgattaggcaacgatgtttccatgaacaacttgttcaatgttgcccaaagttctgcagcagtaacacagtgttgaactttaagaagaactgtatcagtgatgtgatttatgatgaagttcttcgcttgatctgactgctcaaacttaatcggatctggaacttcttcagttttctttgaatctgtttcatcgtcttcagattctgattctttcttctcgctctttaccacaagaatcgtcttggttaaagtgaaatccgataaagcaggctttaatccaagaacaccaagctgagcttcgattcttatcttccacagagagaagtcgcgatcgccattaaaggtcttgatctccaccttcgttgacatcgccatcgatggagttttgccaataacctggctctgataccaatctgttacaactccgaactttgattaaacgattctctcacaactctcaatcactcgtttgtactctcaagaacttgaatcacaacaaagagaaagaaaacagagcacacgcgtgatttgttacccagttcaacggatcgatgtgatcacgtctacgtttggggccgaatcaattcggcaattcactaacaacaagagatgaacaagtctcaagctcgagctcacaacaatggagtctctcagctttctgttacaacagaataacaaactctcactttcgaaatgaatacaaagaagaagaagaagaagaagactttatatagagtcaacttaatgaaaccctctctcgcgaaaagagtattccatttaaccagcttccaatgtgattcaatcgtcttctgtaaaccggtcttcaattctcaataaccaagcattaaaccgaatgcaaagttgaatcagaaccaaataccacaacatgtgtcaattatataaaggttaaaccgttatcacaacctaatcaaacaaaacaaataaaagcaattctcccacaaaaaaggatccattcctattaaagtcttgtttgcacattttgtctttgttattttcgcatgctcctttgaaactttttgtgcatggatgtgaaactcttcactggagcatacggcgataacgaaaacaaggtgtgcatataaactttagtagtaatggaatgaaataagaattataagtggaacggccaagccgactctacttgcgttttctgtcaagacccactagaaacaagagctcacctcttcttccattgtcactacgccaatcaaatctgggaacgtatagcgaaaggcttcatgggcgagcagtacacatcaaactgggaccaacttacctcgctcatcgcgggaacatcacttgagccgcatcctctgtttctcttgcggtatgctcttcaaaccaccattcacacaatttggagagagcgaaacaatcgtcggcatggagaaaattcaagcacagtccaccaattggagaaaaccatcgacaaaataattcgaaacagaatcacccttctcggcaactcggaaatcaaaaatatgagaatctcctctgtttttggttctccactagaagctaatctttgtcatgtagagaacttttttttattctttttgaactgttgcacttgatgtatcaaacggtttttttggtgaatataatttaacattcattcaaaaaaaaaaaaagaattaattagtaaaaaaaaaagttccataatcattgtcaatttaggattttctggtcaggtcttatgtagttaggcatcattcatgtaaggcaaaaagattctctctattaacaagtcattggttcaaacccactatatgcattcttttcaaacaattttttttttttattggaacatcaattatctggcttggtttatgcagcccatacatttgggccggtactgcttttagtattctgttttttttttaaaattttatgttggttttcctcttctattagtttcttattattttgatctgtttttttcgagtaatggataccagttctaatgaaagcagccaagattgtagttctaaatgtgaaaaagaacttaaagattacgacgaagatgttaacttttaagtatatgaaaagaggattatcaatcgtcgttagataatccaatattgtaatactaattaggttgtcgagttctagaaatggagttttccactgttgtaatagcttgcgaaacttgtgttatatataaaaccgaaacacttaagagaaaaagacaaaattgttttgtgggctgtataacgtaactaatatttgtaaagtcggtccgcccttgaacacatacacactttttttgtgtttctctgttcacgagttataggggtttagttatagcttacaattttttttttttttgtaacaagttatagcttacatgaacatgcactaatcgttttgtgacgtttcattacgtaatgtcaaacgttatgggtatataacaatgttaagattaagttttttatatataaatagatgattaattgtaccttaattaaaagtaacttgttcacttagattgttcttagtatgaggtgttctcgtactaagtagagtctaagagaacaagatcattttatattttaatttacacaaaagtcataagatccgttggttcttttttcgttactcgttagttgtgttttcgtaatacagttttttacgattagtaccaaccggtggttttaaatattgcgtataaccaaaccaaccaaaactgaaaaagaattatgaatatcaaatagttcttttggttttgattggttaaccgtaaaaagtataaaacatcaattgttactaatcataaaaaatagtgttacgacttacgagtagagagccaagtattttggatgattattccggtacgtatatagaagttttgttttaataataagggatagtaattaatgtgatcatatttacatcataggtcataaaaagtctttgcaaatcctatcactaccacacacacaaatctattatacaaagtttacatagatttttcctaagtttttttttctcgttttcttcattattttgtttttttttccctgtaattttgttttgattttaattctcattaaatgattcttaagttctaaaatcatcgttaggcctttcatatatcactattgaagatttcaataatgacatactcattatttattagccaacttatgagatctaagaaaatttttaaccaaatccaactcataattattaattttccacttttaaaaatttactaaaatagaaattcatataaatttaaataattacatttagaagattattgatattgtaaataaaacaaacaaataactatgaggtttaatgtaacaaaaattatttttttgctccgattagtaacgataattaaaaagaacaataggtatagaaaaaagaatgaatgaaaaaagaacaaaaaagaaaggaaaatgacaaaagtatgaacaaaaataggaacatatgtagataagaaattgaacaaacttttatggtaaatggcaacccaaaaatttaataaatattcaaaaaatatttttatctaagagcttttatatagtgagagatttgcaaaactaccattttttctaccttttaacaacaatacccttttatgttgtccatttttaaagatactctttcctctcaacagaataaccaaattaccctcatttaataataacatataattggatactgaaattttctcgcaaaaaaaaaatttccaccaaacttttttcccgccaaaaatttttcccgtaacaaaatccttgtaaagttttttaaaaattatttaaaagaaccttgtaaaattttctaaaagctttgatagttgttaaaaaccctaataaatcattttaaaacctcttaaaatctttataaagtctttaaaaacatatgttaatactttaaaacccctttttaaacctttgtaaatcattttaaaaccttttacactagttttacaatatttacaagaatttttaaaaagttttaaatggatttacaaggatttttaaacctttgaaatccttttaaaatctttttaaaactcttataaagtctttacgatcattttttaattcaaagaaaatttttttaaaatattttaaaacatttataactctttttgaaccattttaaaactcttgtgaacctttacaaaaggtttttaaaaaatttacaagagtttttaaaggattttaaaactcttgtaaaccttttaaaatcttttaaaaactattgcaaatcctttaaaacccttgtaaatcatttaaaaatcttttaaaaactcttgtgaaccctttaataatttttgaaccattttaaaattcttgtgaacctttacgaaaggttttaaaaagatttacaagagttttaaaggatcttcttgtaaattctttaaaaatcttttaaaaactcttggaaatcttttaaaacctttttaaaccctttaaaaatcttttaaaaacccttgtaaatcttttaaagctcttgtaaatctttgaaagccctttaaaaatcttttgtaaatcttttaaaacctttaaaaatcccttgtaaagtttttaaaaccctttaaaaatctcttgtaaatcttgtaaaaccctttaaaaatcccttgtaaatcttttaaaaccctttaaaattcttttaaaatccattgtaaacctttgtaaaacataggtaaatactgtaaaacccctatttaaacgtttgtaaatcatttaaattttttttacaatagtttaacaagatttacaagagttttttaagagttttaaaaggatttacaaggatttttaaacctttgaaatcgttttaaaatcttttaaaactcttataaagtctttacaatcattttttttctcttaagaaaaaaaatgtaagtattttaaaatatttttaactttttttgaactattttaaaactcttgagaatctttacaaaagattttaaaaaaatttacaagagtttttaaaagattttaaatctgaatgttagaaggtaggtgtgaaggtatggtagaaggtaggtgtgaagaggaaaggttcgagagaaaaacaaatttgaaagaagaacattaaacggaaataaaggttacaaatagttcgagagagattgcaagaaaattgaatagaaaaaattgttttgccaacgccggcaaggcaaagctccaccagcggtggaggcgggatttggtgaaggttcctcgataaccacatctaggagtggttttttctttagtcacgagtccactaacactgcacatgaatgatactaaaccctaagtagataatatttagggaacgtcgcaagagttttaatctaaaataaatgatcaaatcaattaacatgtttaatcaaaataaacaatttatttttaaatatatatagtacaaggtatacgtaatagtatattcacaaaatagaatagtatctctcacaaatctctcaaaatcaaaatcgatttattggctattttctattggaatttctaccatcgtaaaccctttatcgcttatagatctaagaaatccataacatgatcgtcaatttgttggttaacaattctctattttatttccatagatttaagaattgaaattctcagattaattttgatggaaaagtgaagattaatctaacataattgacaaaaggatttaactggaatttgctaatattccctagctgacgaagaataaaaatagtcagagtgatgttacgctaatggttagggttctagctaatggtgttgttagaatagagtgaatcaagttttggtgatcatatcgacagttaagaatgatccatagatagttttgatttgttaagttggtgatgatgtatgtaaagtttagtatgaaaggaaagatagagatgaaaggagcataattcacaaatgggaagaaaatgtattcactaaagataaatatgtttttataatagaaatatagaggtttttttttaagtgctaatttcttaattaattaaattatttttggttatagagtcaaatttcccaaaaataaattcgataacctataacacttttggaccctaagccaggcttatgtggcttatgtcacgggcctactctctaggcgatatggagataggcactctggcgatagacaatcacgagttagagttttatttttgtttcataaaaagtcgcattctatctttttaatgtgattttacactcagtttcttaaattactcttaaccgaaaactacttttcattgaatggtaaatcattattcacttattaaacagggacatacatgcataattcaaagatttttaatttgcgtgaaatgtgtcaaaatgacaatttttataaaaccgaaattatgagtataaagttcataaaaaatatatgttttccagcaaacacagtaaatttacaatgatgtgaacttcccaacatacatatatacattttaaaagatgtgtttcaaccacatttttcggtgagtttattatttagctatctattaacctgaattaaataaaattcaaagatatatgtacccttttactaaatgcttgcaggtttaataacacaaatattattatggatcaattatgggattggcacaattaagtctatgcctttgtaaaaaagggcatatcttatatgcctcacgaatttaggtacttatatctctttgctttttacgattttaccctcctaatataaagcaaatctcatcaaaaaataaaaaacaagtatgaaaatgaaacaatatcatgatccacgagcatcttcttctttttttaaccatcaaaaatttgatttgatttgatgagaatctcagattagaacctttgggttctatatatattatcatctagggtttagattttctctatgaaaaatcgtttaattggatccattgaattcatccgaagagaatcgactattttaaaccaaaattattttctttttttcattaccacaaatcgaaaacgaaagtcgccttagaagacccataaaatatcatgtttgagttctattaaatttgaatgatcaaaactgatttaaagtttgtggaaaaaaaaagaaaaaaaaaagaagaagaagaacgatgataatgaagatgaagaagaagaagttaaacacaggggcaattttgtcaattcaaatacttggaagtacctattcttgtaagcccaatagacaaatgcccaatatcaaattttttgtcaaataagttcctattttaacaatagccccatattattataccttcatcacatatatgcatgcattaatcgttttgtacaacttttaaacgtaaacacgtaagcactttttatgtttgtgtatacacaatatttatgtgcttttgtctattcattgttttgttattcttttacgtaaacaaatgaacacataacttttatgtgttcgattttgtgcacagctttgttgtacttgtatctatgtgtacctatatttaaacacattacttccaacatatataaaacatcacagtacgaataatctaaccgaaaaaagtcgattaattcacgcaagaaaatcatgaagtctgctgttttgcgtttgggttcttatgttgtcatgtacacataaaactagtatattgccttgaacatggtttattaggaaagacatgagaacatatctgaacatagtttttccttatatacaatgttcaaagtaatgaattagttttattttgtttttcttgttttcatattgtttaaaataacaaacttatgacttcattatttccttttactttgtcataacattgtttattacaatccgtaacaatcgctatttctggatagcaattgattgttactgattataaaaaacagtgttatgacaacgaaaaaaaaagaaagaatgaagtcctaattatgcccatcggcatttagacgaagtagtatacgtagactttatgtttttcaaactaacttaacataattaaatttcttgcaaaggttagattgtttgtaaattatttcgttatataataaaggtacgttaatatataatgatcaatttttgactctttcgctaaatatcctaatatttatgtgaaatttcaaaactataccagaccgtttacaaaataaaaatatagcttatagtttattttactaacatatttaaccatcaataaaattgaaaaaaaagtatatgatttgttgactgaatttacaaaattattgagttggaaatagcattcaaaattaataatggttaggtaaattatcaccatatcatatttttaacagctggacactctaagagagttagagtccagcccaccccttacaaacccgtaagtttatctcattcatcacttcacacaatttgttgttttttgggttttatgaacaggaataagctgccattttgataattttatccatatctttttcttacggctgatgccaagaaaagtggaattacgatagtctttttcatgtatttcataagataatgggaaaaatagtgacttctttgaatccaagtaaagtttaactaggaggattttttatgttctcttacatccgcctactttttgcaataggcattccatagttaaatgggttggcgaggaaagctattgcaatgtttctggtcatgaattttcttgatgtctccaagatatttttaacgtatgtagcaataaactgcaaaaaatcaatacacttgaaatcttttacggctacaatcaataagaagtcgaggtagtaacatacttgggtctcaagactctcaacaataattatctttgtaaatgcttcatttttttctgctttttgtaatcctgtagagtgtagactgtagtcttgagcaagtaccaaataggaaattactccacccatcacgaggtgtaagttcttgatcggttgtacttgtgatttcgaactaaagctaagatacaatgtgatttcaaatcacaaatatcactctaatatatattaattatattattctaagtaatctctttgattatgttcatgttatatgtttatatgtttatataacttgtaacctttcattcaataatataacaacacaatacaattcaatactctctattttacagtgagtaccgattctgtaattgaggagcaagcgcaaatacttgttgattttgatatggttctaaagccaatgtcatctatctaattcggttttcgaagatgcatctcacatcaatcaatatgaaaagccattaacactaataacattgtaccgatgatggtagttttaagatcaaacatgtgaattagtgggaaacattgtcaaataacacgtgttagttaaagaaccataaattatacacggatttaaaatttatcatgcgtcaaaatttctttcaattcaaaattacctacagtcaattaatatgtagttatgtttaatttgatagtctagcttttattcaaaccaaaacgaaaatacatttttgatttaaaagtaatacccagtttgagtttttcactgtgatattagacatgacaaaatatgtttattttcatcaatcagtctcatgttacatcaaatgcacagtcgccaactaaagagttacaacttccgtagaagtctatctccattacttacttgcagaagttgaaactcttctatgagcgatgaagtatatgactggtgctgatcaaaatgtagttttcttaaaagattattctgatctggtgaatatgatgtcttcttcacccgaattaccggccttttcagtatattgggaggaaattcaaagttacaaagaagaattcgcaagtttctatttatctttaatttctcgtagtgcatatttaaaagcgataattcgatacgaaaagttcgtattgaactaaagcatatcacttattcacccctttaatttaagccaatcactatgtcatgttatataataattaagaaaaaaatctgtatacttttaattaaacaaggttaattatatgtagaatttagactttacaattaaaaaaaaaatgtcggtttggatttataaatatgaattagggtttaaattttataattgtacaaaattatatatcggtttgggtttataagaaaaagttattagggtttagatttataattaaacaaaattatatgtcggtttggatttacaaatgtggattagggtttagattttatatttttaaaaatgtcggtttggatttataaaactatagttagatttagattttataattaaataatattagatgcccgtttgggtttatagaagattgtttaggctgagcccaataattgtctttagaatgtgttggaaaaagagagtttcatgttacattacctgaaagtacaaatagggagatgcatatttgatatatatatttttctttaactagccttttaacattaaaattcgcatttatttcctaatttgaaatatttagaatacaacgaaattatcataacgctcattcggacaaaaggaaagtacataaaaaaaagatattaaacttcaggacaagaactacacacaagaaggcacttgaacactaaagcagatctttcacttatctccaacagctagactctataatttacttgaaaacaattaaagtataatcgtgagtaggcattaaaatgtttattttgtgaacatggatcataaaagttatagttaaaggatatcagaaaaagagaaggatcctgaaggttacatatttttcatatggagatgaagctattgagatctgttttgctctactagatcaacatgaattttaagagacatttttaggtatgaagccgaaaaaaacacaatcctgaatcattgatgatgtaacaaatgctgcttactcaaaacaaattgagctaaagcagaaatgattcatatgcaagtcaaagataaacttagaaaggatcattgcgagcgcagaggaaagtctgagaataagaacaatagttaaagaggcaacatgtcaaagagtaagagatcaaagttaagacagataaacaacttaggacaagagagtgttgtgtgtacagataggaaggtaatttaaaagtatattatcatgaaaactactaatgctacaaacgatgcttaaaaagaagatcatcctatatcttttatcaagcatacaaaacaaaaaagatgagttggttctagaatttggttgtactctccacattacaccaaacaaagacgctttatttgatctctaagaaattgatgaaggaaaggtcttgatgaggatcgacattgtgaagttaaaggaattggcaagctaaagatacttaacccgaaggatttattgtgacacttacaaaggttgatacatgcctacaatatgtaggaatcttatcgcatatggtcaacttgaaaagaatggttgcatttatgttggtgaagactttatagtcatattcttcaaacaagacaatagattgtttacatgtaagtaccaagatggattatactattttcagggaatagtcttaaaagaagaagcatatatgactagagcccaagtgaatccctctaacatacgacatttcatgctagaacaaattagcctaaagaaaatgaacattctcgtcaaagtaaaatatttagactctaaggaagttcacatgttggacgtttgtgaagaacgtgttttagaaaagtcttacaaacaaacctttccggaagccaaacatgcatcttaaagtatgtacacagtgatttgtggggataagtctcaagtgaattaaggttatctggttgcaagttcttcttaacattcattggtgattactcaaagaaggtctcgataagtttcttaagaagtaaatgacgaagtgtttgagaagttttgaaagtggaagaagctcgtggaaaatcaaacactaaaactaccaattaaagccataaaaacccttattaaaacgactaaggacatctctaaccttactctattttaaagtcaaaaatgcaaaattcttctccaaacctactctataattgactcaaaaatagagatttctgcagattgactctatatatagagcaactctattctcaactctatttttgagttcaacatttttatttatactttagtccctcaaatgtaaactttttttatttaatacatataatcattttacaaacaacaattacaacacatagttttataaacttaacaagcaaacaagtactaaatttaaaataattttataaacttaacaagaagcaaacaagtactaaatttaaaataaacaacataaaaactaaaacataaaactagtaatttaatagtccgataaattgattgtagatccgcaaagatagttaaaataatgtccaaatgaagtagatggaggaggagtttcttgatcttcataaatttgtaatgtttattgttatatgatgtaatgttttttaaataaataattagtatttaatttaaataatttcatattttatgggaattttgtaaatctataatatatggggtcaaattgtaaattatataactaaaagatattaatatataaaatagaaatagaataattctaaaaatattcttttttaaagtagaaaatagagatatatattggagagtaagatatagagctatacattggagatggtctaaaactctccgacttatcaaaagtgaagctatctgattcgatggtccccacaaaagctagaacaaaacttatggcatatgcttatgctataccttttcaatcctttgatctctgtacgaaggacctctctgctccctcccaggcaatatggacaagaagcaagagacctaccacatacactcactcacttattcgatttttttttctgaaatgaacatatgtacttgtcaactagtgttgaaattaatttatccaaagtaattgaatttagctgaattttgggtttattttaaataaattatttatatacatttttgtaacacttttataaaataaatcctcaaattgtaacttgtttataaaagaatgtcattggcattaattattatcaattatttaatattcctaattactaacatttccttatctaatgtatatctccatcaattctaattacgaaaaaatggagaaattttaggacattattaatattatactttattaaaagataaatattgtaatgatttcaagtgtaataaatattttgaatatttaacggaaacattatttagaatatttagaatatgtgaaatctataaaaattaaataactatttgaaagaaaacttttaaaatgatttgaattataaatcttttaataaaagtattattaaaacaaaaaataaaaaataatgtttaattttactgaacgagatcaaatggtatgtcaggtgtaaaatattataatatatgaaatttataacaattaaagaaaaatttgaaagaaaacttttaaattgatttgaattataaatttaaaatattattaaaaaaataacaaaataatgtttaatttcacttaacgaggttagatggcagaacgggtttgagtcgatagtaatatgagacgataaaccacaggtgaaatccattagatatgtttaatttcacttaacggggttagatggtaggacgggtttgggtcgatagtaaaacgagacagtataccacgagtgatatacattagatatttttaattttactgaacgggattaatggtaagacggatttggatcgatagtaatacgagacggtataccacatgtgaaatccaagatataacaatcaaaatacaattattttatcttaaatagtaaacagaacaaacaatattaacaaaataaatataatttaaatttaaattatttagttataatctagatctagattttaacttaatgaattgtatgttattgttcccatacttttaaacagtaaaaatcaaacatagtaattgtatactaatatatatatatatataagaattgtacatttacaaaatacaaaacattaaattatattttattattaacaaattaaatttttgttttaaaaaaatagttctacggtttaccacgggttaaaatctagttgatttgcataaatttaagcaagctcgtttttttatgttaccatttagacccataattatttttaaatgcgatcaggtttagtaatataaatttgattatcatttgatttactatataccttatggatacacatgcgttattcgttttgtaaatctgttgcacgttatcacttagcacattttgtattgtgtacactatatttatgtgtttgtatattcaattattttgtaattcttttatacgtaaacactacacaacgtttgggttatgtatacctctatataaagacacaacttgcaacatgcacaatccactaagttctatcttaaaaaggtcaactttaattctcacaagaaatcatgagatgtgttgttttgtttatggtttcttgtcttctcatagttctccttataaaccattttgaaggtattttactattttcttttaactacagtgattgttattggttcaagaaattggtgtttctacaataacatgcaatattcgagtttgaattcatgtggtcacagaacaattacagtatacaaagtactagtatgcatggtctgtaaaaatagtattatgatcaaagtaatttctcaatgataattgatgagacataaacattatatttttcaattagtcattaaaataaaaatttctagcaaatgtttgattttttatttgtttataagataatttctggacctggtaaagaggcataattttaatttcaaaagtgattaattgatcgaattaatattacacaactaagatatttagagatatctactatatatctacttaagacgagaattatcatgattaatattaatacctatctttagctatatcataagaatattataatattctaaattaataaaaattattttattcccttttacagagttaattaagaacaatatacgtcaaccattagtaaatactaaatagtgaacaatataatatataagttgaccatcataaatagcttccttttatcatgttcttaaatgtggaaggtgtggttactctctgtatatgtgtatataccctccttcaaagttatcttcgaaataatatatatgtgtataaaactctctaactattactaatcgcaaaatgcagtattgcgacaagaaaaaaaatagtttatattctaaaaatttactgcattatcaagtatttatctaagtattctaaagtaataacagaagtggaagctcagaagtggaacaagtgctttcttagggacattttccctgggaaatgtgaacatgacgcaaacgcaaaactacgatgcaaagaagacgatgcaaagaagacattagcgtaaaatacagctttaaaatgaatattttgtgataaatttgtttttcttcaattaaatttgtgctttaattatcactgttcataggtatatagattttggttttggagttgttaaaccaagcattttttacaatagcaaattccacctttatcaaaagtttgacaattgcattcaaaagggcgagagggtctgaaattcttagcaatgtcttctttctttttttttttttctttttttttttttttttttttatgatgtaaaaaagaaactgaacatcattatgtctgaaaacactgtttcttttaattgaaaaactcataatgttgactgttgagtttcatcctttgttaattgtatatgtagcggctacatgtctcccgaatacgcaatggaggggatattctcggtaaaatcggatgttttcagcttcggggttttggttcttgagattgtcagtggaaagaggaacagaggattccacaactccggccaagacaataatcttctcggctacgtaagcttaaaccgcttaagttttttattttgtctcgttcgattgataacacaattttttttatctttattaacagacgtgggagaattggaaagaaggaaaagggctagagatcgtcgattcgataattgtagattcctcatcatcaatgtcattgttccaaccacatgaagtcttaagatgcatacagattggtcttttatgtgttcaagaacgtgcagaggacagaccaaagatgtcgtcggtgattgtcccgttctgtactcgatgacgaatcatcagtatcaagagaacttcttctgacgcaataaccgggccgtctagggctgaagtattcccctttttcgctaccgagcattaaaaccaccgacgacatctttggtctgtcctctgcacgttcttgaacacataaaagaccaatctgtatgcatcttaagacttcatgtggttggaacaatgacattgatgatgaggaatctacaattatcgaatcgacgatctctagcccttttccttctttccaattctcccacgtctgttaataaagataaaaaaaattgtgttatcaatcgaacgagacaaaataaaaaacttaagcggtttaagcttacgtagccgagaagattattgtcttggccggagttgtggaatcctctgttcctctttccactgacaatctcaagaaccaaaaccccgaagctgaaaacatccgattttaccgagaatatcccctccattgcgtattcgggagacatgtagccgctacatatacaattaacaaaggatgaaactcaacagtcaacattatgagtttttcaattaaaagaaacagtgttttcagacataatgatgttcagtttcttactaagttccaaccaccttcctggtgttagcttccgtctcgtccctttcaaatatcctagccatcccaaaatccgagatctttggagtcatatttttatcaagcaatacattgcttgccttcagatctctgtggataatcttaaaccttgaatcttggtgaaggtataaaagtcctcgagcaataccattgataatgctaaatctcgtttgccagtttagcttattagagctttgggttgtttctgtgtatagatcacaaccaaataaagttaacttatttacattaaaatttaattgttggtatacaactactaaaaaggtgagaggcactaaccgaagagatgagaatcaaggcttccattctccaagtattcataaatcaatatcttctcatccgcgtagatgcaacaactaagaagccggacaaggttgatgtgttgaagccttgcgattagcctcacctcgttcttgaactcattggttccttgagatgacatctctgataatcttttcactgcaatcttttacccgtcaagtaaccttccctgctaccatttttttagagttatgaaacgtatgccccagtgataaaaaaattcaacgctagtcatcatttttaccttgtatacaataccgaaaccacctcgtccaagtatgttggaatcagagaaattttcggtggccatgacaacagtttcaaactccgtgagtggaagttccaagtcctcttcctccccaagcaagcgtctcccacttgacattaccaccccattggttataattaattcttgaattctgtctcgataccctgttttcatcgacacgaacacaatcaatatgtatatgatgaaataatatttattactaatgataaaaaattgaaagctactagtttaccgataggtgctgcggttgctcttgctcgcttctgtttctttttccaaaaacagtaaatgatgaaactcagaacaagcattaagctgattccaataatcaaacctatgatttttcctctaatagttcttctctcccctgaaagaaaaaaaaaatttaggaatggaattttgttcggctcctaatggttatgtgctactgagccaggcgtggcttgatgagttctaattttcttctcttatccaaatattataatatcttaagagttaagaaaatatatacaacaattttctgttttatgtttcgtatttaccaaattatatatatattgaatatgatctggatctcttaatattctcagatgtaatcctgtctaatactaggagtaagaactcaccgaactctgcagctgccaatcgaacaaatagatcttgaccgtctgcagcgtaatttcggatatcccgaaactctccgatccatattatacaacctgaaccaccatttcgaatatcggagtttgcatacgcggtacagttacaatgtgtcttgcacttctcttcacattctttcaacccaattctcttgtccacaatcgctgcagtagttgccggtatcttcatgttcatcagccgaaagaacctatcttcaccgcaggtcaactgtgtcttccttcgacatctacctgtcacgtctccggaagcccaatcttgcggggacagcggttgaaatcctttgatacagttacacgttggtgacgtgctcatgtcacagtaagcgtaaggaccacaaattccatacaaatcacaagtgtcctttggcataaaccagaacatgttccactcttgctgtgttggttcccacgtgaatccctctaaacgtcctacggtatttattgtcaatcttgagtaggagttgtggtcggtaactcggaaagtgtaagcgacctcctctctattctccgtgaagttgtagataatatcgtcccattgttgcatctccagaatgccgctaaaccggagtccatcccaagggccgctccggtacacttccaaaaagctggtaaaaccaaaaaactcaggtaatcctagagtttcgagtttgaacatgaaactcccgcttgacggatcaaatgagcttttccaggatgtgacgaatctgttaagccctcttttgtgatcccgacccaatttcatctgcggtaataaagtatctgtcgggaaatcgaaactctgccacaaaaactcatctgattcattgattttggagccccttagaacaaaattgccattgtcaagaagctctgccaccacagaagatctcaccgcaccagtcagattcgttgaccaaacatgcgtatcagaattatcgaggatgacaaggttagcattggagattttgaggattccaataggattagagagaggagtgtctctattggcaacccatacataggttctctgagagattttcttgtaccaaatcccaaggtaccaactatccccaaggattctgaagaaaccaagctcgaagacaccaccaggagacacaatggttttgttgcttgagattgtcagggattctgtagctgacaaagtattgacagagatagagagatcagggaacagaattaagaagaagaaaaggaaaacgaagaaggtgtaagaatggtgtttgtttggtaattcacctctcatctctcgatctctctccaccactctcatatgttgttcattttccttttgctttctttatttatacgatttttcacatatttatttcaggtttatctaacccatgaatcttatttatattttacccacacgacaaagagtagtgttattccacgttccatgactttttatcgcttcaattaaaattacttcaaccaacttttttcatggtcaacaatttaccagaaaatctacgtgtgaaattaatttccatgcaacatagcacatgcagttcaccaagtatatattcatccattatccttgtcccacgaaagcccacatcacacggtatcgttctcgcatgcaagtgcatccttcgatacattgaaaatgttagccttctagattatggccatatgtgtaattagaagatttgtgtgactttgttcggccattttctatattaaaaaaaaaatagcaaaatttagtcgttgtttcgaggaaaaaaaaaaaaaatagggtgccaaattcagtttaacttaactgaacttaaacaaaatagcactaaatttaaccagccttgtaattcatattatttacgaaatttttatgtaaacaattaatggtactaaaaaccaaactgatggaaaatttctcaaaaaaaaaaacaataataaataaacaaactgaatttgtcaaatcctgaatttatcaaaaataaaataataataaataaacaaattgaatttgtcaaattctgaacctacttactcacaagatgtccttctttgtctagtctatatattgacaccacacaagtgaaaaggaagaaaataaatagtttctccaagataaaatataaaaaattctgtcaacgaaaaaatactttgtcaaataagataaactaaagagaatttttttttttccgctgagattgattaataaaattaagtgttcggaaaaaaagataaactaaacagtaactaaactaaagacagccgaaatggaacaaaaaaaaatcatgcaatacgcaaacaagaaacaagattaacttaaaatatataaatcatgattcacaagaatcgatcaagatagacatggacttaggaacttatcataaagattagggaaacaaagcataaataagaagtaaggacaaccattaagagatcacgaatatataacactaatcatctctcaagaacccgaccaaaaaaaatcatctctcaagaaattaattatctatgctaaatattctaaatttctaaactctcatttaaaatttaaattagcaagcattcatgtcaatattaatgtgctcataaatcacaattctgtatatcaactatcattattaaaggacgagctactcatcaaaggttaattaaggaattttgacagaacacttttgatgcataaaaatccttatgatctaaaacaattttaatcaagcctctccaaacattgaaattgcgaacacttttgatgcacaaaaatccttatgatctaaaacaattttaatcaagcctctacaaacattgaaatcaccttgaaatgaaggaaaatttgaaatcaccttaaaatgaaggaaccatgaaggatttactctgtcatcagttaaaaacaaaaaatccactatacccccatgatcttcctaaagcccataaattaaatccaccggattttggccatggttagcgatggaaataggtgttgctgatcataaaaaattcttataacgtatgtacttattaaaaaaaaaatctattacaacatgtacaaacctaatctcaaaacgtacaacccgaaattctactaaccaacaatatttgcctcttctagtagccataatttataatatgaaagtctgagaatctttcaaaatatcacattgatgtcctataactgcaggactatttgggttatccataaagcaattacagaatacatgcttaattaagacaattgaatcatgtagtaacctttgcaacggagacgtacagagaaaatactatgcacataactaataccatctttcctagttgattcttattgtcgctcaatttagtcatcttagtatagaagattggctagttgacagtcacattaccgagcatcaaggaccgagacagtaatttggttcactgtccatgattcatcgtcgcgctgtttactcgacgaagaatcagtgtcaagaagacttctctccaggcaataaccgggcgctttaggttgaggaatagttgttgattcgcttccgagcatcaaaattaccaaggacatagttggtctgtcctctgcacgttcttgaacacacaagaggccaatttgtatgcatcttaagatttcatgttgcctgaatgttgatgaagaatctgtgatgattggatctatgatctctagcccttttccttctttccaattcctccacacctgtgtataatgatcgaaatttttctagtgttatcattattttgagtgtaaaacaagatcaagtttgagaggtttttaacttacacaaccgagaaggttaaggtcacggtccgaattgtagaatcctttgttcctcttgctacttataatctcaagaagcaagaccccaaaactgaaaacatctgacttcatcgagaatatcccgtccattgcatattcaggagacatataaccgctgaataacgaagattagactcaaagttttgagttatttttttttaattcagatttcaaacaaagatttttaatattttggagaatgattgcttactaggttccaaccaccttcctcgtattagcttctgtctcatcccgtccaaagatcctagccattccgaaatccgagatctttggagtcatatatttatcaagcaagatgttacttgctttcaagtctctatggataattctaaaccgtgaatcttggtgaagatatagaagtcctcgagcaataccattgatgatatcaaatctcatttgccaatttagcttagagtttcgggatttgtctgctaatgaatcatcactggattgagtacattatttttaaagacattgaaaaattgttagaacagagttgtaaggagttgagacactaaccaaatagatgagagtcgaggcttagattttccaagtactcgtaaatcaacatcttctcacccgcatcgacgcaacatgcaagaagcctaacaaggtttatgtgctgaagccttgcaatcaactttacctcattcttgaactcatcagtcccctgaactgatgtctttgatagtctcttcactgccatttcttgaccatcaagtaactttccctgtaacccttaattttgttacacaacgaaatatttgtccagcgatagattatgaattaagttttcaatcatttttaccttataaactataccaaaaccaccttgtcctagcttgttggcgttagaaaaattgtttgtggccatggcaacttcttcaaactccatcaatggcaattcgagatcgtctgtattgttttctctagatatgtgtctcctacttgatattacaacttcgttcattagcaaatctcggcttctcagttgatgatcaactgttacatacagacaccaaaaacagtaaagatattagttttaagaaatttacaaacaaaaagaaaggaattaaaatttacagatataccaataggtgtttcgattagtattgatcgcttctgcttccttttccacaagaagaagataatgaaacttaaaagaagcaaaacgctcactccaatactcgaacctatgatttttgcacttctgtttcttttgtcctctgaaataatgaaaagagatgtcaaattgagcacaacatttaggacctcgaccatggaaatgaatatcattttataaaacaaactagtattagtcttatgatttaacaaaataataaacattgtcgtacttttgattaaagataaacgccaacaaacaaaaaacagcgttatactgttatcgccaataaaaacaaaacataaagattggtctacctaaaaataatttcttttggctttggatctaccttaccatattattcttgagattgataagtttttgtgaagaatatagtagtaatcaaaagtttcactcatgcgttgcatcttttaagaagattaaaagtccattggaccttagttctttatcacaagagttttcacatataatgccaagaccgaatgcgtcaacatctcaatcaagtttaagaagtttgaaaagagggaaaataaaactgaaaaacgttttgttaaattccaaattcgttaaccaacaacaatataacattgacttgcactattcaacaccattctcacattctaccccaaaaaaaaagtgctttatctaacaaccaagttaattactattcttgaaacccttaaaaaacgtttcttccttttgtcgtttaagaaaatctttagtataatgtgataggattactcaataacttgattgggcagttttagcatcaatttttagtcttactgacaaaatcttttatgatgtctttttagtttctagtatgtataaaactgtttacatgttttgaaaagtgatcttgaagactattatcaaccgttacttagcaaaagtaaatatgtggaaaatgaaaaccaaacatatgtcatttagtctaatagagatagtggagaatgaactaaccgagatcagtagcagccaatctaacgtaaagatcttgaccacctttggcataattcctgatatcaaaaagctctccggtccaagtcacacaacccgacccgctaccccggatatccgtattcgcaaacgccgtgcaattacaatctcttaaacacttctgttcacattctttcacaccaattcctctgtccacactagccgtggtagtatccggcaatttcattttcttcaaccgcacaaacccatctccgccaccacagctcagtagcgtcttcctcacgcaaccatccgacccgtctctcaatccccacacttgaggattcctcggcttaaaccctttaatacaattacaaacaggtgaagtgttcgagtcgcaataaccgtaaacaccacactctttgtactcatcacattggtcttttggtgcgtaccagaattggttccaattctgtgctgtctcaatccaagtgaatctttgtaacaatcctgaggagcttatgcttaatctcgagtaaacgtcgcttttagtgattctaaatgagtaagtcacttcttctttactcgtagtgaaattgaaaaccatgtattcaaatggttgcatctccggtacaccactaaaccggattccattccatggaccactccggtacattcgtgattctctgttccatagaaaaatctcagggaagccttcggtttcgagtttgaacgagaaatctccacttgatggatcatctggagatttccatgatctaatgaatctgttgaacccggttttggcatcccagccaagtttcatctccggaagtaaagtatctgtcggaaaatcaaaactctgccacaaaactccatctggagcgctgttcttggagtctctgagcacaaaattaccattatcaagaagctctgccaccaatggagatctcacatctcctccggtcagattcgtcgaccaaaccggtgtatcggactgatccaaaacgacaagattactgtcggagattttgagagttccgatggaactagagagaggagtgtctctgtttgcaacccatacgtaggttctcttagagattgccttgtaccaaattccaagataccaacgagaatctaaaccgggtttgaagaaaccaagctcgaagacattaccaggagacacaatggtgttattgcttgagatagttagagattctgaagccgacaaagtgttggcagagatagagtaagcagggaacagaattaagaggaagaagaagaagaaggtgtaagaatggtagaaatttggtaaacctctcatttctctaaaccaagttttttgtttttcactctttcttgagaaaagtatgagagtttatttccattggagatatcggacatgttttgtgtaatgtgtgaaccttacgtaaccgattttatttctgtcaataatatattaccttgctttttttcttttcttggtcttcttgttcgcatttggaaaaaatatctagttatgtactatgtgtacagtccaattcatagttgacctagcaaataaaaagtcttcttcttctttttttttgtcaggctttctttccttttccaatagtcatttttacttcataaattcagaatttttcttcaaaatatgatattattgatgaccattttttttaataaattacttaatatattgctttttcgtattttattatcagtcaaccttttgtatgcatgcttcgagagttatataaatttcagtgttctttttcgtaataaataactcaattttttttttatccttcccaataagaacttcaatgttagtattcatcaaacaaaccctactttaatttatttccgcattctccgaagacaaaaaagaaaggggtcgtttcacgttttcctgactttttctttttttctctaactctaaataattcatcattccattcaatttaataatgagtctacatttgaattattcatcaccaaatataatgttgtcctatgcattttgtttgacgatttttggctttggagcttggaggagaggaaaatttatgttaacacggttttaggtatattatataagtatgaaatacgaagaccgaatactcttttcaccatcaaaacagtactaattaccatagtcaacgctccaaaagtcttatttttgaacatcctcataattcttcgttcctcgtttgatttatatataataactctatacataaaaatcaatcacattttaattaaattaaacacaataatcctacaatatttgaaacaactcacctatatttaatagaatgaaaaacaattattatgatcctcatttcaaaactaacctaaatattttaagactaccacctttgttatagtataaacgatttatttgaagatttatttcagataaatgctttttgatattttatctgttttcatttgtttatacttgtaaattgatccattgtgatatttttgaaaaagaatagtgtggtgattttttcaaaatatcaacatcatactgtaataaaaccccatttgtaatgtttcactttatgaacaaaatttcaagtttcaacaaccattactccattatcctaattaaccaaaaaatattatacgttttcacaacaattatataaaaaaaaactttacaaaagaacaaacaaaagaatcttatcgtccaagaacaaccgttgaagtgatctcattagaagaaacgatgtattgttggctcgaatcaagagcaaagttgacatcaatggagtttcttctggtggaagtaaacgttggttgtctaggcgcagcgagcgtcgctgtgtcactctctaacataagcaaaactgaagccatgttgggtctctccgcagccgaatcttgaacacatagcatcgctacgtgtatgcatctcaaggcctctcgcttactgcatgtgaccctgatcttaggatccacaagctcctctgatctcccatgagtatacaaataccaagcctgcaagcattcagtttccaccactaattagaccatttataaaccaaaccaaaccaaaatttcaaatgctcattaagagagaacaacagtttttactcttagtttttgggaaacttacataaccaatgagacttccatgttcagaagatcgaagacttgtgttcctcttcccacttacaatctctagcaacaagacaccgaagctgtaaacatcggatttcaccgagaaaagtccttccatcgcgtattcaggagacatgtatccgctacaatatacaaatatcaaatgtaaagtaagttgctaagaacatgattcattgaaataaaacatttgctctgttttttggaattcagtttttacttactaagttccaacaacgcgaaccgtgttagcttcattttggttaccaccaaagatccttgccataccaaaatctgagatctttggattcatctctgcatctaacaacacattgctaaccttcaagtctctatgaatgattctcaatcttgaatctctatgaagataaagcaatcctctcgcaatcccttcaattatcgaaaaccgcagtttccagtctatcaacgcttgtttcgtttcatctgtacattcaaaagagcaaaactaagaagaatgaaaggaagtgcttattctttcttggatctttaaaaaaggaaacataccaaagaggaagaaatccaagctcttgttaggcatatactcataaacaagcattttctcttctccctcgaagcaacatccaagtaatctcacaagattccgatgttgaagcttcgctatgagaataatctcattcttgaattcatcaactccttgtcctgatttaccagacaatctcttcacagctatctcacgtccatcttcgagaacaccctgataaatatcacaatcatcaacaaaaaaatcacaaaaattaaacacaaagactcttgtctataaccaaagtaatcaaccaaccttgtagactggtccgaatccacctcttccaagctcattttctttgcagaaatcattagtagctatggctatagcattcagagaaaagacaggtaactcggatgtgttaacagctttcccttcaatcattatgtctactgatcctgaaaacgctgaagtagtttctttgctcttggtcagatcagcaacaacaaccgatgtatcggtgttcttaccacaatatgctcctgaaacatctgcatataataaagagaagtaaatcaacaagatcttatgatgcagtaaccaaactaagaaatcaagaaagaacgtagttagtacctttctttctcttgaatctccatagaagcagagcaaagattcctatcaagatcacaccaacaagaaccgcgacaatcactgcaatctttgttttcctgttctcccctacttcggaatcagcaagacggatatgaagcgaagaaccaccagcttcaaactgttgtaaatccactaaatcttggttccaaatcatgcatccaataccaccaacaagagaataagcattgcaagaacaattcctcagacacctctctctgcaatcctcaggatcaacaagattatgttcaggaatttcaaaatcaggcaacttcacagatttcaaagtcaagaactcatcctctccaacactaatgttcctttcacacttcaacggtgttcttcttctacaacctctactccaattcccaacagaaacttgctcataaccatgaatacagctacagattccattagagcccttcatatcacaaataccaaacttgccacaacgattatactgatcacactcactatctggctcagactgaaacttagtccacttcttcaaagtctcattccatctcaattcctcttcggttccattataaagaaccttaaacctaagtaacactgatggatctgaaggaacatacgtgaagtacacgctacctgtttcatctggaggagatgaaagcttgaatccgtaaagataattcgtcaacagagacatattcggaatcccggtaaaaatcgcagagttccattgcccgcttctccatttcctcgtcttgttcccttcccaaagcacaatctctggtgctccagagggatcaacccctaatgagtaattaccaggggaaggatcagtctcagatctccatgagacaaaagcgtgattgtctccggtttgtggattcacacgaactctcatctgcggtaagaaggtatctgttgggtgattgaaactctcccaaataggtctatctgtgtcggtttcagacaaaacaaagttcccagtgtcatgtatagaaacgactctgttgttgttgttggtagtgcttgactcgatgtttgaagaccagacagtgatgttcttcccgtctaataacacgagattaccatcgttgcttatcatgagaactccagattggtctgaaattggagttgctctgtttgctacccataccacagctttatcctcgatgttcccataccaaatccctaggaaacgatgcgtagagcttccaggactgaagaaacctagctcgaatgtcttttgtggagagactaaaggtttgtgattgattccgtctcttaaagattcgcctcttctgattgtatttgcagccatggaagattcataaagaaagaagtataagaagagagaaagataaagtgaggttttgcggaagaatctcattttcttggggtttagtgttggagaagaagacacaagtgaggatcttcgtaataaaggattggtttttgaggtttgcttaaagatgaaagaagagaaacagaggaactgtgtctgtcacaatggcggaaacttcctattgataaaaaagtaagaggagaggtgacaaaggagaagggatacaaaaaggaaaggttgctgttttattgctgttgagaagtttctatatttttgtctcgtcaggttggaaagttggaccagagaattgaaataaaaaggtcaaactgtttgaattattatcatctttataaggtattattattattgtcttttaattcttttttgtcatctactttttttgttctttttcaagattatacaacctgcatagaaatatgtgattggtggctgacctaattgttttgaaactttttcttacatctctaagaggattttggacggtgtcagttgacacatgatggattagatactttagcggttcaatttttattaagaaagaaagttaggttttcaagttacatgatttagtaaaaattatattacaattatatagtttccattgattagaaacgtatattaatacaatgacttaggacgatccaaccattcatatcttgtatggactacttctgacgtccttagttcatagtcaatgtttaagagtgatgaggatttatcaaatggttgatgataataagaacaatgagaaggtaatagtatattcctattgtataaggccatcgaagaaaatgtataagctataggtgtggttaccaaatttgaaaataaataagtatgtcaggcaattagtggagcagttggctttgtatactagtttagtggaatatttgcttagttatataatacttagattagatatgcttgttgcctttggccgccacattgactcatatggtcaaagtatcgcacacttgatttggatgggtcttctctttattttattgcacgtgacatattttacgtatcttgatatttcaaattgtattccttcaaagtttaaatgttgtttgctcgcctaaaatcccataataaccctacaattatttagtaatcttttttttgcatgacgcttaagtatttatatctaatatcgatgcagccaaacctcaagtggattgcactagcaagtggcactaaagcatatattgatactcatacaatgccagatcgattctggagtttacattattgattcatttggtggattagttgattacaagtgaaaatttacaaatgtattagtttaactgagagaatgtggctactaggcaacaaaacctaataaagaaacaaacacccatctccatctaaaaatgctccaagggtccacaatgcttagtcatgaattctatagctacattattaggagttaagataaagaaaactgtatttaacattgatttgttgcttttgaaaagaccaatgtgtatgcatttcatgtgtaggataaagtagaaagcttttcttagtaaaagtctaatactattttcattttcttaagttaaatttcatgttatatgttttaaaacacagtaaaatcgaatttgcaaaacaaatctaccattaacgacgaatgtgtagaactaaaagaaaaagctataacttctactcgtttcaaaagctagatgaagccaagctgtctaaaaaatcacacaaacaaaatccatcattgaagaaactaaaaagatatgcagattaagcttcctaacgaggagataactcagaaacagtgacatcattcaaggacattaataacggttctgtggaagaagaaacattcatcgaaggcatgacactctctaacgcaaaggcgggccttgaaggcgttgggagagtataggaatagctattgagcattagagcaaccgaatccatagttggtctactcgctggactttcttgaacacataaaagaccaatgtgtatgcatctcaagatctcgcttcttgatcccgtggttagactcggatcaataacgcttagtataatgtcttctctccaacatctccacacctgagaaacaaacagaattacaaattcagttaacatgatgaatcaaactcaaacctcaattacctggttggttttgtgtacttacccaactaaggagattttctgcctcttcgtcatcatttgatcgaccattattgtttcccttacccgtaatgatctctatgactaatacaccgaagctgaaaacgtctgttttcaccgagaattgaccgtaaatagcgtattctggagccatatacccgctacaagatgaataacgggtttataccggtgtttcttggttaatgagttagtaagatgaagtaacttactaagttcctgcaattttgcttgtaaatcgatgtgtcgaagtttggtctgtgtcatagagtttagctaatccaaaatctgcgattttcggattcatttcttggtccaaaagaatgttgctagctttaagatcacggtgaattatccggtaacgagagtcttcatgaagataaagaagtcctctagcaactccacctatcattttgtatcgcactccccaatccaaaagttgacgctttttaagatctgtaacagcgtaaagatcaacacagagcagaaaaaacagaacggtaggatcatcatatggagaaaacggcggaaaacaattaccgaagatgaaattgtcaagactagcgttcttgatgaactcatagacaaggattcgttcttgtccttctatgcaaaaacctaatagcctaaccaagttcctatgttgaagctttgcaagaagtaaaatttcgttcttgaattcactgtctccttgtcctgaagtacacgataatcttttcaccgcgatttcttgcccacccgagaacacaccctaagaaatgcatcatccttagcttataaatctaaccaagggaaaccaaagttaccgttaagaagttttctcaaagaaacataccttataaactgagccaaacccaccacgtccaagttcattttctggtgaaaagttatctgttgctgcctttagagtttcaaagtcaactaccaacgaatctgagaactcatcctctgcatttgatcctgacaatgaacatagttctcaggataaatagtttatactttgtaacaagataacgataaccaaaagaagaaggttgtgtttgttacctttgactctacctacagacttgttcttcttccacttcaagagcaagcataggcaaattgcaaataacgcaacaaaaactattgggatgactatcgcaacaatgactttagatccacctttgccctttcctgaaatgaaacattcaatcttagagacaactgctgcaacagtacaaattcaaatatttctatgcacctgttctctcagttcttgcagctgatgttggggagtcagcaggctgaatagcaggtggatcaggctctagatcggcatcgaactcgtagaatcgccaggtctcaaatctgtagctacaactaggaaaaaaccacctaagaccaacctgaccagcacaacaacctgggatcttttcaaaaccaaagactagacagtcattacaatcctgttcagacaaatccggcgtacagtgtgcacttccgtagaattgcgggtaccctgccacacccgaaccgctcccttgagcgtattttctatttggcccaccagctgcagcaatccctttgagtctgtccaatagttctatctgcagacgatcaaactcatctctgtttgctgatatatttttaccggcttgaaaagacagagttggggtcgtctcttttcttccatagattatcatgttcgagtaacgaaacatacagtgtgtgtaccacacaacagcttgatttgtcagtggacactgctcgatgaggtttcttgcagctatctgaatgcagctgagacaatcatctctttttacttctcttctacaaagaccaattgcataagctctttctccagatgaatctccagaagagaggttgtagaagccataaggtttggatgtgagtgacgagagagaggagacaaggccgttgagattaccagcgaaagagctgttggccgtgaaattgcctccactagctacacagttgaaacctggaggaaactcatatttatccttctgtgctaagcagataaatggtacaatctttaggacacaagcaaagaagaaaaagataactctgacatgttccatggacgcttgaagcttttttcttcttctgtaatctatatgagaaaaccccagaatgtaataacgagtctaaaaatggaagaagtcaatctaacttgaccttggaattattcaaaagcagtatggtctttgaactaaatcaatatccaacagcagaaagaacaaaacttgttgatcaataacaattataaaacccagtagcaaacacaagtggagtctttatgaggttgtgggggtccatgatggtagtagattcaaagactcacaatatgaaactaacgacttggtgtgaaaacgttatttaaattagaagtgttcattgctcacttctttccccacaagtaccaggaaagaaaactaaagagtttgaatacttttcaaacctactagaaaatataagactaactaggaaccatctaatttcgtctaagccatttattttacaatttcttttacttctgtagatgattagtggatcatctttcaactctcatatttatatatgtggactcaatataaatctcttatccaattttctaaacttactgacatatatatatacttctatcaaattgtaccttaaaacgaaatcaagtaacgataaactggaagaaaaaaaatgagacaaaggaaaaagtatctcacagcttcacattcatgttttattcacaacaagatcaagccaggctgcctgaaaaatcacacaaacaaaacccatttcaaaggttttcagagaagaatcaaaacatttacagattaacgaggagaaaactcagaaacagtaacatcatttgacgacatttgtaacccttccgttgaagaagaaacatttgaaggtatgacgacactctccaacacaaacgcaggcctcaaaggcgtcgggagggtaaaagaatagctattgagcatgagagaaaccgtagccattgttggtctagtcgctgcactttcttgcacacataaaagaccaatgtgtatgcatctcaagatctcatttcttgatcctgcggttaaactcggatcgatcacgcttagtatagtgtcttctctccagcttctccacacctgaaaagaaaaacagaatcacaaattttatcaacaagatgaccaaaactgaaaccccatttactagcttggttttggatactgtacttacccaactaagaagatcttctgcatcttcgtcaccattcgatccaccattgttgtttcttttacctgtaatgatctcaatgactaatacaccgaagctgaaaacatctgttttcacagagaattgtccatgcattgcgtattccggagccatatatccgcttaaaattgaaatgataactggtttatactggtgtttcctggatttataagttagttaaatgaatttacttactaagttcctgcaatcctgcttgtgaatcgatgtgtcatggtttggcctgagtcaaagagtttagctaatccaaaatctgcgattttcggattcatttcttggtccaaaagaatgttgctagctttaagatcacgatgaattatccggaaacgagagtcttcatgaagataaaggagtcctctagcaattcctccgatcattttgtaccgcactacccaatccaaaagttgacgcttctcagtatctgcaacggcgcaatggtcaatgcagagcggaagaagaatggtaggatcagatcgagtaaaagccggaaaaagatttaccgaagataaattggtcaagactagcgttcttgatgaactcatagacaaggagtctttcttctccttgtatgcagaaacctataagcctgaccaagttcctatgttgaagctttgcaagtagtaatatttcgttcttgaactcgttgtctccttgtccagaattacccgataatctcttcaccgcgatttcttgcccctgagggaacacaccctgagatacataatcccaagtttataaatctctcaaataaataaaccaaagttaccggtaagaagtttgttcgaagaagcttaccttataaactgaaccaaacccaccacgtccaagttcgttttctgaagaaaagttatctgttgctgtctttagagtctcaaaatgaactaagagtgattctgtgttcgagaactcatcctcggcaattgaacccgacaaaggtgatttcccaagaactgaatacgcagatagtatttatcagaactaatagttaatccattagtaacaagataacgataacacgaagaagaacactgtgttacctttgtttttatatccagacttgttcttcctccacttcaagaccaagcataggcaaattgcgagtaacgcaacaagaagtatcgggatgactatcgcgataatgactttagatccacctttgccctttcctgcaataaaacattcactatcttaatcttagaaacaaaaacatattctgctagggacaacatctgcagtagcacacacgagagaaacattcaaacatttctatgtacctgtcctctcagttcttgcagctgattgtggtgaatcagcaggctgaattgcaggtggatctggctctaggtcggcatcaaactcgtagaatctccacgtctcaaaccggaagttacaactaggagaaaaccaccgaagaccaatctcagcatcacaacaactcggaatattctcaaacccaaaaactaaacaatcattacaatcctgttcagacaaatctggcgtacattgcacagttccatagaatctccggtacccagccgaagctgaaccgtttccttgagcgtatttcctattaggcccaccagcagccgcaattcctttgagtctgtccaatagtcctctctgcagacgctcaaagtcatctctgtttgctgatatctcttcaccagcaataaaagccttagtcgggttcgtttcttttcttccgtagattgtcctgtttgagtaacgaaacatacagtgcgtgtaccatacaacagcttgttttgtcagcggacactgcttggtgaggtttcttgcagctgtctgaatacagctgacacaatcatctcttttgacttctcttctacacagaccaattgcataagctctttctccagatgagtctccagaagagaggttgtagaagccataagcttgggatttgagtgaggagagggaggagacaaggcggttgagattcccggcaaaagtgctgttcgccgtgaagttgccacgatcaacacagttgaaatctggatcaaactcataggaatctacctgagcaaaggcatgaaatggagcaagcgttaggaaacaagcaaagaagaagataactctgacatgttccatgaaagcttgaagctttttttctctaatctatgagaaacccaccagtgtgtaatgagtctttatatggtaaatgtcgacctaatttgaccttaaaaaaaagccgtgtgttctttaaactagctcacagccgaaagaacacaagttgctgatcaaaaacaattataaatttcagtaacagacagacacaagtggacagccattgtaagcttgttgggtcctgcatgatgatatataaaaatttcaatataaaaatttaggagttggtgcaacgaatcaggtcaacggtgtgtgaaataagaagttataagttacaagaaaacatttaaaataagtttatatttctcacttcttttctctccaggaccaataagaactcaaagtctgaaactttaaccaactagaaactaaaactaatcttccattaatgggaaataaactacttaaggacatcctagagactccttttttttttcacatccctcctgctgtatttgaatttatacttatgaggtgcggattgtggaagatctttatgtcttggatcttactcgctgaatgagacctcaaatctgaatgctttgttaatgcatcaaagaaatgcaattggaactttactagctacctcttcaatcgagaaacctgcaatttgcaaaccagaaaccaagaaaaaatgttatttttttcagcacagaaaacataactcctgcatgtactataatgaagaaaattcatactttttcacaatcctttgcttggaaataacagcaaagtaatgaagttcccgtgatgagtcaattcgacgcctttgcttatcgccgtggttccagaggtgcgtaacagagcagctggtttggatagctccatcaatcccggacattgataggccaagagctccgggagtttgtacggattataaagatccaatcagcgaagatcaatacgaccgtcgtttgaaccaacgacggcggattaagctgagggatagagtgaggacggttccactttatgaacaaaaataatctcggaccgggtcgaataatataataaccggatcggtaatgctgaacttacgtatttttgacagggtcaacggttcggtttgcttatctatttgtctctggttttaggatccttttaatttaggttcttgagttgtaaaccgaactctgtgatttccggtttggtttgaacctgtggaagtttggtcgaagagggaatggatccacgatgtatgggaaaaaagtatcagacaatgtcttagtggggatcgatcgatctgtttcttggacactaaagactcatcagtttttctttttatgacaagtggcctccagtatgacaagtgttctctatattgaatcatttcttagttgtttgatatgttgtgaatcttgcttcgtaaacagaaccaacataaataataacttcatgtataagaacttattatgtttccgggaaatgtgggtaactctgtttctcattccttctttgcttgcaagtttctagagagggagagagaaagagagatcctcctgaggttgaggagagaccttcagtattttagggataagacaaaagtagtcatgtttatttaaattttcttcgttaaaacttcttctacttaaaatctccattgaaacagaatcattcttcaaaacattcctcatataacactgcttactaaattctgcaaatgtgccttccctttcaattcaattaaggatcattctttgctttccttgcaaggatcatttccctaacaaaccccttccacaatattgcctactcttggtataacaccacgactatagagccaaaagaaatatctgagtcgaccattttttacgacaagaaaatctgttaccaaaaaaattaaaccctatgttagctttcacaaagattgctagattccaagggttgctgcaaacccgggctactttattgttaatccgagactaccacaaacagcctgtcaaagttgtgtggaagaaacctgaaaatggacggataaagctaaactttgacggatccagaggaagagaaggacaagccagcattggaggggtattcagaaaccacaaagccgagttccttcttgggtactcagaatccataggggaagccacaagcaccatggcagaattcgcagccctcaaaagagggctcgagctggctctagagaacgggttgacggatctatggcttgaaggagatgccaagatcataatggatatcatctcgaggagggggagattgagatgtgaaaagacaaataagcatgtgaattacatcaaagtggttatgcctgagctgaacaactgcgtgttgagccatgtttacagagaaggaaatcgagtcgctgataaattggctaagttaggacatcagtttcaggatcctaaagtctggagggttcagcctccggagatagttctaccaattatgcatgacgatgcaaaaggtaagattgttcttagaacaaaatgagcccaagcaagtcaatatttgtaactaagttgtgtatatatgatcattaggttgtcaacaataacaaaccaacatatgtaattagacttttgtataatcaagatattttccactatcaaatttgatatcaatgcttctttatatcatccaacaacaatcggaatggtaaatgaattcttttttttttctttctctaagctattgtctctttatttctatatatttttacattctacgactccttgaaactcaacagctgaatctttcccagaagaatagggtaattaccaatggtcaagaatcaagattggtacctctagctctagttatataatctcaatgcaccagttgaatccgaagatgtgagttcccgaatttcctttacagcttcgctgattttatgaatcgccattttcttcacctggatattgcagcaatatattattacataaacaccagacctttctaactcaaccttgtcttaacttttaaactaagggaacgtacctcaatcttatttgctttcgatttgacgctctgaggaagttgattgagctccttcactcgtttaatagattcgctaacgtgctcaggtgacagaaacttcagaaccgcatttacacaagactagcaaacatatgcaaaagttatgttaaaaagattcataactttgagattacaaaagaaggaaagagtgtgttgggtgctaaaagtaataccttattctttctaatttggtatggacatccagcagggaggatgactgcttccccaacacattgatcaaaactccatggttcaacgtctgaacaaacaaaataagcagcatgaatttgagtctgctgttcagacataatgaaatggaaagaaaaaagtagaagaaataaggatatgatacttaccaaattcttccttaagccttgctttgtgatactcatcaagatagtaactctgctcaagtaatggatgactcacctgccaaaatgatacataacagttaacaacaagggaacatcaacaattgatcttttgtagaagcaatcgaaccatcaacacataacttaccttttttttgctggaatccatggattctagctccagagagtggttcttaatatactcaagaagtttagaaacatcttgtttttggaatacatcccactgggcaccataagtgttgcttaggctctcttcttcacaagagtagttgcaactttctctttcctctccctcaaactcactgcctctgcatttagcgcctaaacagtgttgtgaagattctgaatcagaactggaatagtcatccaacctatctcgtttctttcccttatcaaatctgctttccctcccctttgccggatttttagatcttactcttccgatgtttttcattagctttcttatcctacaaatctggtttgtggatacaggtgtttctgtgacatataacaagatatcaacctgcagagcaaatcaaaaggtttagaaaaatataagtagatctgaaaagttaaacgagaaaagtcaaaaggatatttagctgaccactacttctttagctaacaatcagagtagatcttcaattcgtaaagctaggaaattgtgaaataaaggaaaactcttccaagaatggaagttctaagaaaacataccatgtcacaagtttcaaaacctaacttcttcacagaatcaggctgtgcatattcttcaccactcctgtatgaaatattgaggcatgggccaaaatcgggtggttgtacagtgtcaggtaggttggctgcaatatttagtagaccgcgctttggatccatgtaatgggagattggtaaaatattcagtatttcagcgtaatgatttgggaactgttctttaaacaatgaagatgaaagccatccctccagcttcagcctttcttgacaagtattagtctcagcctttcctctcaaagaccccaaaaaaaattgcttgacaccaatttctacctgttattgaataagaaacagaccaattaagagaccaaaggtattccaatccagaaagataagcaccagtaacatcacggaacacaagtcactaacctcaaaccaatccatacaatcagtagtattaccggttttgttgtttctgttcataagatagtgacagaacaaggctactggatcccaattcaggcttgaaccactctttatcacactacgaactattacaggatggcctttactccagtgtgtctgaaaatgttccagattgttttgatgaaaatccagcactgtggggtagtataagaagttaccagttccgtcttctcttgtcttggatgcttctttcaaatggctgtcgctactactagattgcgtttccattccaatacaaaatggacatcccgaatatttatctaaaatttcaggcaactcatagcaactgactacttcctctgcactgatctctaacttgcttgtcaactccagagggaatagactcaaaaaaaggttattgctgcaccctttgacttctttccgcttacacacttttggagattttataccattcgagcatttaaccgatccaacctttctagataagctctcttgactctgatcttggtcagaatttagcctgagaacagaggaactgcgtgtgcacattctttgcaaatccactacggcaaagtcacgaccattgctactgagacaaatattcaaagaatttgtcagagaaaaactcagagcaaatttacatcatatgcacacttaaggtagaataaggtagcaaagtgagaaccagggctgtcgatcgtcagaggttaattcagagctatggatttgtggttcagctggatttccctctatcacaaatgtgaaaaggaatcaaaagatatgagtgagtttaacttaacagaaccgaaggatccagcaaagaaagaatccgaataacagtctaattatggatatttcagtcctaaaaacaagaaaatcatcttaagatagaaagattaagatcaaatattaaacacctttcttttctgcgtcattttccacctccactttgtgttccgcattgatttcttttagtactggaagtagcatgcacaccgcataatgtagatgcaaaaccctgtcaatatcactcctgacactctgagaatcctggaacatattatagaagtaaacaagttcatgttacagaatatctgaagaatggaaaaaacatgtaaaattttaatgccaatgaattcttaagatagtcagaccttacattcagtgactccagaattagtgactgagcaaactttgcacctacatgacccacggcatacaggacattttttctcaacttcttctttcgatcccttgttcctaattaattccaagccaaaaaacagtttgatgactgcttctaaccaattagtagatcaaaatcaagcagcctaatagcaaaattttcgaaacagagaaattccagaagcaatctcaaaattgcaggaaagagtaccccatgctacatcctaaactttaagcaagatctccttaaaagtggaaagaaaatactctgtatggacataaacagaagaaatattgcaattaagtagttaccataggtgaatgaataaccctcaagatgtcttaggtccacaaaactactgaatgtttaaggagaactatcctcttcatgcaattagtaaactagatacagatgcttaaattctaatgagactatccatcagcaaaaaggccagagatgcaaacaaaataagtaaagcaaacataaccgacgataccttttctcgatacaatctatgcaaaagaactctctttcacaactcaaacaactaatcaaatccccaaatcctctggttccacaccaatgacacctcatcttcttttccttccttccattaaccaaatcacccttgaaaggaaccaccttgacaacaacaaaccaacaaaaccaaataaatagagtaaataaagaaacaaaatggatacacaaacacaaagtatcaaaattcaagctttcagttacctgcattttcccaattggcaaaggttcaatgttcttagacctaaacctccttttaatcatcgaaattggctcttccccaactttaacatcacaaggagaagacacattactagtagtaggagaaggtggagaaattgccataataccattaggaagaaccctcgttaactcttctccaacaaattcactaaaccctccattactcttcttcttattattactatttggtaatctcttcctcttctcaacttctctcttcaacaccatccttatcaaatccaactgcaaatctcctctcttcaacttcatcttcttcactgcttcatccatagcctctgcttcacccatcactctcttcctcttcgatttccccaatctcttagacctaattctgctttcgtttggctcgatctctgaagacgccacttcatctcctcctcctcttcttgatctgacaagcttagaagactctgcaactttctgcttacttcgctttaggctttgctgcgagtgatgactctcacacatctttttcccctctaaagctcgtctcttgcaccgccattgcttaccatcagagcggttgcaacgaaactcgtcagggacgatttcgttctccgacattctcgaaagactcgaaatttctctgaattttggatgagaaattccggtggaatctctcggagtaagtgatctgaaaccagagaagaagaacggcgttgtagtgatagagagaaagagaagtgtatagagagagaaaggcaaaaaggggaagtcttttatttgcagagagaaggaagtggcaaagttgtaaatatgtggagaacgagagtcttgttttggtaacgtatgatcgcaaatatcgagaggatcttcagtttttcagttacctctcctctggtcttttttatttttttagtttttttttttatacaacactaatttgcttatatattattggttgaagaaataaacaaaaaaaattgcttttttagtttttatttactagatatatgatgatagtttctaaatttggatattttttaataaaattaaaaggtatgtctagtttacataaatttaaaattaattgcacgtagattcgatatattacgcgacaaaaaaaataactcaaatttcataaatctttagttgattacacataaatttgatatactatgtgaagaaaagtaatgctaattttttacatgaatttttagtttattacacatagattcgatgaattacgcgacaataagtaacgctaattttgcattagtttttagttgactaaacataaattcgatatactactcgacaaaacgtaacgctaatttttgttacaaaacgtgttttttaactttgtaaaaagtagcttttacctttataatattaataagttataattaattttggtaaaagaagtttaaaagttattcaaaaacatacaaaatcatttataagattttcttaatacctgcaaatctgtcatatacaaaagtagaagctgtatgtatatcattttacttttatttgcaatttctaagtattatctcaccagagtttcggtggttttttagagttttagagacatggttgagtctaaactctgaactctacagagacttgatgggtattttgaaacagtattatttgtatgttttgcgttgaataatactcatgttggatttaatatcattagacattagttttgtagttcggcttgtggcttgtgatgggcttttcatattttgagttgactagaattatgtaccatgttgtttttttgggctccaaagtccaaattgtttggcattttttactttggttgtcatactttgttggcatgacagcaaagtttaatttttcaatggaaaaataaaatcgatggccttgtacttggattcagtccgtgtacttgacatcaaataccaaactttgtctgagtttccactattgtcaattataacaagataaacatatacaatgaatttttggtcggaagaatcttcttatcaaatgtatattttttttccgttaagatcttacgactagcgattcacttacagcttttcaaaaacggatggttccaaacacaaattcacaataaacaattttaccggcaccacaagaacaaaattcatgattaacattttcaacatacattactttatagttagcagagacaactacaacggttatgcatataccacgctgaaacttttagtaaatacacattcattaatatgcgataattttaaacactaaagtcaccaaactaaaataaaaattaatcggggtaatagttgactaaaatacaaatgttcaagctgcaaataatgaatcatcagtatcgacacgaataattaggcataaacttggaatagttatatccaaattataggggtttagatccaatgtacaccaagacttcctccgttttgcaagttatgcctattttacatagcaagtgcagtcttctagactccaaaaattagtatagatgctaaaatttaaaatttccttgttatataagagtagcatcgtctacacccaacacaacatgatttgtatctattcccacattttatgtcactcattacagaccactgtcgtaaaaaataatatctattatctagtgttttctgtttttgataagtagagaatcataaatttaaattcgttttaatctctggaatctacgactaatatgtcaattctgcattgagactaaaatgatgtgtgtagcagaagttgaacttggtttaatatacatattagtttaccatactagctaccattagcatgttcaaatataataatgtttttaatgcaattccatagagatactctttaacaaactcaaaccaattgctttcaccaagtatgaaaccataggaatgcccacaatatgcctgcaaaagacacatatccactttagggcctcttatcttaacttttgaaaattgacgtatctgaatttttttcctttggacggctgactaaattggtctataaattttaatttagaaaagagttcttgttttctttgatttatagtttttgttttgcttttcttataagaaaactatttccactttccatttaatattatgggccaaccatgaatgattggatgatgttctttagacaagcattttgtatgtaattctcaatccacttcacaaaaagtagctgtctaacaaatttattagtagtttcacttcttgatatatttttcaaataaattaataatcttctgtttaacaaactactaataatatttaccaacttaaattcaacttagcttggtggataaaggctaaattaacttttaaattagaagtcactaattctaaaaacatttggtgtcattgctcatttatatttggtcttccaattagtttatttgatatagtctctctactcgctagtaatttctacaatgtctcacttttcattttaatgtttcatagttttttttccttttagtgagaaaaagtagacattaacccattttgatgtataaatgacgtatggaatacgtagccgttgaccattgtaaatttgtaacaaccacatgtgattatagaagcttctgatcgtacggacgacaataattaactatccaagtccagtagtccattttttgggcgacaataattcgcgcttaataactagcttttgggaaattttggactagtggatatgtaataaaatatctcataatttttaattgaaccatatggatcacagatttaaaccagactatcttgatatgattaaaattgagcggtacgtatgctctaaatggaccaaaaatttcgaaccatttagtgataacccaaaaatgattctgtctattagtatttttcttttgttttctttttggtgaggggaattaccaagaaaacctagtcgaaagaaactagatatagagtgaatttaggagggaacttaattaggttaactctatgaacctccaaattttgaccacaagttttgttttcttgtgatcaagtggcaatatagaaacacaacacgaagtgcatatacgagaaaaacacgttttgttgtttgtcaaagacatggagacacacacaaagcccacgaaagctaacaagagcatgtaaaacaaattttgcctttttgctttggtccgatatattcatattatcatatacgcacgcaaccgcccaaaatttgtttacccttttgtatgcttgatctgattctttgttttgaagtcaatagattgcacattgtttcttccaactcataattattttgaaactttttaggacacacggtaattggttcgaaatatcacaatcccgtgtaagttaagcgaaactaaaaagagagttgcacattgaacatacgcatcttgttaggataaagaagtaaagaacattcggtaaataagaattaataatctgaaaaacttagaaaacaagaaatggtaggctatgatgttgttttgaaatgtggcaaacggattccgaaaacacataatacataaattttgactgaatgtaatttcgtgtctgagcatggtttatttaattctagttttcacaagtttcggttttttcttagctactgaaaattctctttgtatttataaatgtgagatccatctctaagcagtttgaatgcgtccatgagtatttttttaaaaagctatacttgtttcatacataggacatctaaacacaatgtttttttttatatagtaattgttgatcttttaaagctgaatttgatatacacctgtaacataaaactttttggtttaattatgttcattttacacacaaaacaacataagactttgccttataaagtgacgaagaaaatcattagggtctttagaagaagaaccgccaaaaaagtcacagcaatagatagttgacatctataacttttgaaaggtgcactgaaaatagatacatatgaggaagaaaaaatcgtatgtcaaaatcacagcatttattcgatcaaaaagttttttttagttgtttacattttttagttgggaaatttgcatggataacataaaaaaacttttaaattaagaaactaaccatttacaaaaaacatacactataatagttgtgtaatatataatattacaattttctcctcaccatcaccactactgctgttgctgccaccgccactacctccgcccctccaccgccaccgcccctccgccgccaccgccgccaccgccgcgccaccgtccttaccggaataaatgccatcactggagccattactccattgttggggttcccattgtcaccggagccatcgccgtcgtcgaaatcaccaccgtctccggagtcgtcgccgaagctgccgccgtcgccggagtcatcgccggagtcggaatcaccgccgtcgccggagtcaccgccggaattactgccgtcgccggagccaccgtcggagctgccggagtcgccggagctatcaccggagttaccaccacctatagttatttaatatactctttaggttagtttgttaattgatatatatataatgctattttcttaattatttattgaaaagatgttagttttgcaattcatcctttttagtttgttttaaaaaaaaaaaaaaaagtgtgtcatgtacttatgtccaatccagcagtcaaaaaaataacacctcatcagaaaaaaatcgtcgttcaacacaataggggcccactaatctattattgagttccacgtgttctctaatcttaaatggttgtgtgataactacacgtgtaaagccatcaaaaaacctacgccgtgatttcaataataaggaggctttctttttttctttttgccttaattacatgccaagtcatcgacactatatagacacgtgtcgctagcccattaggtacttttcataatcccatgtaacaacagtactcctttacttcatgtaaagatgagaacacgtgtccctcacgcgcctgcaattcttcccggtccggttcgtcactttgtgattccaataatttaaattaaacttagccatacaaagtgtgtctttcatttctgtatgtttttgtgtttagaattgaatatttaactaaactaattattggttatttgattttatgaatgaaaactccaaattatcatgaaacatatacgatatataggtctttctaaaataattctaaaacatgaatgaatttacatttatatatgtagcaatgatggtagcagcctttggtactactcttgtagtattgtaagtcgttgagatgatttaaaggaaatactattatttaagtttttagttcatttaaaaagttacttcagatcttgctggaaactttaaccaaaaaacaaatatatatatcttgctggaaatgcatgtgggagatcttgtgatcatgaaaaaactatagaaattttatggtgaatcatttggactttattggttaggatcatacgtttccattaataccttttgggaaacatgacataagtcaatgatgtaataattaaaatactatgtctatatcaggaaatttctgcacctcatatcaattatatattgtacatatcaatttcagcacctcatatcattgagccaaatttttaataatattgacaggaactatgcatatgttgaagtaaagccggacaaatattaatatttaaatataaagtgtatatcaataatggaaactccataattttaaaaatggtattagctataaactctagagaaatataacaaattaacaacaaaacgaaaacagtattttacaagtaaacaaatcggaaaaacaaaaaaaaaagtcttaagattacaacaaagaataaaaagaaaactgtatcccactcgagttttattttgtttcttggaattatataataaaaccattaacgtccaagaaatcgggaatatcaaacttcatgagattactgcaatagctttctatttcatcctcagtgctgcaactgctactattgatgtaactcgagtttaacgtagtcgggctcgggctcgaggatggcgtgtttaagaccgaatttgcgaagttgaagctctgatccgaataagaaggatccaagacaaaatttgaacttgaataatcgttgaatgacggattatagcaatcttggactgacgtagtagaagttgaaacaagattttgttctccaaaaccattgaagtgatgatccatgttgttaaactgacgagcttcattggggaatggtggcatggaagattggagttcttgagtaatcgtgttctcgaaatattggttggtttggtattggtttactccggtttggctataaactgtttgcttctcttgagttctcgagtcatgatccaccacaaggttttggttttgattttgagagaagagagaggtagcgagcttgagtatctcggggttaaccaatggatgttgctggtgatgacgacgattagtatccatcatgagtcttgacatgttcatgtgatgtgaagatgaattgtatagagatgaagctaagatggatgagatatcgaggagatcgagtcgtggactgtgagtcactggatcaatccccattctaagtagcttctttcttatatgagtgttccaaaagttcttgatctcattatctgttcttcctggtaaacgcgccgcaatcgcagaccacctataacaagataaaccaaacacgtaagaatcttgaactattttcatagtagatattgtcggaggagaaaaaaaaagcaaacttacttgtttcctaagaagctatgaagctgaataatggtttcttcttcctcaaaagagaaccttcctcgctttatatctggtcggagataattagtccaccttaacctacaacttttgccacatctttgcaaacctgatgaagagaaaaaaacatattacaatttgaaactttcgaaaaacataactaaaacatgaataataaatgaaaattaagacacgtaccggcatttttggggagggttctccagttaccataaccatgtttctggatatagtcaacaagcttctggtcttcttcagatgtccaaggccctttcttgagtccgttcttctcgcaacaaggtgaccttgccattgattgtttatcagaaaaaaatggtcaactggtttagtatttatgagctaatcagagagtttgaggaaaactatagtattaatagagaagagagaaacaaaaggtcgtagggtccgtaaggggaagtacaaagtatttatagggagagaagaagagggaagtcaaaatggttcggtgccgtcctctgtttatcaattggtatacgtgtcccataaaaacaaaaatctaatagattttgcgtttatacgatgcttttatccattattatggatgctttttattttatttttacgtttgtggcagctatacgagacatgccttgatgatttttttcttctttttttcttctttttctgagtttgtttttatgcttacatgttaaacgttcaaaattgaacacaacacattgatagtgttttagtctttggaaatatagaaatatagatgcaaatacaacgaaaacttccttttgtgtttcgtgtttacattttatatttccaagatgatatatggtcaaatattattaaagttcaagtaagttttataaggtgtaaataacatgcatctcaaaagtgcaaatgtcatatatttaagcaagtaaatcgaaccatggtcggtgttgattacaaaaatagatttgtgttcgtgtaatatatatgcttcctgaaaacaaaattagtcatttttgtcttcttgatattgtgcacttacgaaaccttgaaacaaatgtctttatattaagctttcttgatatactttgatcacttttaaagtagctgtgacgttgaaaaaagtgcagttttgttaagttccttcctcaatgaaacacatgtatgagtcaatcaacctaggaaagaaaaacaagcgtatattttttctaaccaataaccatgcatcaataatctcaaagatggttataaacatccctaaaacgagacctagttttagcatataagatttaatgtgtacgtactcttattcgagattaataatgagagtttcttatatatattggatttgaattgtatacaaagataatcattaaatatactaaactaaaaaaactcatactaaaatgtagaaatatgtagtttcattgtacattcaaatgcaaatgaaggaaatagttgtttcaacgttgttaagtttaacacacaagtactatactgaaataaattcgaaataagaggactttaattaggaaacagtttgtgataatgaaagtaacacaatcaatggggtgaggattgatgaacgactaaaaa

SEQ ID NO: 607 - DNA, 95266 bp, Arabidopsis thaliana
gttccaacaacgcgaaccgtgttagcttcattttggttaccaccaaagatccttgccataccaaaatctgagatctttggattcatctctgcatctaacaacacattgctaaccttcaagtctctatgaatgattctcaatcttgaatctctatgaagataaagcaatcctctcgcaatcccttcaattatcgaaaaccgcagtttccagtctatcaacgcttgtttcgtttcatctgtacattcaaaagagcaaaactaagaagaatgaaaggaagtgcttattctttcttggatctttaaaaaaggaaacataccaaagaggaagaaatccaagctcttgttaggcatatactcataaacaagcattttctcttctccctcgaagcaacatccaagtaatctcacaagattccgatgttgaagcttcgctatgagaataatctcattcttgaattcatcaactccttgtcctgatttaccagacaatctcttcacagctatctcacgtccatcttcgagaacaccctgataaatatcacaatcatcaacaaaaaaatcacaaaaattaaacacaaagactcttgtctataaccaaagtaatcaaccaaccttgtagactggtccgaatccacctcttccaagctcattttctttgcagaaatcattagtagctatggctatagcattcagagaaaagacaggtaactcggatgtgttaacagctttcccttcaatcattatgtctactgatcctgaaaacgctgaagtagtttctttgctcttggtcagatcagcaacaacaaccgatgtatcggtgttcttaccacaatatgctcctgaaacatctgcatataataaagagaagtaaatcaacaagatcttatgatgcagtaaccaaactaagaaatcaagaaagaacgtagttagtacctttctttctcttgaatctccatagaagcagagcaaagattcctatcaagatcacaccaacaagaaccgcgacaatcactgcaatctttgttttcctgttctcccctacttcggaatcagcaagacggatatgaagcgaagaaccaccagcttcaaactgttgtaaatccactaaatcttggttccaaatcatgcatccaataccaccaacaagagaataagcattgcaagaacaattcctcagacacctctctctgcaatcctcaggatcaacaagattatgttcaggaatttcaaaatcaggcaacttcacagatttcaaagtcaagaactcatcctctccaacactaatgttcctttcacacttcaacggtgttcttcttctacaacctctactccaattcccaacagaaacttgctcataaccatgaatacagctacagattccattagagcccttcatatcacaaataccaaacttgccacaacgattatactgatcacactcactatctggctcagactgaaacttagtccacttcttcaaagtctcattccatctcaattcctcttcggttccattataaagaaccttaaacctaagtaacactgatggatctgaaggaacatacgtgaagtacacgctacctgtttcatctggaggagatgaaagcttgaatccgtaaagataattcgtcaacagagacatattcggaatcccggtaaaaatcgcagagttccattgcccgcttctccatttcctcgtcttgttcccttcccaaagcacaatctctggtgctccagagggatcaacccctaatgagtaattaccaggggaaggatcagtctcagatctccatgagacaaaagcgtgattgtctccggtttgtggattcacacgaactctcatctgcggtaagaaggtatctgttgggtgattgaaactctcccaaataggtctatctgtgtcggtttcagacaaaacaaagttcccagtgtcatgtatagaaacgactctgttgttgttgttggtagtgcttgactcgatgtttgaagaccagacagtgatgttcttcccgtctaataacacgagattaccatcgttgcttatcatgagaactccagattggtctgaaattggagttgctctgtttgctacccataccacagctttatcctcgatgttcccataccaaatccctaggaaacgatgcgtagagcttccaggactgaagaaacctagctcgaatgtcttttgtggagagactaaaggtttgtgattgattccgtctcttaaagattcgcctcttctgattgtatttgcagccatggaagattcataaagaaagaagtataagaagagagaaagataaagtgaggttttgcggaagaatctcattttcttggggtttagtgttggagaagaagacacaagtgaggatcttcgtaataaaggattggtttttgaggtttgcttaaagatgaaagaagagaaacagaggaactgtgtctgtcacaatggcggaaacttcctattgataaaaaagtaagaggagaggtgacaaaggagaagggatacaaaaaggaaaggttgctgttttattgctgttgagaagtttctatatttttgtctcgtcaggttggaaagttggaccagagaattgaaataaaaaggtcaaactgtttgaattattatcatctttataaggtattattattattgtcttttaattcttttttgtcatctactttttttgttctttttcaagattatacaacctgcatagaaatatgtgattggtggctgacctaattgttttgaaactttttcttacatctctaagaggattttggacggtgtcagttgacacatgatggattagatactttagcggttcaatttttattaagaaagaaagttaggttttcaagttacatgatttagtaaaaattatattacaattatatagtttccattgattagaaacgtatattaatacaatgacttaggacgatccaaccattcatatcttgtatggactacttctgacgtccttagttcatagtcaatgtttaagagtgatgaggatttatcaaatggttgatgataataagaacaatgagaaggtaatagtatattcctattgtataaggccatcgaagaaaatgtataagctataggtgtggttaccaaatttgaaaataaataagtatgtcaggcaattagtggagcagttggctttgtatactagtttagtggaatatttgcttagttatataatacttagattagatatgcttgttgcctttggccgccacattgactcatatggtcaaagtatcgcacacttgatttggatgggtcttctctttattttattgcacgtgacatattttacgtatcttgatatttcaaattgtattccttcaaagtttaaatgttgtttgctcgcctaaaatcccataataaccctacaattatttagtaatcttttttttgcatgacgcttaagtatttatatctaatatcgatgcagccaaacctcaagtggattgcactagcaagtggcactaaagcatatattgatactcatacaatgccagatcgattctggagtttacattattgattcatttggtggattagttgattacaagtgaaaatttacaaatgtattagtttaactgagagaatgtggctactaggcaacaaaacctaataaagaaacaaacacccatctccatctaaaaatgctccaagggtccacaatgcttagtcatgaattctatagctacattattaggagttaagataaagaaaactgtatttaacattgatttgttgcttttgaaaagaccaatgtgtatgcatttcatgtgtaggataaagtagaaagcttttcttagtaaaagtctaatactattttcattttcttaagttaaatttcatgttatatgttttaaaacacagtaaaatcgaatttgcaaaacaaatctaccattaacgacgaatgtgtagaactaaaagaaaaagctataacttctactcgtttcaaaagctagatgaagccaagctgtctaaaaaatcacacaaacaaaatccatcattgaagaaactaaaaagatatgcagattaagcttcctaacgaggagataactcagaaacagtgacatcattcaaggacattaataacggttctgtggaagaagaaacattcatcgaaggcatgacactctctaacgcaaaggcgggccttgaaggcgttgggagagtataggaatagctattgagcattagagcaaccgaatccatagttggtctactcgctggactttcttgaacacataaaagaccaatgtgtatgcatctcaagatctcgcttcttgatcccgtggttagactcggatcaataacgcttagtataatgtcttctctccaacatctccacacctgagaaacaaacagaattacaaattcagttaacatgatgaatcaaactcaaacctcaattacctggttggttttgtgtacttacccaactaaggagattttctgcctcttcgtcatcatttgatcgaccattattgtttcccttacccgtaatgatctctatgactaatacaccgaagctgaaaacgtctgttttcaccgagaattgaccgtaaatagcgtattctggagccatatacccgctacaagatgaataacgggtttataccggtgtttcttggttaatgagttagtaagatgaagtaacttactaagttcctgcaattttgcttgtaaatcgatgtgtcgaagtttggtctgtgtcatagagtttagctaatccaaaatctgcgattttcggattcatttcttggtccaaaagaatgttgctagctttaagatcacggtgaattatccggtaacgagagtcttcatgaagataaagaagtcctctagcaactccacctatcattttgtatcgcactccccaatccaaaagttgacgctttttaagatctgtaacagcgtaaagatcaacacagagcagaaaaaacagaacggtaggatcatcatatggagaaaacggcggaaaacaattaccgaagatgaaattgtcaagactagcgttcttgatgaactcatagacaaggattcgttcttgtccttctatgcaaaaacctaatagcctaaccaagttcctatgttgaagctttgcaagaagtaaaatttcgttcttgaattcactgtctccttgtcctgaagtacacgataatcttttcaccgcgatttcttgcccacccgagaacacaccctaagaaatgcatcatccttagcttataaatctaaccaagggaaaccaaagttaccgttaagaagttttctcaaagaaacataccttataaactgagccaaacccaccacgtccaagttcattttctggtgaaaagttatctgttgctgcctttagagtttcaaagtcaactaccaacgaatctgagaactcatcctctgcatttgatcctgacaatgaacatagttctcaggataaatagtttatactttgtaacaagataacgataaccaaaagaagaaggttgtgtttgttacctttgactctacctacagacttgttcttcttccacttcaagagcaagcataggcaaattgcaaataacgcaacaaaaactattgggatgactatcgcaacaatgactttagatccacctttgccctttcctgaaatgaaacattcaatcttagagacaactgctgcaacagtacaaattcaaatatttctatgcacctgttctctcagttcttgcagctgatgttggggagtcagcaggctgaatagcaggtggatcaggctctagatcggcatcgaactcgtagaatcgccaggtctcaaatctgtagctacaactaggaaaaaaccacctaagaccaacctgaccagcacaacaacctgggatcttttcaaaaccaaagactagacagtcattacaatcctgttcagacaaatccggcgtacagtgtgcacttccgtagaattgcgggtaccctgccacacccgaaccgctcccttgagcgtattttctatttggcccaccagctgcagcaatccctttgagtctgtccaatagttctatctgcagacgatcaaactcatctctgtttgctgatatatttttaccggcttgaaaagacagagttggggtcgtctcttttcttccatagattatcatgttcgagtaacgaaacatacagtgtgtgtaccacacaacagcttgatttgtcagtggacactgctcgatgaggtttcttgcagctatctgaatgcagctgagacaatcatctctttttacttctcttctacaaagaccaattgcataagctctttctccagatgaatctccagaagagaggttgtagaagccataaggtttggatgtgagtgacgagagagaggagacaaggccgttgagattaccagcgaaagagctgttggccgtgaaattgcctccactagctacacagttgaaacctggaggaaactcatatttatccttctgtgctaagcagataaatggtacaatctttaggacacaagcaaagaagaaaaagataactctgacatgttccatggacgcttgaagcttttttcttcttctgtaatctatatgagaaaaccccagaatgtaataacgagtctaaaaatggaagaagtcaatctaacttgaccttggaattattcaaaagcagtatggtctttgaactaaatcaatatccaacagcagaaagaacaaaacttgttgatcaataacaattataaaacccagtagcaaacacaagtggagtctttatgaggttgtgggggtccatgatggtagtagattcaaagactcacaatatgaaactaacgacttggtgtgaaaacgttatttaaattagaagtgttcattgctcacttctttccccacaagtaccaggaaagaaaactaaagagtttgaatacttttcaaacctactagaaaatataagactaactaggaaccatctaatttcgtctaagccatttattttacaatttcttttacttctgtagatgattagtggatcatctttcaactctcatatttatatatgtggactcaatataaatctcttatccaattttctaaacttactgacatatatatatacttctatcaaattgtaccttaaaacgaaatcaagtaacgataaactggaagaaaaaaaatgagacaaaggaaaaagtatctcacagcttcacattcatgttttattcacaacaagatcaagccaggctgcctgaaaaatcacacaaacaaaacccatttcaaaggttttcagagaagaatcaaaacatttacagattaacgaggagaaaactcagaaacagtaacatcatttgacgacatttgtaacccttccgttgaagaagaaacatttgaaggtatgacgacactctccaacacaaacgcaggcctcaaaggcgtcgggagggtaaaagaatagctattgagcatgagagaaaccgtagccattgttggtctagtcgctgcactttcttgcacacataaaagaccaatgtgtatgcatctcaagatctcatttcttgatcctgcggttaaactcggatcgatcacgcttagtatagtgtcttctctccagcttctccacacctgaaaagaaaaacagaatcacaaattttatcaacaagatgaccaaaactgaaaccccatttactagcttggttttggatactgtacttacccaactaagaagatcttctgcatcttcgtcaccattcgatccaccattgttgtttcttttacctgtaatgatctcaatgactaatacaccgaagctgaaaacatctgttttcacagagaattgtccatgcattgcgtattccggagccatatatccgcttaaaattgaaatgataactggtttatactggtgtttcctggatttataagttagttaaatgaatttacttactaagttcctgcaatcctgcttgtgaatcgatgtgtcatggtttggcctgagtcaaagagtttagctaatccaaaatctgcgattttcggattcatttcttggtccaaaagaatgttgctagctttaagatcacgatgaattatccggaaacgagagtcttcatgaagataaaggagtcctctagcaattcctccgatcattttgtaccgcactacccaatccaaaagttgacgcttctcagtatctgcaacggcgcaatggtcaatgcagagcggaagaagaatggtaggatcagatcgagtaaaagccggaaaaagatttaccgaagataaattggtcaagactagcgttcttgatgaactcatagacaaggagtctttcttctccttgtatgcagaaacctataagcctgaccaagttcctatgttgaagctttgcaagtagtaatatttcgttcttgaactcgttgtctccttgtccagaattacccgataatctcttcaccgcgatttcttgcccctgagggaacacaccctgagatacataatcccaagtttataaatctctcaaataaataaaccaaagttaccggtaagaagtttgttcgaagaagcttaccttataaactgaaccaaacccaccacgtccaagttcgttttctgaagaaaagttatctgttgctgtctttagagtctcaaaatgaactaagagtgattctgtgttcgagaactcatcctcggcaattgaacccgacaaaggtgatttcccaagaactgaatacgcagatagtatttatcagaactaatagttaatccattagtaacaagataacgataacacgaagaagaacactgtgttacctttgtttttatatccagacttgttcttcctccacttcaagaccaagcataggcaaattgcgagtaacgcaacaagaagtatcgggatgactatcgcgataatgactttagatccacctttgccctttcctgcaataaaacattcactatcttaatcttagaaacaaaaacatattctgctagggacaacatctgcagtagcacacacgagagaaacattcaaacatttctatgtacctgtcctctcagttcttgcagctgattgtggtgaatcagcaggctgaattgcaggtggatctggctctaggtcggcatcaaactcgtagaatctccacgtctcaaaccggaagttacaactaggagaaaaccaccgaagaccaatctcagcatcacaacaactcggaatattctcaaacccaaaaactaaacaatcattacaatcctgttcagacaaatctggcgtacattgcacagttccatagaatctccggtacccagccgaagctgaaccgtttccttgagcgtatttcctattaggcccaccagcagccgcaattcctttgagtctgtccaatagtcctctctgcagacgctcaaagtcatctctgtttgctgatatctcttcaccagcaataaaagccttagtcgggttcgtttcttttcttccgtagattgtcctgtttgagtaacgaaacatacagtgcgtgtaccatacaacagcttgttttgtcagcggacactgcttggtgaggtttcttgcagctgtctgaatacagctgacacaatcatctcttttgacttctcttctacacagaccaattgcataagctctttctccagatgagtctccagaagagaggttgtagaagccataagcttgggatttgagtgaggagagggaggagacaaggcggttgagattcccggcaaaagtgctgttcgccgtgaagttgccacgatcaacacagttgaaatctggatcaaactcataggaatctacctgagcaaaggcatgaaatggagcaagcgttaggaaacaagcaaagaagaagataactctgacatgttccatgaaagcttgaagctttttttctctaatctatgagaaacccaccagtgtgtaatgagtctttatatggtaaatgtcgacctaatttgaccttaaaaaaaagccgtgtgttctttaaactagctcacagccgaaagaacacaagttgctgatcaaaaacaattataaatttcagtaacagacagacacaagtggacagccattgtaagcttgttgggtcctgcatgatgatatataaaaatttcaatataaaaatttaggagttggtgcaacgaatcaggtcaacggtgtgtgaaataagaagttataagttacaagaaaacatttaaaataagtttatatttctcacttcttttctctccaggaccaataagaactcaaagtctgaaactttaaccaactagaaactaaaactaatcttccattaatgggaaataaactacttaaggacatcctagagactccttttttttttcacatccctcctgctgtatttgaatttatacttatgaggtgcggattgtggaagatctttatgtcttggatcttactcgctgaatgagacctcaaatctgaatgctttgttaatgcatcaaagaaatgcaattggaactttactagctacctcttcaatcgagaaacctgcaatttgcaaaccagaaaccaagaaaaaatgttatttttttcagcacagaaaacataactcctgcatgtactataatgaagaaaattcatactttttcacaatcctttgcttggaaataacagcaaagtaatgaagttcccgtgatgagtcaattcgacgcctttgcttatcgccgtggttccagaggtgcgtaacagagcagctggtttggatagctccatcaatcccggacattgataggccaagagctccgggagtttgtacggattataaagatccaatcagcgaagatcaatacgaccgtcgtttgaaccaacgacggcggattaagctgagggatagagtgaggacggttccactttatgaacaaaaataatctcggaccgggtcgaataatataataaccggatcggtaatgctgaacttacgtatttttgacagggtcaacggttcggtttgcttatctatttgtctctggttttaggatccttttaatttaggttcttgagttgtaaaccgaactctgtgatttccggtttggtttgaacctgtggaagtttggtcgaagagggaatggatccacgatgtatgggaaaaaagtatcagacaatgtcttagtggggatcgatcgatctgtttcttggacactaaagactcatcagtttttctttttatgacaagtggcctccagtatgacaagtgttctctatattgaatcatttcttagttgtttgatatgttgtgaatcttgcttcgtaaacagaaccaacataaataataacttcatgtataagaacttattatgtttccgggaaatgtgggtaactctgtttctcattccttctttgcttgcaagtttctagagagggagagagaaagagagatcctcctgaggttgaggagagaccttcagtattttagggataagacaaaagtagtcatgtttatttaaattttcttcgttaaaacttcttctacttaaaatctccattgaaacagaatcattcttcaaaacattcctcatataacactgcttactaaattctgcaaatgtgccttccctttcaattcaattaaggatcattctttgctttccttgcaaggatcatttccctaacaaaccccttccacaatattgcctactcttggtataacaccacgactatagagccaaaagaaatatctgagtcgaccattttttacgacaagaaaatctgttaccaaaaaaattaaaccctatgttagctttcacaaagattgctagattccaagggttgctgcaaacccgggctactttattgttaatccgagactaccacaaacagcctgtcaaagttgtgtggaagaaacctgaaaatggacggataaagctaaactttgacggatccagaggaagagaaggacaagccagcattggaggggtattcagaaaccacaaagccgagttccttcttgggtactcagaatccataggggaagccacaagcaccatggcagaattcgcagccctcaaaagagggctcgagctggctctagagaacgggttgacggatctatggcttgaaggagatgccaagatcataatggatatcatctcgaggagggggagattgagatgtgaaaagacaaataagcatgtgaattacatcaaagtggttatgcctgagctgaacaactgcgtgttgagccatgtttacagagaaggaaatcgagtcgctgataaattggctaagttaggacatcagtttcaggatcctaaagtctggagggttcagcctccggagatagttctaccaattatgcatgacgatgcaaaaggtaagattgttcttagaacaaaatgagcccaagcaagtcaatatttgtaactaagttgtgtatatatgatcattaggttgtcaacaataacaaaccaacatatgtaattagacttttgtataatcaagatattttccactatcaaatttgatatcaatgcttctttatatcatccaacaacaatcggaatggtaaatgaattcttttttttttctttctctaagctattgtctctttatttctatatatttttacattctacgactccttgaaactcaacagctgaatctttcccagaagaatagggtaattaccaatggtcaagaatcaagattggtacctctagctctagttatataatctcaatgcaccagttgaatccgaagatgtgagttcccgaatttcctttacagcttcgctgattttatgaatcgccattttcttcacctggatattgcagcaatatattattacataaacaccagacctttctaactcaaccttgtcttaacttttaaactaagggaacgtacctcaatcttatttgctttcgatttgacgctctgaggaagttgattgagctccttcactcgtttaatagattcgctaacgtgctcaggtgacagaaacttcagaaccgcatttacacaagactagcaaacatatgcaaaagttatgttaaaaagattcataactttgagattacaaaagaaggaaagagtgtgttgggtgctaaaagtaataccttattctttctaatttggtatggacatccagcagggaggatgactgcttccccaacacattgatcaaaactccatggttcaacgtctgaacaaacaaaataagcagcatgaatttgagtctgctgttcagacataatgaaatggaaagaaaaaagtagaagaaataaggatatgatacttaccaaattcttccttaagccttgctttgtgatactcatcaagatagtaactctgctcaagtaatggatgactcacctgccaaaatgatacataacagttaacaacaagggaacatcaacaattgatcttttgtagaagcaatcgaaccatcaacacataacttaccttttttttgctggaatccatggattctagctccagagagtggttcttaatatactcaagaagtttagaaacatcttgtttttggaatacatcccactgggcaccataagtgttgcttaggctctcttcttcacaagagtagttgcaactttctctttcctctccctcaaactcactgcctctgcatttagcgcctaaacagtgttgtgaagattctgaatcagaactggaatagtcatccaacctatctcgtttctttcccttatcaaatctgctttccctcccctttgccggatttttagatcttactcttccgatgtttttcattagctttcttatcctacaaatctggtttgtggatacaggtgtttctgtgacatataacaagatatcaacctgcagagcaaatcaaaaggtttagaaaaatataagtagatctgaaaagttaaacgagaaaagtcaaaaggatatttagctgaccactacttctttagctaacaatcagagtagatcttcaattcgtaaagctaggaaattgtgaaataaaggaaaactcttccaagaatggaagttctaagaaaacataccatgtcacaagtttcaaaacctaacttcttcacagaatcaggctgtgcatattcttcaccactcctgtatgaaatattgaggcatgggccaaaatcgggtggttgtacagtgtcaggtaggttggctgcaatatttagtagaccgcgctttggatccatgtaatgggagattggtaaaatattcagtatttcagcgtaatgatttgggaactgttctttaaacaatgaagatgaaagccatccctccagcttcagcctttcttgacaagtattagtctcagcctttcctctcaaagaccccaaaaaaaattgcttgacaccaatttctacctgttattgaataagaaacagaccaattaagagaccaaaggtattccaatccagaaagataagcaccagtaacatcacggaacacaagtcactaacctcaaaccaatccatacaatcagtagtattaccggttttgttgtttctgttcataagatagtgacagaacaaggctactggatcccaattcaggcttgaaccactctttatcacactacgaactattacaggatggcctttactccagtgtgtctgaaaatgttccagattgttttgatgaaaatccagcactgtggggtagtataagaagttaccagttccgtcttctcttgtcttggatgcttctttcaaatggctgtcgctactactagattgcgtttccattccaatacaaaatggacatcccgaatatttatctaaaatttcaggcaactcatagcaactgactacttcctctgcactgatctctaacttgcttgtcaactccagagggaatagactcaaaaaaaggttattgctgcaccctttgacttctttccgcttacacacttttggagattttataccattcgagcatttaaccgatccaacctttctagataagctctcttgactctgatcttggtcagaatttagcctgagaacagaggaactgcgtgtgcacattctttgcaaatccactacggcaaagtcacgaccattgctactgagacaaatattcaaagaatttgtcagagaaaaactcagagcaaatttacatcatatgcacacttaaggtagaataaggtagcaaagtgagaaccagggctgtcgatcgtcagaggttaattcagagctatggatttgtggttcagctggatttccctctatcacaaatgtgaaaaggaatcaaaagatatgagtgagtttaacttaacagaaccgaaggatccagcaaagaaagaatccgaataacagtctaattatggatatttcagtcctaaaaacaagaaaatcatcttaagatagaaagattaagatcaaatattaaacacctttcttttctgcgtcattttccacctccactttgtgttccgcattgatttcttttagtactggaagtagcatgcacaccgcataatgtagatgcaaaaccctgtcaatatcactcctgacactctgagaatcctggaacatattatagaagtaaacaagttcatgttacagaatatctgaagaatggaaaaaacatgtaaaattttaatgccaatgaattcttaagatagtcagaccttacattcagtgactccagaattagtgactgagcaaactttgcacctacatgacccacggcatacaggacattttttctcaacttcttctttcgatcccttgttcctaattaattccaagccaaaaaacagtttgatgactgcttctaaccaattagtagatcaaaatcaagcagcctaatagcaaaattttcgaaacagagaaattccagaagcaatctcaaaattgcaggaaagagtaccccatgctacatcctaaactttaagcaagatctccttaaaagtggaaagaaaatactctgtatggacataaacagaagaaatattgcaattaagtagttaccataggtgaatgaataaccctcaagatgtcttaggtccacaaaactactgaatgtttaaggagaactatcctcttcatgcaattagtaaactagatacagatgcttaaattctaatgagactatccatcagcaaaaaggccagagatgcaaacaaaataagtaaagcaaacataaccgacgataccttttctcgatacaatctatgcaaaagaactctctttcacaactcaaacaactaatcaaatccccaaatcctctggttccacaccaatgacacctcatcttcttttccttccttccattaaccaaatcacccttgaaaggaaccaccttgacaacaacaaaccaacaaaaccaaataaatagagtaaataaagaaacaaaatggatacacaaacacaaagtatcaaaattcaagctttcagttacctgcattttcccaattggcaaaggttcaatgttcttagacctaaacctccttttaatcatcgaaattggctcttccccaactttaacatcacaaggagaagacacattactagtagtaggagaaggtggagaaattgccataataccattaggaagaaccctcgttaactcttctccaacaaattcactaaaccctccattactcttcttcttattattactatttggtaatctcttcctcttctcaacttctctcttcaacaccatccttatcaaatccaactgcaaatctcctctcttcaacttcatcttcttcactgcttcatccatagcctctgcttcacccatcactctcttcctcttcgatttccccaatctcttagacctaattctgctttcgtttggctcgatctctgaagacgccacttcatctcctcctcctcttcttgatctgacaagcttagaagactctgcaactttctgcttacttcgctttaggctttgctgcgagtgatgactctcacacatctttttcccctctaaagctcgtctcttgcaccgccattgcttaccatcagagcggttgcaacgaaactcgtcagggacgatttcgttctccgacattctcgaaagactcgaaatttctctgaattttggatgagaaattccggtggaatctctcggagtaagtgatctgaaaccagagaagaagaacggcgttgtagtgatagagagaaagagaagtgtatagagagagaaaggcaaaaaggggaagtcttttatttgcagagagaaggaagtggcaaagttgtaaatatgtggagaacgagagtcttgttttggtaacgtatgatcgcaaatatcgagaggatcttcagtttttcagttacctctcctctggtcttttttatttttttagtttttttttttatacaacactaatttgcttatatattattggttgaagaaataaacaaaaaaaattgcttttttagtttttatttactagatatatgatgatagtttctaaatttggatattttttaataaaattaaaaggtatgtctagtttacataaatttaaaattaattgcacgtagattcgatatattacgcgacaaaaaaaataactcaaatttcataaatctttagttgattacacataaatttgatatactatgtgaagaaaagtaatgctaattttttacatgaatttttagtttattacacatagattcgatgaattacgcgacaataagtaacgctaattttgcattagtttttagttgactaaacataaattcgatatactactcgacaaaacgtaacgctaatttttgttacaaaacgtgttttttaactttgtaaaaagtagcttttacctttataatattaataagttataattaattttggtaaaagaagtttaaaagttattcaaaaacatacaaaatcatttataagattttcttaatacctgcaaatctgtcatatacaaaagtagaagctgtatgtatatcattttacttttatttgcaatttctaagtattatctcaccagagtttcggtggttttttagagttttagagacatggttgagtctaaactctgaactctacagagacttgatgggtattttgaaacagtattatttgtatgttttgcgttgaataatactcatgttggatttaatatcattagacattagttttgtagttcggcttgtggcttgtgatgggcttttcatattttgagttgactagaattatgtaccatgttgtttttttgggctccaaagtccaaattgtttggcattttttactttggttgtcatactttgttggcatgacagcaaagtttaatttttcaatggaaaaataaaatcgatggccttgtacttggattcagtccgtgtacttgacatcaaataccaaactttgtctgagtttccactattgtcaattataacaagataaacatatacaatgaatttttggtcggaagaatcttcttatcaaatgtatattttttttccgttaagatcttacgactagcgattcacttacagcttttcaaaaacggatggttccaaacacaaattcacaataaacaattttaccggcaccacaagaacaaaattcatgattaacattttcaacatacattactttatagttagcagagacaactacaacggttatgcatataccacgctgaaacttttagtaaatacacattcattaatatgcgataattttaaacactaaagtcaccaaactaaaataaaaattaatcggggtaatagttgactaaaatacaaatgttcaagctgcaaataatgaatcatcagtatcgacacgaataattaggcataaacttggaatagttatatccaaattataggggtttagatccaatgtacaccaagacttcctccgttttgcaagttatgcctattttacatagcaagtgcagtcttctagactccaaaaattagtatagatgctaaaatttaaaatttccttgttatataagagtagcatcgtctacacccaacacaacatgatttgtatctattcccacattttatgtcactcattacagaccactgtcgtaaaaaataatatctattatctagtgttttctgtttttgataagtagagaatcataaatttaaattcgttttaatctctggaatctacgactaatatgtcaattctgcattgagactaaaatgatgtgtgtagcagaagttgaacttggtttaatatacatattagtttaccatactagctaccattagcatgttcaaatataataatgtttttaatgcaattccatagagatactctttaacaaactcaaaccaattgctttcaccaagtatgaaaccataggaatgcccacaatatgcctgcaaaagacacatatccactttagggcctcttatcttaacttttgaaaattgacgtatctgaatttttttcctttggacggctgactaaattggtctataaattttaatttagaaaagagttcttgttttctttgatttatagtttttgttttgcttttcttataagaaaactatttccactttccatttaatattatgggccaaccatgaatgattggatgatgttctttagacaagcattttgtatgtaattctcaatccacttcacaaaaagtagctgtctaacaaatttattagtagtttcacttcttgatatatttttcaaataaattaataatcttctgtttaacaaactactaataatatttaccaacttaaattcaacttagcttggtggataaaggctaaattaacttttaaattagaagtcactaattctaaaaacatttggtgtcattgctcatttatatttggtcttccaattagtttatttgatatagtctctctactcgctagtaatttctacaatgtctcacttttcattttaatgtttcatagttttttttccttttagtgagaaaaagtagacattaacccattttgatgtataaatgacgtatggaatacgtagccgttgaccattgtaaatttgtaacaaccacatgtgattatagaagcttctgatcgtacggacgacaataattaactatccaagtccagtagtccattttttgggcgacaataattcgcgcttaataactagcttttgggaaattttggactagtggatatgtaataaaatatctcataatttttaattgaaccatatggatcacagatttaaaccagactatcttgatatgattaaaattgagcggtacgtatgctctaaatggaccaaaaatttcgaaccatttagtgataacccaaaaatgattctgtctattagtatttttcttttgttttctttttggtgaggggaattaccaagaaaacctagtcgaaagaaactagatatagagtgaatttaggagggaacttaattaggttaactctatgaacctccaaattttgaccacaagttttgttttcttgtgatcaagtggcaatatagaaacacaacacgaagtgcatatacgagaaaaacacgttttgttgtttgtcaaagacatggagacacacacaaagcccacgaaagctaacaagagcatgtaaaacaaattttgcctttttgctttggtccgatatattcatattatcatatacgcacgcaaccgcccaaaatttgtttacccttttgtatgcttgatctgattctttgttttgaagtcaatagattgcacattgtttcttccaactcataattattttgaaactttttaggacacacggtaattggttcgaaatatcacaatcccgtgtaagttaagcgaaactaaaaagagagttgcacattgaacatacgcatcttgttaggataaagaagtaaagaacattcggtaaataagaattaataatctgaaaaacttagaaaacaagaaatggtaggctatgatgttgttttgaaatgtggcaaacggattccgaaaacacataatacataaattttgactgaatgtaatttcgtgtctgagcatggtttatttaattctagttttcacaagtttcggttttttcttagctactgaaaattctctttgtatttataaatgtgagatccatctctaagcagtttgaatgcgtccatgagtatttttttaaaaagctatacttgtttcatacataggacatctaaacacaatgtttttttttatatagtaattgttgatcttttaaagctgaatttgatatacacctgtaacataaaactttttggtttaattatgttcattttacacacaaaacaacataagactttgccttataaagtgacgaagaaaatcattagggtctttagaagaagaaccgccaaaaaagtcacagcaatagatagttgacatctataacttttgaaaggtgcactgaaaatagatacatatgaggaagaaaaaatcgtatgtcaaaatcacagcatttattcgatcaaaaagttttttttagttgtttacattttttagttgggaaatttgcatggataacataaaaaaacttttaaattaagaaactaaccatttacaaaaaacatacactataatagttgtgtaatatataatattacaattttctcctcaccatcaccactactgctgttgctgccaccgccactacctccgcccctccaccgccaccgcccctccgccgccaccgccgccaccgccgcgccaccgtccttaccggaataaatgccatcactggagccattactccattgttggggttcccattgtcaccggagccatcgccgtcgtcgaaatcaccaccgtctccggagtcgtcgccgaagctgccgccgtcgccggagtcatcgccggagtcggaatcaccgccgtcgccggagtcaccgccggaattactgccgtcgccggagccaccgtcggagctgccggagtcgccggagctatcaccggagttaccaccacctatagttatttaatatactctttaggttagtttgttaattgatatatatataatgctattttcttaattatttattgaaaagatgttagttttgcaattcatcctttttagtttgttttaaaaaaaaaaaaaaaagtgtgtcatgtacttatgtccaatccagcagtcaaaaaaataacacctcatcagaaaaaaatcgtcgttcaacacaataggggcccactaatctattattgagttccacgtgttctctaatcttaaatggttgtgtgataactacacgtgtaaagccatcaaaaaacctacgccgtgatttcaataataaggaggctttctttttttctttttgccttaattacatgccaagtcatcgacactatatagacacgtgtcgctagcccattaggtacttttcataatcccatgtaacaacagtactcctttacttcatgtaaagatgagaacacgtgtccctcacgcgcctgcaattcttcccggtccggttcgtcactttgtgattccaataatttaaattaaacttagccatacaaagtgtgtctttcatttctgtatgtttttgtgtttagaattgaatatttaactaaactaattattggttatttgattttatgaatgaaaactccaaattatcatgaaacatatacgatatataggtctttctaaaataattctaaaacatgaatgaatttacatttatatatgtagcaatgatggtagcagcctttggtactactcttgtagtattgtaagtcgttgagatgatttaaaggaaatactattatttaagtttttagttcatttaaaaagttacttcagatcttgctggaaactttaaccaaaaaacaaatatatatatcttgctggaaatgcatgtgggagatcttgtgatcatgaaaaaactatagaaattttatggtgaatcatttggactttattggttaggatcatacgtttccattaataccttttgggaaacatgacataagtcaatgatgtaataattaaaatactatgtctatatcaggaaatttctgcacctcatatcaattatatattgtacatatcaatttcagcacctcatatcattgagccaaatttttaataatattgacaggaactatgcatatgttgaagtaaagccggacaaatattaatatttaaatataaagtgtatatcaataatggaaactccataattttaaaaatggtattagctataaactctagagaaatataacaaattaacaacaaaacgaaaacagtattttacaagtaaacaaatcggaaaaacaaaaaaaaaagtcttaagattacaacaaagaataaaaagaaaactgtatcccactcgagttttattttgtttcttggaattatataataaaaccattaacgtccaagaaatcgggaatatcaaacttcatgagattactgcaatagctttctatttcatcctcagtgctgcaactgctactattgatgtaactcgagtttaacgtagtcgggctcgggctcgaggatggcgtgtttaagaccgaatttgcgaagttgaagctctgatccgaataagaaggatccaagacaaaatttgaacttgaataatcgttgaatgacggattatagcaatcttggactgacgtagtagaagttgaaacaagattttgttctccaaaaccattgaagtgatgatccatgttgttaaactgacgagcttcattggggaatggtggcatggaagattggagttcttgagtaatcgtgttctcgaaatattggttggtttggtattggtttactccggtttggctataaactgtttgcttctcttgagttctcgagtcatgatccaccacaaggttttggttttgattttgagagaagagagaggtagcgagcttgagtatctcggggttaaccaatggatgttgctggtgatgacgacgattagtatccatcatgagtcttgacatgttcatgtgatgtgaagatgaattgtatagagatgaagctaagatggatgagatatcgaggagatcgagtcgtggactgtgagtcactggatcaatccccattctaagtagcttctttcttatatgagtgttccaaaagttcttgatctcattatctgttcttcctggtaaacgcgccgcaatcgcagaccacctataacaagataaaccaaacacgtaagaatcttgaactattttcatagtagatattgtcggaggagaaaaaaaaagcaaacttacttgtttcctaagaagctatgaagctgaataatggtttcttcttcctcaaaagagaaccttcctcgctttatatctggtcggagataattagtccaccttaacctacaacttttgccacatctttgcaaacctgatgaagagaaaaaaacatattacaatttgaaactttcgaaaaacataactaaaacatgaataataaatgaaaattaagacacgtaccggcatttttggggagggttctccagttaccataaccatgtttctggatatagtcaacaagcttctggtcttcttcagatgtccaaggccctttcttgagtccgttcttctcgcaacaaggtgaccttgccattgattgtttatcagaaaaaaatggtcaactggtttagtatttatgagctaatcagagagtttgaggaaaactatagtattaatagagaagagagaaacaaaaggtcgtagggtccgtaaggggaagtacaaagtatttatagggagagaagaagagggaagtcaaaatggttcggtgccgtcctctgtttatcaattggtatacgtgtcccataaaaacaaaaatctaatagattttgcgtttatacgatgcttttatccattattatggatgctttttattttatttttacgtttgtggcagctatacgagacatgccttgatgatttttttcttctttttttcttctttttctgagtttgtttttatgcttacatgttaaacgttcaaaattgaacacaacacattgatagtgttttagtctttggaaatatagaaatatagatgcaaatacaacgaaaacttccttttgtgtttcgtgtttacattttatatttccaagatgatatatggtcaaatattattaaagttcaagtaagttttataaggtgtaaataacatgcatctcaaaagtgcaaatgtcatatatttaagcaagtaaatcgaaccatggtcggtgttgattacaaaaatagatttgtgttcgtgtaatatatatgcttcctgaaaacaaaattagtcatttttgtcttcttgatattgtgcacttacgaaaccttgaaacaaatgtctttatattaagctttcttgatatactttgatcacttttaaagtagctgtgacgttgaaaaaagtgcagttttgttaagttccttcctcaatgaaacacatgtatgagtcaatcaacctaggaaagaaaaacaagcgtatattttttctaaccaataaccatgcatcaataatctcaaagatggttataaacatccctaaaacgagacctagttttagcatataagatttaatgtgtacgtactcttattcgagattaataatgagagtttcttatatatattggatttgaattgtatacaaagataatcattaaatatactaaactaaaaaaactcatactaaaatgtagaaatatgtagtttcattgtacattcaaatgcaaatgaaggaaatagttgtttcaacgttgttaagtttaacacacaagtactatactgaaataaattcgaaataagaggactttaattaggaaacagtttgtgataatgaaagtaacacaatcaatggggtgaggattgatgaacgactaaaaagcgtcgctctccaagctttgtgggaaggtttcacattagctgttgccagcatgaagatgccacgtcacgtttatccctctcaatttcaattttttttatttttttttgtgtgcacctctcaatttcaacttccatcctgatttttctttggactagtttttcaggttttccaactcttttcggctagtttgagcgatatacttagctttaaaaatctaagacagttcaagggaattattttcccaacttataaatggttgagttttcatgttgaacattagtggtgttatagtattgtcgtcagaggatcatcgcaataatatttatttcaatttgattaactttgatctctataaatctcaatcctgtttcaaaaaaaacggaaaaaaaaaaccagtttctctatatatacatttttttttgttttcgataaaagtttctctataactgaaataattgttttgtacgttcgatatgtcttatgatgataaaatattttaaaatgaagagaaatactttagttaaaatattagaccaaccatttcccttggattgcaaggtcaaaggggaaattttatcaaaagtcaattttctatgcattatagagaaaggggagcgcatttaattcgaatggcaataatggagtttggtatttgccgaaattagaaaacattaattgtggaaacattatgataactttatagacaaaaaataatattatccaccaataaatttgtgactgtgtgtatgtttaatttattttgtaatatattgctgctgctctctgtttcccaaatattttgtacctactagctttcctgtgtgagattctgaatatacacattgggttataacttaggtgattctaatcaagccaaacaaaagtcagtcccaaaaaacgatataaattctaagtctaaccgatattttcattttcagattgttgcatgtattttcctatataaaaatttctaacactaaaccaattcaaaatgatcaactcatagcggatatattgagtaaaacctaaaagtttatatcttagttggcttcaataattaaacgaaaacaaaactaaagattggtggtatattttcgcatggcatgatgccatgatgtgaggaccattggccgcttatacgaaccactagtttttcgactcgtgttctctacgttattttaattttttttttttttaaactatcattattatatatttaaattatcttacttaagaaaagaaattcatttattttccttcactcatacatagtacgatttctaaatattgaatttcatgggccgaacatattattcacatagacagttatgcaaaaatctcataccttgactatataaactagctagagaatgacatagttataaactaataattgatcaaaaccttcaaattattgaaaataacaagatttgtgaataattaatttgcattgagagcaatagtcgtatgcatcactttcaaatcaataatattattaattacatatagctacggactaaatctaatgtaagcatcatgaaattatatcttaatatcttcttcttatcaatcgcaaattattaggaacatcacacatacttaaatatagctgcctgctctttataatcattgttaaggaaatcttataacctattttagcgatttttaatgaagattaatagtataaaccatccgtaatattagggttatgtctccgcgttagagattgaagaatctgtcgggtccaacgacaaatgaagtcgttacaaagtgcgaaattatgaagttgaaccaataacaaaatcagttaattacattaaaaagaataaggttgcagagtaggtaggtgttaatgctattataacatgtccaaaatctagcttggggtttgcttgcgcatgtatcatttgccacaacgagaagtccacgtgttagtacagttgaccaaatctcattagctgattagcgttttggagaattaattaatagactgattgtatacactcagtatatggactgcatgaaataatagtaataaaacttaatatgattatacaaaggattattaatctgtataaaaaactactatcttatggttagcacgaaatgatttctatcattaatttcggaaaaaaaagttgcgtacgttgattcaatggtaactggtagacagttgatgtaaaactttttttttaacagccgaacgcattcttatatacaacatactagtaactagtacttgagtttccttagaacatacaccattcttacaatagttttgttattagatgttcccgttttgtgtataatttgattcttcttctatatggtcttgtattgtggaaaacgattattggggagcaaagaaacatacaccaaaaaaaatatgatcaaaatttttagtgtgtggaacctttcgaaaaccctacgatgttcaagtaagaaattgcaattatatgagatattatatatatatgcaattgttcttagtatttaggtgtttagaatatatactttagaccgttttaagatgtttgttaaaagttagtcttcttctaattagaaacatcttcttttgtttttatgaagtaagtgataagatatacatataatttacctcgaccaagtttgaatacttgctaggttaccatgtcatgtttaatcgtccacatgagatatctgtgtgactgtgtcttcggttcgatgtggctaattttctagaacatgttatcaaaagcaaacgttgttgtaattggctgatactgaggaaaatgcagtttggcaatgacaagaaccacacatatatacaatattgatatctattgaataattatacaatattaaattcctttgcattattcatttgtttcgtataaactaaaacctttgaactctaaatagttgaaaggagcagagtcagcagacaaggaccaaagatcccttcgaccacacatataaaacgatataatttgatacgaaatcgtaatggttgtgcagttgatgttgccacttaagacacttacgtaagacttcatgcaaatataatttaatatacgtacctcttgaatttacgtgttagtttgattatatatatattggtcatttttttggtatttgctcgataatagagttgatgggaaaccttgataatattaaaaattatcatatgaattttggaggaaagacagcaacacactcgagaactctctggaaaattgcgttttcactttttttgttttccaggattagttgatctaaaatctataatatatattaataaatacaacctaataaacaaaaattatttatgtttcagttaatgtaacccattaatatagaagtaatctcgtaaatatggagttgattaaaaatatgtacttaatcaaattcatctatatatatatatatgtgtatatatatatatatatatatatatgaattatattacgatcaaattatcttagcttttaaaataaaatttttttatcttagctcttattcaaaagtctttattccatcacaaggttatgttatcttttgtatttttattttattttatacaaggacttccaagttccaacatttcaatttctaagtacatgcatatcttattaaatagtgatttaaatacacaaaaatatgaaataaattctaaacaaggtccactctataaaagaagaaaacccacaaattccaaagcccaaattaaaacaccaaaagagcccaaaatacaaactcattcttcaccactaaaatattccaaagcaaagcaacgaacataacggataagtgttatcctcatctagtcatcttcaccctctaactcaccgagaaagaaaagtaaagagagtttggtgtcactatgaacattgccattcataattaccgtcactcaaaattcatcgtaaatcctcacatagacaagacttttgcaaggactcgacaggcaagatcaaataatattacattcatgacaagtactcatggaagaagaagaacgatgggactttgtttggtaagagcaagtgccgagaccggagaagaagaatccgacgatcaaaacaagcctgagagaagaagtttcttgagcttagcagaagctggtctagtcgaaatctcaggccttggtgcacacgagaagtttctctgtcgactaacggtaaattaaatcataaatttatccctacatattataaaccctccaataccaaattttaattgcaatctattaataaatctcttacattgttttgaaatatattggtatggttaagataggaaatgaaacattaattttacataggaaattgaaaccatatgtagttgtgaaacaaaagaaaatcttataacacgtcctcaagaaatgaagtgtgattaacagtctatagtaaacatatgtacattaagtaaataactggaatatcatttttcttagaagcatgtacattgatttatagatgtttcgtatgaacttcttcttatattttggaactggatttggcagatatcatcattgaatttgctaagagtgatatcagagcaagaaggatgttcaatagaagagttgaatgctggcaaaatatgtgattggttccttaaggacaagctgaagagagagcataacattgaatctgctgttcttcaatgggatgatcccgattttcctttttaaatatccttattttttacattcaagccacacaaaagtatgatcattaacaaggtgaatatgtatcgtaagtcttaattagtctattgtggtctgactaggaaaatataaaccttttgttaagtcctacaataaaacgtattcaacaattccaaatattatccatgactgaaatacataaagaaaaggtttaaattttatctagaaaccaggaaaaaagacaacagtaaacaaacaattaaaaaagaaaagactttgaaagaaaatccaaaagttgtagaagaaaagacttaaataaacacaaagagaatccaatacgctgtcgtttttgagcaaagtctctatcgacttttttccttccgttaatcaagccatcggatattaaataattacaaaattattttcagacaaaacacggacgcgaaatcaaccaattaaatccacttctctctcaccatctcacgtccgatctctcctctctgagctctcatcacgagtcaacccctttctccgtcgaaattcgcatgcttaaactctgagagaagaagatgactatgacggaggagaaaccaacttccgacggcaaaggaggttggggtttcttcaagattccatttcgtaactcaagcggtcacagaaacgccgcttcaagtgctgctacttctccgtttccatctggagcttcttcttcttctacttcttctcatctacataaccatcatcaacatcatcatcaacatcaccatcagcaccatcatcagcttggttataacggtcctcacggtgatggatcgggtcaaaatcaacatccgactccttctccttcagtttcatctgttgctaagtcttttcttcctactaaacgaagattgaagcttgatccttctgagaaactctattttccttgtgagcttttttcgaatctcattttgatcggagtagtttctctggaattacagtctttttttcattgtctagggtttgtttctgaagatttgagatccattgacactagtctaaaatttctatcttttagtagaatttgagtatttgactgatctgattatgtggattgatacataagtttgataattgactcaataggaaacataaagtttgaaactttttggaagttaagagcagaatcttgacattggattataattctaacttaccattactctaaatatggtcttcctttaagcattctgaaattaggagtcttttatagatacgaatgattttagctatcaaatgattttgcaggaaggttttggtgtatacttaggccatgttttttttttcttcatgatttggattttggaagtttagttgttttctgttacaagtaatgctgtggagtactgaattagattattactttgttttgaagatgagcctgggaagcaagttaggagtgctattaagattaaaaatacaagcaaatcacatgtagccttcaaggtttgttttttgatctaaagcgttttggttattgggtctttggcattattgtatatgagcttactcgttgctctttcagtttcaaacaactgcgccgaagagttgctttatgcgtccacctggtgctattcttgctcctggagagactattattgctactggtatttgttttttttgttttctcgcctctgttcttattcttcttgatgaggctatcagaacaatggcttattcaatgtttctctgattgaaatgtgcagtgtttaaatttgttgagcctcctgagaataatgagaagccaatggatcaaaggagcagagtgaagtttaaaatcatgagcctgaaggtgaaaggtccaatggactatgtgcctgagctggtatgttgatcttctgatcttatctattagctgatctttgaacatgaaaacagtagtaacatatccgaatccagatagaacataagatattgacccatctctaaaacataagatatcaatgactagactaagaatgtgttttggtctgagtagaggtttccagttaccttttaaggcacaaacatataaccaagcattccactgaatgctgtttccatctaaaagacatatcgattgcttttgtttttgtttttttctcagttcgatgagcaaaaggatgatgtctctaaggagcaaatattgcgtgtgattttcttggatcctgagcgctccaaccctgtgagtatccgaataattttgcttatgatgacgattctattattttacgacctccctctttaataatctatgtgataaatgacataggcattggaaaaactgaagcgtcaattagcagaagcggatgcagcggtggaggcacgaaagaaacctccagaggaaacaggtccaaagatgattggagaagggcttgtgatcgatgaatgggtcagtctcatttgctatccagtgtctcttccattagatgattgtgaaaatctgacattgtttttgtcttacctctaataaaaacacagaaggagcgtagagagagatatcttgcacagcaacaaggcgaaggagctgactctgtctgagagactaaaagagttttctcaggacaaaaacaagtgcgcttgtgaagatgaagaagaagggaccgctatattgaatttatatgctaacttctagattcatgatgcaatatataaggatcatgctggtaaaaaaaaaagacaatgaaggaaacttttttcatgtaaaaaagaaatgtaaacttgggtttgatgataatgaattgttcatgttaaggactaataaaaacagagaagaaagtgtactaaaatcgaaatttgagctctccaattactaaatcggtgctaaatgaaccggtcggtcgtttctatatttgattcgttcggtttatcctttaaccggtcgaaccgaagcttcttttgttcgtatgaagaaaactaaaatccaaatctctctctggtacaccatgagaggagctctgttcagaaatgcatctctctgcgctcgcagaatcattctttcttctaggatctcccccaatgttccctttctcactccaatcgccgctccggctcctcccaaattcagatttttcagttccgaatccggtgagaactcgactactgccactgagtcttcgccgactgattcatccgataagaaggatctcgttgtaaaggatgtcagcaacaaaggtaacagactctatcctctcttcaagcttgtttggttacctcacacttgaaatggccttgtattagttgaaatgtgtgagtctaattctcatctcgccatttctgaatgcctcacagttttcaattgatccttcgatataagattcgtagcttcttatctcctgaactactaggtaatcgtttgaaattgactttatatgttggattttgtggtctcagagcttaaaagccgtatagacaagtctttcaatgagggtaatgaagatgctttacctggagttattgaagcacttctacagagaagacttgtagacaaacacgcagagactgatgatgaattgatggaaaaaatcgagagtctacctttcaaagatgatgtcaaggatgaagattttgaatccgatttcgaagaagcgcattctactgacgaagaacttgaggatttgtacaactctcccgagtatgtagctgaaaagatgaggaagaaagaatttttcaacatggacgataacaagtgggatcacatgattagagaaggtatccaacatggctgtcttaccgatactaaacaatgcgaggagattctcgaggatatgctcaaatgggaccagcttcttcctggtaatgctcttttatttttcaatcttcccgttcatcgactcacatccttagacatagattaggttgattaatagactattgtgcctcgttatagctaaacacactctcttagtggaacttatcttttgtagttaacctttctatttggattttaatgaatcatggtagtagaaccattcttcttttcttaactctttcaaggtaatgtactatgtcggatttgttgcttctcggatcagtagggctgtttagagaatatattggtttgttcctgttatgcgtatgtatgaacatcctctaactgtgtatcttcattcagatgacttgaagaaaaaagttgaagcaaagtttaatgagctcggggatatgtgtgaaagaggtgaaattgaggccgaagcagcttatgagcttttcaaggaatttgaagatgagatggtaattcagtatggggatcagatggaagctgagggtcctccccaatttggtgaaacagatacttctgacaggaatactgacttggatgatccctccggtaaaggcccaatcctcaggtggcaatcaaggatagtttttgctcctggaggtgatgcgtggcatccaaagaacaggaaagttaaaatgtctgttacagtgaaagagcttgggctctcaaatcatcaggctaaaaggctaagggaacttgtgggaaaaagataccattcagggaaagatgagcttacaatcacctgcgagaggtatataaactataaatcttaagcttttcgcgagacaagaatgttgaatcatgtaatgtttttgtcctgtcacaggtttgaacaccgagaagaaaacaggaaagactgcttgagaactctttacgggttgatagaggaagctgggaaagccaacaagatcgctgaagacataagaacttcatatgtaaaacagagactccgagccagtccagcttttatgcagaaactacaagccaagatcataaggtctaaagaatcaaatgccatcaacgcttgaaaaaaacttttcccggttcgcgcctttcttcttgtctcaccaaataatctgtggatcgtcttcttttggcaatcatttgatccggtacgggttttcagatcgatgaagaatctttgatggtaactcctattttagtttggtttgcttcttgtatctcatgaagacatgaaccttggctgtgctgttggtaactccatttgtcttcgtcgggaaactataaacagaacagtccgaccactttttcatgctaacttctagattcataatgcaatgttggtaaaaatagacaatgaatgaaactttttcatgtataaaaaatatggaaacttggggttgataatgaattgttcatgttaagactaaaataaaaaacagaagagggtgcttgtgtggttagtctcaattgttaaatcaacaattaagttctccgattaggcgttgaattaaccggtcgcccgtttttaattttcatcgttcgattttcaacttaacctgtccaccagaaggtcccttttgtgcctaattttgatgaaatgtcgtcatttcgtcgttgaagctacaacacaaaatacaaaacgttgtagttagattgctgaatctctttgtaccggtcaaactcggtcataccgagtatcaatccgaatgatccggtaggaccgggattttaattaggaatccgaatctctaaattccagatgctaccttatacgtgtacgtcttctccgcccttcttattcatttctactctgctgcgttatttctccgtcgtcctcaactcatcgccggcgtttaccatccgctagatccgtcgcctctccggtcgactatttatatggaatcgtaaatttacagacactaataagaatagtttgacaaaatctgtagctggaataatgtcgatgagcaattccttgaaaaagctctcttcttgtgttcttattgatctcgatggtaccttaatcaacacaggtaacttaaaacctcaatagattgtttcaatttctgtttatatagcttggaattcgaatttgatgtttttttaaaattcattgtagatggtgttgttggtgacattttgaggaaatacttgtgtaaatatggtaaacagtgggatggaagagaatcattgaaaatagttggcaaaactccagtagaagctgctactactattgttgaagattatgaacttccttgtaaagttgatgaattcaattctgaattctaccctttgttctctgctcagtaagttaccataaaaaaaatcgatctttgtccttattgttgtaatcttcatattgttgattacctccggttttgtaggatggacaaaatcaaatctcttcctggtgccaataggttgattcgacatttgaagtgtcatggagtacctgtggctttggcttccaattcttcaagagcaaatattgaatccaaaatttcatatcatgaaggtttgttttatatgaaatgttgttactcaatgcataagcttgtatagaggtaaacttgttttatgaaaatggtttcacttttgtgtagggtggaaggaatgcttctcggttattgttggtagtgatgaagtctctaaaggaaagccttctcctgatatgtaagatccatctcttgtcacccatttgtggtttcatctattgattccaattaaacaatgtctggttaatgacaatgatcatatttgtaaaaagttttctcgaagcagcgaaaagattgaagaaagatccagctgactgtttggttattgaagattctgtgtaagtcttacttctagagtatcgttttgctgttgtgtgtttgattcattctcactaatagttgtttgaaatggtaggcctggtgttatggctggtaaagctgctgggacaaaagtgattgctgttccttctctgcctaagcaaacacatctttatacatctgcagatgaagtcatcaattctctactcgacataagacttgaaaaatggggacttcctccattccaagactgtaaaaattcactcatgaactctgttcaatactcctcttccttgataacatgttcatctcggtaatgagacttttataccttgtaatttgtatttgcagggatagagaacactttaccaattgatccatggcatattggaggtccagtcatcaaaggatttggccgtggctctaaagtactcggaatccccaccggtcagtgtacaaacctcattgaactcagctcttttacatcattatatatggcttcttttcttatcgctgcatttgttttgttttcagctaacttgtcaacaaaggattatgcggatgagctagtggaacatccttcgggagtgtactttggttgggcaggcttggcaaagagaggtgtctttaaaatggtcatgagcattggttggaatccttatttcaataacaaggagaaaactattgtgagttcataaaaagttcaaacaaaattcttactccagtggttgcttctttaactttagcttttgttatataggaaccatggctgcttcacgatttcactgaggatttctacggagaagagctacgtcttattatcgttggctatatacgccctgaggttattataacgttatcatcattcattcttcatatgactcctttgtgtaatgcaatattccttgtttgctcatattgtttgtgtttgctaggctaatttctcttcactggagagtctcattgcaaagattcacgaggacagggaagttgcagagaaagctcttgatcttccttcgtatgctaagtttaagggtgatccttatctgactaaatgatagaagcttttatgaaaagaattcaaacacttggatttgtaatttcataactcaaatcagacttgcattgttctttagtactatcagcctctttgatttgattaactagataacaactttcgttagattcttctcggcgtcaacgaacttcgaccaataccaatgtgatctccagacccgattcatctcctcgatcggcactcctcttgtctccggtaagaaaagatagacgaaaatcgacatcaccaccacgaaaaacgcgaagaatatgaacaacccgaacttcaagtggcaaagcatcatcaaaaacacttgtgcaatcaagaacgtgaagatcatgttcaccgacaccgttatgctctgagccgctgatcggatttccaacggaaaaatctccgatggcactaaccatcctagtggaccccacgaccaagcaaacgccgccacgtagatgcatatgaacaaaaccacaacaatggcgtaccattttggtaaaacgcctggggttccatcgacaccgaacttagctccgatcgccgccgcaacagctacctaaaccgtttacacaataacctgattacttatcgaccataatcgaaatccagaaatcggtttatagatgaagaaatacaaaacctgagaaattagcatttggaatcctccttcaaggaatagaaatcgtcttccccatttatcaacgccatagattgacaccacggtggctccaacgttaaccaaaccggtcacaaccgccgaaatcagagccgcgtcgctaccaaatccaatcgtttgaaacagaaccggcgcgtagaacattataacattgattccggtaagctgctgaaatgccggaatcagaatcgccatcgttagatgtggtctatacttcctctgcaacagattcctccatggatgctcaacgagcttcgaagcttcactggcgatgatcaaatcgttgatctcgtcatcaatgtcgtcgacgccacgaatcttacggagtttcgcttccgctagcctaaattgacctctctcgatcatggagtttggtgtgtccgggaggataagagaaccgacggtgatgatgagtgccggaacgacggcgccgccgagactgagtctccaaccccaactgattttggagaagaagaagttcaaaacgttggcgacaaggataccaatggtgattgagagctggaatccgatgttcaatgctcctctgtatttatacggtgccatctccgagagatacaacggcacagactgtaaattatagtaaaattgaaaacaatttagaaagttttgaggctaatttgtaatattttagaacttaaggtcataaaattagacaacagtctcaacacaaaattaacggatccataggggtttctatgtaaaaagcaaagtataaggttggacttgaattttctgtaaactttacgggtacaaaatcaaataacagtttccaccgagttatggagctatttgggtctgttttgaagaaaacaaaagtatgaggtaaaaaatgtaatatttagataaaaaataagacctgattggtgaagccgataccgaaaccgagtaacaaacgaccaacgatgagcatccaaacggcagttgcgaaaccgttaagaagagctccggcgcagaagagaactccaccgagaagcatcgaaattttccggccaaactgacgggtaacgtaagaggcaacgagggaggagcagagtgcggcgaggtaaagagaggaagtgaagagagtgagagaaacgctgtcaaatctgcagtattggtttgaatcatgatccttcttctgtttctcgtaaaccgacgggaagaacttttgctgaaacgaatccattgtcgtcactccacctgaaaaaaagacaacaaaaacgtttcaacttttttgttttgttttctggcgtttagtgtagtaaattatgagatattcttaccggagataccgatgtcgtaaccgaagatgagaccacccatggcggcgacaatacatgtcacggtgacgtaaagagtgagtttaccaggatattcttttttgccatctccgatgacaattccgactgaaggcattttagtctttttctgttttgttagtagacaatggcttatgaatcgttaatgtgtgtttatataaacaaaagaggagaagttgatgaactgttgttactccatttgttaaatttttttaatgttgttttagggaaactatcctattaaaatttttattactttatatatttttgttgactgttagtattagacagactgttttgttattggttgaatatatttttctaaataatgaatgatgttttaatggaaaaaagacaaaaaaaattacgcaatctatgtttgtttctttatatatgtgtaagacacttaaacaacacttgaaatgtaaccgaaggaatatgttatatacaacaatgtttgaagtcaattgttgtttctcttctttttttctcttaaagatgataattcatttttgtggtaaaaaataatacctatagagatttgagaaaaattggaaataaaatctttagattcccacccaaaaatgggtaaataatccaggcacataagtcaatatacattatttttgaaaactttttaattggtagattcactctaaaaaatagtagatcatttttatccttagtataaagtaatcttattatttttagtatcctagctagcaggctaacgtgtaaaaaatttaacgatatgaatcgggagtgtatggtggttgatttgaattaatatttttggttgccttttacctagaaagaagttataggtaagtttgcgattttagtcgaggtcaaggagagtagtggtttggtaggttaggttttgtttttagttttactaatagaaagatgaacaatttaagtattacgtgttgccagaagattctcctatttctttctcccataattgatactgtatcatgtaaagggaattaattgtcaaaatctaaggacaacaaaagttctaacattgtattatttttatttttttctgactagctaggcgacatatcttgtaatgttaaacgttattctataagaaaagcagtagattatattctttgtgaaattatactccaatctccagcaatataaatatatcaatttcacgtaccaattccaaaaacagaagtaaccaaatgaagtttaacatcttcccgttgttatgcttttatttgaaagtaaaaaacaaaaagcaataagactatccatgataattcaaacgagagagtaagagagacatgagattttcaaatgcgacttgaatccctcccgaagatgaatcgtctcatccagtctgagaccaccaggactctcgttcgccagctcacttgcttactgtattattaaaaacaaaaacttgtaaccaaaaagttacaaaaaaatacaaaaatcatatgaatacatttcgtatttcattagtcatttaacgttacctagcgtaaacggagtaccacagccattgactgctgtgtcctatcgaaacccagtctcctggaagttgcgccgcggtttgttcgcctcctaatggagcaaattgtcccaaatgtctatacctgtataacatatatattcattgtctcatgtctccttactataaagtatataatcagtattgagaaattcacaaaacatgcaatctcaaaagtgactaaagcctcctaagatgcagatactaggaaccaacctgaagggacggaagcggtgacgaccttctcctctaatcctaatgggaccttcaggattcttctcgcatacttccatacgatcaaagcattttgcaaggtaagtcccttgttgagcagcgaccttataaagccaccagacaaaggatgagaaagcaaacaaagtgtgtgagtgtgagtgtgtgacacttgtgaccgaagataaaactttcaagtaagtaaaaacagaacaaacctgtcctgtcgctggtagaagcttcacttgtgagtcaacttgacaaagagctgatttaagttcttctatatcgagttcgacagacttgttggaaccattctcagcttgtgcttgttttagaagatcggtaatgccatgcatacctttactcttcaagtagagctccacttgagggtatctatcacatatgtcactcattacttcatgaaattctttcattgtcagtgttcctgaattttccttatctgctttcttgaatatagcagctatgtcttcctgtacaaaagccataacaatccaaaagtataagaaacagagaaaccctatacacaagcgagctcatttttatctaggttctgaatttggttaccatgacttttctctggttgattgttgcacaatcaccaagtgcatatatattatcacatccttcaacacgaagccattcatcggttgctaaagcacgtctattgccctggaatttacaagaaatcatcttatagaccgagttgataaagctcgttcactatgaaaaaatatgagcattatcattagacctttggctactcacctgaccaatttgtttcataaaatctttgatcacaggacgagtcccaataccagttgaccaaacaatcattccataaggaatagttgagacctctcctgctttggtttttgcagaaatttccttatcattcactttgaccaccatagaacctaatttcacatcaataccatctctagtaaatttttcttcagcaaactctgtgattctcttgtcaaacctgtcaaaccataggacatgagctaatcttcgatatagatcaaaagtttaagagtaagaaaatctcacatggtcaagatgtggtctgcagcctctagaagagtgatctgcactaagtttttggctttaggatatagtttgactagatcctcgttaacaaaatcatgaagctcagaagcaaactcaacacctgttggtccaccaccaacaactacaaaatgtagcattctctttctctcttgttcgtttagtccaggtaaacttgccttctcaaatgaatcaatgacagtactacgaattctctgtgcatcttcaacctcctgcaagccaaccgccatattttagagacatgtcaaaaaaaccataaatgtaactagtggagcaagaatgttgttactttgaggaaatgacagttctcctccacgccaggaatgttaaatgtgttagactgagctccagtagcgattacaaggtagtcatagtcaacatcaaactctttcttccctttcgaattcacgccttgttttgatcggcagtaaactttcttgcttcctggatcaattttgaaacattctgcctccaagaaagacatctcaacattctgctagttaagacacaagacaaaggtggctttagtttttgtatggcagccattataaggagggattaagagtgtagtacttacctttcttgcaatgttgcgaataggttcaacaacgctgcgagcttcaacagttccacaagtaacactaggtaacaagggagtgaaagcaaagtagtttcgaggagatataacctgaacctcataagaagagttattcaaagtcttcaaaaaacttgctccagcccatccagttccgagcagcactacttttctcttcctggttttagtttcaacaccattgttgctatatgatggatttgcctcagagtaaactataagtcccccaccactatgaaacaagaaataataattagaacagaacataagatctaaaacagccatctatatttttgattatgaatatcatcagctctgctctcgtaaacacagatttcgatctaacgtatatgacaagtaaacataacaagactctgttgcatacacgggaaaacaaaattttgcgaaggaaaagtctcatgacgcagatcaatttatggcaaaagcaaaaggaggatacgttcagaatacagaacagagtaaatttatagagaagtacaaagtttcaaatagagaaattcaaacgtgaaatacagatgaatcggcgaagagatggtacactgacctgatggtggagacgacgagaattttggagagagaaggataatcatggaaagcttgggataatctttcgaagtaggcgaaaggtctcataatttctcttgatgtgcgattcagtctccaagaacgaattggttattctctgcttacatagagatcgagagccgagaatcatggagaaaggagaagaaagaatgatgtggagaggccaagtgggagaaggagagtgacgataattctgttttgatgctaaccgttttggttggacacgtgtcaatgcaatggacaaaaggaaaatgagaaataaggaaattagaaaagctgagccaacaaatagagaggaggagaaacagaaactcgtgtcgttttccagctttttggtttgacttgacggccacggcaagagttcttgtccatgtgcttctttttttatcatatcggtattgaacctttaatgaagaattaataaaaatgtgatgcatctgcgttttgcataatgtaaaattattgttttctgatcgttgtcgcatatgtctctttgcgatttgatacatataactctccttgtaatgactccaatacaaagtaaacgagagagaagcaaagaggatcaagttcagtaagcaagaagacaatgttggctacctatgacatcgagcacttcttattaagcttaaagttttgcttcctatgatgtttgtatattatctagtcaatagaataagttaggatgtgacttaggaataggctattagccaacttgatcaaatgacaaatattttttaagtctactacacgtctacaaccaagggtcgtgagttaaaatggatgactcattttaagactctaagacaacattattacacgcatagcgttgatgattacaggcaagccaagcttagacttgtgaccactcacagctacattcatttaatcggttgcttttgttacaaatactgtatgttcaataaggcccaattatttgtttagattttcaagaatttttttagcataaaaaagggcccaattttgttgttgtttagtatgaaaaaggccaatttttaagatttattcaggaactctgaattccttaagtctgccttgattgcatatgttggtttaatttgttatcatgtgacactcatttctacatgttttataatgttgttttatgtcattgctttgtgggaacaacaatacgcagaagaaatccaatgagctattcatttgacaacatagatgaaatatatgttgatttgatctgcgagatctcaatcactcaatacaaagcaattgaatatatatatatatatatatatatatatatatatatatatattatatatatatttatgtaatgtatttaatccataatgttactctggtaatacaactcataaataagtatacaatttaattataaaagtattaaaaacaaagtatacaagttaactggtttcaaatggtaaagaaaaaaaaaagtttttttttttcttttcaaattggtgtagatatggatagtttcagtttcatttttggattattaattaaattctgcgtatatatattactcattttcagctttaaaaaaaaaaaaaaacttttcttaaaaattcgacttttaaattccagatcatgttaaatcggagattaattaatccttgtgtaaaaagttgaaaattgaattacactcgtataataatatttacacaaatgatattcgtatagaaaaaaatgaacaaccattaattgttgcttctttttctttctttctaatcggaaaaatgctttctaatcggaagcacaaagagaatcatcatcttcttcttcttcatggaaaaagatcgatctcgatcaaaccatcttcctctgcatgaaaatcaatctctgttttactcatcatcttcctattatggctataatgatcgagctttatctcaatcaaaccttcacatcctattccaccctcgtcttcttcccatctgaatcccatattttccggcgagttccagtcaccgatttccgggaaattgaattctgacgaggaagcagaatccgattccgaatctgattctgggtaacagagtgacaacgatgggaatctctccatttttctaaaccgggtcggatcttcttcttcttcttcctcttcttcatcttcgtaagcttcgtgaatcacttccaatggtgctctcaagttccattccacaaaaccacccatcaaatcggattcacgaaccagaaaaaccttaggttcttcagactcctcgtagcttttatcgggttgggtgttaggttctcgggtcgatccgagacggagaagagagagaaggagagctccggagatgagaagaacaggggagagaaagattcgaagcaaatcattggggaaatagatgaggattagactgtagagagttatgaaaatggagaagagaggatgagagaagaagaagacttgtagagtttcttcttccatggcgtgacggtgtttcgaagctgagagaaagagaaagactttggtggtcgttgcatttaaaagccccgacgagggttttggttttgtcttttttttttaaaacagtttagtagtcaacagatattaaattcttcattaaattccatttgtttcaaacattgaatttttgtttataaaaaagaatattttagagggtgtattcaagatagaggatgtattcaatcttgtatgttgaatgatttgagttaattaagttttttctatgattttgggtggatttaaggaaattgttatgatttattgtaaaattctcccaaattccacctaaaaccatgcaatttaaaattatgtatttcttaactaaggaaatatacttaaatctcttaatgtcattaaaatttcaatccttaaaatctataagtatattttcaaatcattatttcaataacattagattttattaaaacttttaaaatatatgattgaataacattgaatttgttactttaacacaaatcactcaaatcttatctttgctttttaagagtaaataaattagctagcaccattgaaaaagcagttaaggtcatttgggttaggatacgaagtggtcttccgaaccctccaacatttagacaaaacagtgatgacattcatattattatggatgttgcgcattcaaaaatgcatataactttccatgacgcataaactagtttccaggtacgtatgacggtttgaagttttccaagtgagatttacgcataagggttttgggaggtgcacgtattgcgcgtcctatgcacatcagctttcctctacgtggtgtggagcgttaatatactttcatgtttgttggtttgagaatttctcataagagctatttgccgatattcaccggaggtctcttaatgataatgcaagaaatacatggtttaaatgatagtaacggaagaatatttttcaatttaacccatacagacatagtgacgtattgttcttgattctgacaaaggaattgagaattgattttcttgctttgctttgattcttggggtgttggttcgggaaatgtgaaagctttaaagtgcgtatgacaaaggcaacgaatatttaaatacaaatttagcgtctcatgaaaactattaatggacaaaagtgaaaataaagttaagacaaaaagtggaaatatttctgaaatgttattacaagttatactgtacaatatatatatattctcttggagatcaaaagtttaccatcagatgataacgctctatgttctttccatttatgtcagttctaacgtttttttctgtttcaaaataagatattgtactgtattatttttggtttcaatgtaacctttgacataacatattgaacttaactttgtgttcaactgattatctctagtaactagacagcttagactaatctaactatgattaacttttaagaattatttgtaggaggcataatcagccaatcaggcgatgatacatgtaatttacccaaataactagattaactaatttaactgtttcgttaccgagataaccatgtggtcccccaacaaaggctacaagaaacagtagtatcaatttcaaattacattcaaagtgtccgtaacttcgtaaattgagctaaaatttcatcaaatttcaccaagtctaatggttgaatctaatgactcgcgagaacaaaatagtaaaaaacaatgactcactcactaaacggtaataaagaaaatatattggtataaccaataattaagtattaactagaaatacaaactaaatatatagattgatatataaaaatgttcctccgcatatgaaatatagttgcatgcatggtgtcattccttggcgttcattttcatcacacaacatgtcttttccatcttttgcattcaattattttctcttcacatctaattttttatcttgtgttttttctctataaagttttgagtaataatgaatgatcaaacaaagcaaagtagttacgctttatgtttgttgagaaagagaaaggtgaaaggcctgaaaggtggtagttgtgtggcagtgggagtggttcttttgcaaatgtcttccttttttttaattgaaccaaaataaaaggtcttccttttttatttattttattaataagagtatttctttcttttgtgtgttatatacatttttaatatttttggagattatgaacatgtgaattgatcaaaatgtggtatagagtagtagagatttggcatggatgtttcacttttagttaggtttggtttccaaatagtatatatattttttcttttcgatttgtttggtttggaatgaatatctttgccaactaaactgttttggttttgaattcgacaaatttttattttagtccagctcaatatttaatttgcacctattttcgggtcatgtttatttttcaatccgaaaaagttttgttcttaacatattatcttatttagaaagaacttcaaacgggattaataatgttacatcgcagaaaagttaatagaaagaaaaaaaaaagcaaatcgcaaatgtgtgctgagccaattagtacgccaacttaagcattacataatctacggattaaacttaaagaaaagaactggatcaaacatatatactgttgaaaaactcgtatatttccgctgagaaatagaataaaatgaagcaaggcaatcatattaacctacgataaataaagtcacacaaagcatatccaaacataattactcaattattagccgcaagtagaactatatgacgataaaatatgtttaccttaacctaaaaaggtctatactgaaaatttgtcgagggttaagttacaaaattgaatataattaaagattttggttatgatgaagaaactgctgattggacttaaagcttttggtttctagattatttgacctatatttataaataaatatagggttattgacgcaagaagcagtgactttatataaagtcgacaaaattaatcaaagttttgatgattagggagaatggacccaaaggacataaaccacgtgacttggaactgttttggaccgaccaaacccatcatctaggcttgacttccacggaatcgttttcaaaattggatgtccaaaagtttttaaagcaaatgaacgattagtttttggattgtgatataatatataaagagaaactaagacatcactttcttcttcatttttcctccttgggtctctttcaatgtatgggttaaagtggaaacaaagctattccatttagataaatgataatgagaggtagagatgcatatgggaatgttgacgtattgataaaatgtaaatcttgataaagttggagttaatcatatattattcaaatcgtttagtggaaatacatatatctagtagagataataggatctatccaacaagtaacatgcatcggaatcatagatagctacataaaaaatagttatcaatgttaagttgaaaaataggctagaaaaatgaattagaactccattataggtgatattaacataaactcaaaaacaattttagtttttcttgttggttttctagttttccggcaaaaacatgaatagtgggtaatatagtagaagacaacgacctttcattaattttgatgccagtgacaccgtcagaatctcatctccaatgtccagagacagagaaagagagtcacaatcgaaaaagagctttgttgtataacaataacatgataagtgtaaactgttaagttgcctaacttttaaatatcgtatgttattttaaagaaattgttttggtcaaagttgctgtgcatgcaccatcgtattaaacgtctgattactcatttcattttctttgataattgggctttcaccgaagtaaaactaatcataaattatgattcatgaatatgaaggggtctttaagagtgcaacggattaatatctacctgtgaccttgaatcagtaacatgcaaccactggacttcttaatatggagttgtcactttgtatgatcgataatcaaattttgtctctggaggaattttgctgagtacacaatcgcaatgcatacaagtttcggtgatataatttaatatacttgtcagaattggtttatttatgaaaaattttagattcattaaatgtgttgacataagaattgataatctttattgcaatgcaccctaagacaaaatcaaaaccaaaaccttggatactctgactctgactaaatcccaaaagactaaaatacatgtataggaaaagaccatttcagtttccaatgtctgcaaaatgaatttatatacaaaaatcatcagtaaccctaactttttctgaatcaaatgcaaactaatctaaagaataaccatcatagagaatttcacagtggtaatcaaagtgaagtgtgtgaaaacacttagccactagaatcaaagcatttacacatatcattttttcatgtaaacaaagccgcagagacgctagagagttgctctttcctcttagccttggtccatcgatagtgcctcggtgcattaggaggctctatgtcgtcctcttgatgcctggaatccgaaacctcctcgagatcgatcgagtttcgaaaagctcgagtctttttaggtgtggtgtacgcaaaatgtaacgtttttgctaccaaactctgttatagttcaaaattgctatgagaacattgcatcaatcaaaactcaaatgatgagaaaaaatggaacttacagcttctctaatcgatttagatacaagttttagactcttgagatcctcatgatcaacaccacaaatgactcgaatctgtaaaaaaaatagatcattagaccataatcaaatcgaattcatcagattaagaaacttaaaccaaactaaaatttttaccaagagatcttgagggagacactcaagtcgagatttctcagaggatgaagaagaaacaattgttattctgcttcgttgtctcttcaacgaactcttcaccggcggcgattcagatactaccggaatctcaacggccgatctagatagagattcacgcacacaactcgaaatcaaaatccttttcctccctaatcctcgcgtgaacctcactgatcctaatcctaactctaattcctcttcctcgccgtgaaatctagcattagaggtcatcacgaaccctctcttcgataacgccattgtgcttcttttgagaaacagattctccgagaaccactcaactactttaacagcactggagaaacaaaattcaccgatgaaatggagataatggatcatttagaacgccaaaaacagagcaaagtagagaaaaagagagagagagatttgctgaagaatataagctccgattcgacacgtggtgatttgttattggacagccgtcattggcgttttgtgtttcgatcagtccaagttgagttaagcttcttcggtatcagtcagttagtacaagataaacccactttattcgggaggaaatatcatgagtgtgcgggttcataatgagtgttttgtccattgattgttgtgacgtgtatgcttaggtagcttgaacggtgtgaatttaatgagcagaggaagggttgtggtttttaaaatagaagagtcccacttgagctcatcggattctgaaacatctggagataagtatgggaatttgttttttttttgttttttgtttttgttaagaatatgctttggataagactaataaaataatattgtttcgattctttttttctaacgtagcttttaaaaattaaaatttatgttaaaactatttcttcggtgacattttggagatgagactcgcttgcaacgccattgttttcatcataagtattgtcctctacgtagaaactccagagagatacacagttctcatcagctgtgtgagcaaaaagagaaaggaacgattagattgtgtgtctttaacattgatgggagaggaactaattagcgttttagtgtaatgtacctttcaattgaagctcgttcttatcttcaccatcgtcatcatctggaattgcgaaacgtctgtgaccagaggatgtagcagccattggaaggtaagggtggaaagagaaagcattgacggtatctgcattaatcgaatggagtatatatgccaaagtcaggatctcatcaacaattgcagaagctactgaagaactaagtgttagctacctgaagcagcttgatatccagaaacccagtttccggtttgtaaatcgtacatgtgaacaagcccatcctggaatacaagacaaagaggaatgagaaaatggttacatgatctaaccataagagtgttaacagaggaaaaaagattgcttgcagttttatagttaatgaaaaacaaaagctcaggcattagaaaggataggaagatcaaaagtacctgaccaccggtacctaaatgtcgaccacatggctcaatatcaaagaatacacgctggtttgtgttctcagttgctctgtacaatctgatcacacatataaatgatccatttcaaacacatgtcaacattataagagcttcaacatctaccatttctcaagctaagacttctattaacttgaacattgatgtaacgttaatcttaagctgctcatggctcattaagcattaatcttgtttacagcacttgttcttgcttctagattatattgtaaaacaagtatgagcttagaaaccaaagactacccaaaccaaaataaagaagtaaatactcacttatagactatttcaacagatttccgaatatcccagcaaagaatgtaaggatcctgaaaaagagcaaacaaaaaagaaacatttttttggtgaggttaggacaattcatcatcctattacatatcatactctaatattggacaccaacgagaatatctctggacagacgatactttcctccaaaaagggttatccttaaaatggaagtcaagttgcgatataatatgctcaacattcagagggtaaaatgtttataacagtatgttaccttgcgacctcctgtatataaatagttcccatcctttgaaaactggacctaaaagccaccaaaaattcgatcaataattggatcatatcccaatggacaaaaataaggcacatttagtggtcaatgcttacatgtgtaacaccgccttcttgaccatgtaaaacatacaatagctccatgttgtcttctctataaatcccagtagtttgcccgtaagaccccacagccaacattccagaattagttggggagaaagcaagagtagataatatacctggaaattatgaaccagttaaggttgttcttgtttctgtataatctgtaataatattgttatgcagcgtctgagtggaaaagaaagaaaaaaacctgcttggccctctttgtttttctgtagagttgaatactgcctaaaatctcttccaggacgatgaagatcaaacactctgatggagctgttgtaaccagcaaagatcctaaagacataacacaggcaaatgaacatagaccacttttaatcaattctttaccgtgtgggaagatggatacaacttagatgaagtttttgcttacttggttccatcaggattgaatccaactgaaaatgcagcagttatttcatccatagcatcataggcccggtatgtgcatcgaagctgacattgtgttattcacatgtaaataaacaaaaaaggatggtagaaaaaatctccagtaaacatgttaagtttcatggaaaaaatcagcacctcaccagaagtactatcccaaagatgtatcggatggtctctagtggaggtagcgaagacgcatgttaaagggtctgatatcaatcagtgaacagccaaaatcagtaattcaactgatgaaatcattaagccaaaaaattgaaccccttatgatgagcttatctattacctgaaactgacatgtatggataccaacagaaatcatagacagattcaccctcattcactagaagactcgcaccatacgaatctacaattccaataaacacaccatgaatcacaaaattacttcacacatattttacagcatttgccacaacatacaaatgctagatggaaaagctaaccttcttcagggactggcactccatagccattagaatcccctccatcttgtggcctgatggggcaaatttgcaaaactaaagattcaacagagaactaaaactacacaaacatacaaaattattgatacttaagctacaaaaatatttcaattgaaattattcaacttacagatgaaacagactaagtgtattatcttcagagcttgcaaggaaacatgaaccatcaggtgacctatataagaaacagtaacaaaatcagtacctcaaaagttaggcaaaaagaaaaaaccaaactttgagaaagaacaaaactctactcaagagattgatttgaaacaagaagaaaagggtaccacttaagacccttgaggaaattattagggtttcgagctgtcctgaactgcttagagaaatggtgcgttctataaggagagacatcaaatctcatagtaggccaggatgatttttgttctcctgattctaccttaagtccaccattttcttctgctactgcttcttcttcacccatcttcttcgtcagagcttctggaaaaaagcagcagagagaggtttactttcgttctaaaccccagtcaaaatctccaaaacctgaaccaggttttcaatctcagaccgacaaattgaaccgaacttaaaccaaaaaccggattagggattttgattggaatttggaagaaaagcccgccaggtttgtcattagtgcgtctctctcttctcccggcggatcggcgaatcccggcgaccaccgtcttctttcctttatccactctctacagctttcttctcaagtgtttctctctagttacttccttcctacagctttgctagatattgaaaattagaatattaacccctaatcccaaaaacctcggaatgtcggaaatggcgagtgacgaggaagaaaatatcattcctttccagctccagttcgacaagcccataccttttcaggttttggttctactcctgctcaaagttcgtgtcttttttatgcttttaaggatttagatgtttatatatgttcaatttcattagattaagatagctgagtggaacccggagaaggatttactggcaatggttactgaggactccaagattttgctgcatcggttcaattggcagagattatggactatttcgcctggtaaagtttctctcttttgttcactttgtttgatttaaagtagacaattttgattacaagatggtttgtgattattgtattccttaactttcaggcttgatgaaaattcgtttgtggaacttagttatttgctgaaattgaaagtggaatgcaatttgaagtaggttgtcaatagttctggtactaagtgtatttcctttcttttggtttataggaaagcctgttacttctttatgttggcgtcctgatggcaaagccatagctgttgggctcgaggatggaaccatttcacttcacgatgttgaggcaagtatagattgaaactaatccatgttttacatgatgacgttgttgatagcctaaatattcctttttaaactttgctgtatagaaactagtattatgttttatttataaaggatcatgctgatcaaaaagttggtaatactcttttcatgcagaatgggaagctattaaggaacttgaagccccatgatgtagctgtcgtgtgtcttaactgggaggaggatggacaatccaatactgtatgttttctcctctgactagttgtacaagaactcatgtttggttgcggtatctatatttgtgttgacaaactgagaaagtttcttttaccaatcccagttgaagcatctattctcttagttttttttttcacacccaactcttatagttatttgagcttgtgcttactttttcttagagtttggtttacaggatgaaagtggtaatttctcagtttatgaggaccggacctcccgtttttttcctcctgctccaagacctccaaagatgcctggactggtagctggtgactccagtttcatggatgacggtgaagactctttggcagagctatccaatacctcattccggaagtttaacattctttgcactggtgatcgtgatgggaacatatgcttcagtatatttggaatatttcagataggaaagattgtaagtcgctcttttgactgtaagtaattagtaagccgtaattatccattcatgtattatggttgatgatgcttcatcatctttccattccgcttgcatatagaattgcaggatgcttaatgaatttcaacactatttctacatggaaattattttctgagatccttaattgttcgtttataacaagtaattaatattgttaggagtaaagtttacggtttgtaagtttcttatttcttttctagctatgagcaatattctcttagtataattttaatttaagtcttcatttctcttgtttcatgtgtttgctctgctgctcttgcattaccatgatcagaacatacacgagctgtctcttcctgtgcctcatctcgatgagcatgcctcttgcaaactatttaatgcttccatttacaaggtacttggatcctttcaagagccacgctttccaaatgatataaatggcctctcgttatttctcatgtctcagactgttaatgtctgttgtggaaacaaagaaaggagagcttggtagatgataaggagtctttagattcaaattaattatttgtatatttcatttcttaggttgctctgtcaaaagacctttgccgtctggtagtaatgtgcacaggagagcttaaggattgtgatatcaagccaagagaggaaaaaataaatgttcaagatctgcctggtttacattgccttgcaatggacacatctatattttggaaaaggtaatacaccaaacctagctatactttgccgctgcttctttcttttgttccttctcattgttttaaatcttgattttaataacctttaataattggcactgtttttctgccttacatctgtcatattcgttatctcttctaatttttatctcaggaaatatgagcttcatcaggttgctcaacaagcttctaacattgaagatttgaccgaggttattcgagcatccctgtcagttatgaacaaacaatgggcggatgcaatgaaaacttttcatgaaaagtttcattctctttccaccttgatcattgataatggtatttgtcactatcagtttgttggttgaggtttttctcttatgcttaattgcttatagatttacagggctttgttgcttttctactaggactggaatcatctcctcaagaagaatttcttagccttttgggtggtgcacgaataagcccagcgcttaatcagtttttagttaactctcttggcgaagtggtaagctttacttgtttgatcttcttcagggtactagttttatcatattccactaagtagttctcttgttcagtagggtgtgaagcgtgttttaaagtcagtatgtggtacaggaaaagagcttcagcaggttgtccttgaccatcttcaggtacagtattctttacattcctgaaaatggagttatagtttttagactaagtagcgtttatttatacagctaatactttttagatagagttttgtcacgaattaagctttctttttcagcctgcagcagaaattatcggattcaggataggtgaattaagaggtctatcgaggtggcgtgcacggtaccaaggcattggtttggatgagatgctccttaatgaagccactgaaaatactggtctgctacttgtacaagtgcaacggtttatgatggtactatcttctgttgtccaacaggtacagaggcgtgcagttcttttgacactgaaaatcatagttatttagtatgttggctgtcccatgtttcccacgcaatggtcatttcaatagaattataaactttttgtttcagttctcaaatttcttcaactggctcgtcagaagtataaagtatcttatgcaagaaccgaatgatcagcttttgtcatacaacaggtatgcacatgtgtttttatgttgttaaaggtgttaaagccaaatctttgcagttacatggtttgtttctgtggcagtgaactccttgtggtattcttgaagttcttatatgaccaagatcctgtgaaagacctcttggagctatctgaagctggtgatgacattgaaattgatctgtaggtcaactctttctatgtctgtgcttttacctaccttttctgatcacttatcttgtagtcgagcagaatctctgtcaggttacctaaaattttttaagccatttataaccacatacaataggggtagtccaatgtgataatacgaatgaaatccgagcaggtttctctaaccacactaaaacgaaattcagatatgggtaatgtgtgtgcgtttgtgaagcatgaagtccattgtatcatccctagctgttcattcactttgttttacttcatttcatttaaactcttaatgttttaatgtcccagcaaaaccatcggaagagtcaaagagttacttcagtttggagggttttcagagtgtgattttctgcagaggacattggctaaggaattccaacacatggagtctaggtattttctttacatcttcacttcttaaaacataaagtttcttaaaaatgctgcatcatggagcacaacgttggtaaactgatacgtgtaaaaggctatggtagagacaaaggtccgataccatggctgccttggcattttgaaatacaacatgaacaaccatatttatggtattggagtttacttgcaaaacaaagtgtgctgagtctttataatctggacatactttctcatggctttctctgactagacgtcaaattctgattttaatgctttaacaattttagcttcaagatggcttctcaaatgccctttacaacaatatcaagaaagatatcatgtatgaagttgttgcctctttgccctcttcagttgtcaacaacgcaaacacctacaacaattcccatgtctctttccttctataaggtacttgcagcaacaatcttaatgcactttattatgatcccatagggcatccttaggaagagattgctgattgctatctccaaagtcttcatttgctcctgatatactaaagtctctgtttgcttgtgcagaatgaactttctgatgatacaccttgtcaaagtgggtacactgattacatatcttttcaagtccccgatgagaccttcccagagatttcaaactgtattggcatagctaagggttataagcagaattccaacaatgagaaaaatggttatacttctctggaagccgttttgttatctgtacctaatggctacacttgtgttgatttgtctctctacaaggtgaatactcattctcttctgcaacaatggttgatttaattggtatattttttcttttggagttgccttgtaaatcctgtgtctgattttgaaacaggataaagaactggttttattattgaataagacaaatacagattccgaaggctcgggagaagcatgcatgatggttgtacaaactggtgacctcgcattcatttccatttcaggatctagttctctaaaccagtgggagctagaggatttgaaggtattgctaatttcaagcattaacatcgacgtttgttttaaaattagtgaagtttatgtaagaacttatgcatctccagggctcgattgtgaacctggaaatggagaatgaaaaggttcgcaaagtaccacattctgtcattgctcctctagcagtaagcggtaagagcttaattttctgtcttttcttcttcttcaaactagaaatgctttttcaaaatcatgaaataatttgcttaattatttaaaattcttacagcttcaagaggagtggcttgtgtttttgctgaaagaagacgagctttggtgtacatattggaagaagatgaagatgaagaaatctctgatgaaaagtaaacctcctccaatgcctgctttgattgttgtttgtgtagattattaaagttaagaaacagaaacttgactacttgaagttgtaaacggtgacgttttgttagttaatgacttcttctaatgtctgtatcagtctcttcttttcacacttgcgtcataattaaagagggttacgccacgtcagctcagccactcgacaggttaaagcgcgtggttgtcacttcccctttgatcagacaaagctgaccaaaaaggtgggttttttcaaagtccattctttattcttagctcaactaaggaagcaagacgaaattctctctctttctctaagctctacgccaccgtcacggaggttgtcttgttttgtctcatggagaatgatcaattcatgtgtccgactgatataatcaccggcatagtgtttattgatggtgaattggctatgttgactttgactgccgacggggagttacggtggacagagtatggactccggcagtatttgtcgatgaagaaggatgttcttggtttcatcgtcgaaggtaagcagattagagtaaaagccgtggttgagaaagaggcaggaggaatctgctgcggacaatttggtggagacttcgtgaggaaagatttcgtctttgagcctctcatcgatcaaaatggatggtgctataagcttcgtcaataccttgattctctcggttagtttgttgtttcgagaaaaagtcgaaaacttgtgtatcactcaaatagctaaaactggaaatttcgattaggtcggccaaagagattgcttgtgtttgtgaacccgtttggcgggaagaaatcggcgagagagatttttgttaaggaagtgaagcctttgtttgaagatgctgatgttcaacttgagattcaaggttccttggtttctatttttgtttctttctggggtctcaaaaactctttttttgggaaattaacaatggattacttatggttgagtcttcagaaactaagtatcagttgcatgcaaaggaatttgttaagtccatggatgtgtcaaaatatgatggtattgtttgtgtcagcggcgacggtatccttgttgaggtatgtaagaagtatacagtttctctatgtcaattgtttttggataacttaaattggaagtgatgatgtgtgtctttcgtgctattctcacctgattcaaactaaaggaatctagatttcatgtctaaaacgaagttagagcttttgaagtatctgctagaggaagcaatctcttgttaaattatatgtttactcttttgcttaggtttgactctggggttaaacaatcattttattgttgctgattcttacacttggttcctaatttagtaggttgtaaatggactgctcgaaagagcagactggagaaatgccttaaaattgcctattggaatggtccctgcaggtttgtgaaactttaaatgcgatggttttcgttttagtaacaatgacgatattctagattttcatacaaaaattgatatcatgtggattagaaacttgtatagaaatcattttacttgacggcaggaactggtaatggcatgataaagtcattgttggacacagttgggcttcgatgctgtgcaaatagtgctaccatttctattatccgaggttatgctctatcctccatgccataaaaaaaacatcattcagtacattttcctttttcctcagtaatcagttccgtagcacattaattctgtcaggtcataaacgttctgtagatgttgctacaattgcacaagggaataccaaattcttcagtgtcttgatgcttgcttggggtatgccagtaaattctacttctttttgctatgtccagagttcagaaagttatttgcaaatgaaagtaatacatgagcttgctgaacgtactctttgttgtattgattagtccatttatttcaggtttaatagctgatatagacatcgagtcagagaagttcagatggatgggaagtgctcgtattgacttttatgtatgtttagttgacaaatttgacaattattgcattgcagttgttaaattgctggtgagactgtatgattctaccggatgttctcttattgaactgaagggatgtttttatcttcttggatttgcaggctcttcagaggataatatgtttaagacgatacaatggacgaattttatttctaccggctcctgggtttgaaggctatggacagccagccagttgcagtctataccaagagccacatgttagtgataaagaggtcgggtaccaaggacctgaaactaaatttgaagatctagaatggagggaaatgaaaggcccatttgttacgatatggcttcacaatgttccctggggttctgagaacactttgactgctcctgctgcaaaggtcagttacacatttctaactaaaatattggatattcttttgttgagcaccatcaagaaggccttcataaggttcttttacttgcaaaaaaacgttaaagcttcttttgtatatggtctgatgaaacagttttctgatggctacctggacttgattgtcttgaaaaactgccctaagcttgtcctgctctcacttatgagacagacgagtagtggaacacatgttgagtcaccatatatagtgtatataaaggtttgtcatccaaaaccccatatggctgaattctttcatttgacggcttcaatgtaccttgtgactatgcatttgtgattgactaaaaagcttactgtcgaaaaggtgaaggcatttgtgctggagccgggtgcacttgtagacgaaccagacaaggaaggaatcatagattcagatggagaggttttggcaagaggaaaaagaacatataaatgtgatcaaaaggccttgatgtcttacgacaagcttcaagtaacagttgatcaaggtttagccacactcttctctcctgaatattgataatgttaacaatactcgtgagatgaagacacattcacatcatacttcataaaccttgattgacctttgatttatccttttttgtaaatgttattcccttgtggttgtgtgtgttatttgattgatacacatgtacagtacattacaggaaatgagaaccagacaaatgttttgtgtgtttcttacaatttatcctaagattctatagaaagattgttctgtaaattttgtataagccagagggagctagtacttgctaaggtaaatgttaaactttaaccatttctcattgaaattgtcaatgttatttactataaatcctcaccatttttgacattttcttgcaggattccattgtttacctgcaaatgaagaatgcaaatccaaatttcacatcctaacatgattaagaaattaaacatcttccaatggtgagtctgttttttgtgcttaccagattaatggttgtgaactgtctcagcatattattccaattttagagctccgaagcagagagactacagaaaagtctagttcactttcttaaattagttaatacggtgtcgtattgggacactcttctttaattttctctctggcctaagagaaatcgacacgtcatagctaagaggaggggtattgccacgtcatctcatccactcgccaggctaggcgcgtgaattgcatttccctcctgatcggaaaagtcttaccaaagattagctttcaggtcaatttttaaatcttagctctcaccaacgacgaaactcgtctccctccatcttgctatggatcgtcagccggagagggagaatgatgaactaccatctccggcgataatttccgaccgagttctggtaaatggtgttgtcacgccgttaacgttgaccgccgagggagagctacgatcgacggaatctggacggcggaaatcgacgttggcaaaagaaatcctgagtttcgtcgtggaaggtaacaaggttagagtaaagaccttggttgagaaaggaggaggaatttgctgtagaggaagtgctggagattatgcgaggaacgatttcgttttcgagcctctctctgatgaatctagaaagctttggtccgataagttccatcaacacctcgtctctctcggttagttgaattatcgaaaattgggtatcaccagagctaaaatttcgaaatgcctttctcaaatctcgatgctgattggtgattctttaggtcggccaaagaaattgcttgtgtttgtgaatccgtttggcgggaagaaaacagcgagaaagatatttcaagaggaagtaaagccattgtttgaagatgcaaatattcaacttgagattcaaggtttctaatttctattatcttcttccaattctactgagggaaattaacaatcggattacttttgatatttgcttcagaaaccaagtatcagttgcatgcaaaggaaattgttaggtccatggatgtatcaaaatacgatggtattgtttgtgttagcggtgacggtatccttgttgaggtaagtaagaaattttctttatgttgtggaagtatcattttctctatgtatattttattggatatcttaatttggaagtgatgatgcgtgtctttcgtgctgttctcacatgatacttactaaagcaatttagaattgatatcttagacaaagtaagaggaattgcttttgggagtatctgtagaggaagcaatctcttgtttaattatatgtttactgttttgcttatgtttgactctgggattagaaaattattgtattggtagtgattcttaaaattggttcctaatttagtaggttgtaaatggactgcttgaaagagaagactggaagactgccataaaattgccgatcggaatggtccctgcaggttcgttctgcctcatacttctcttgtcttgtgtgtccatgtgaaagtttagatgtaaaggttatccttaagtaagattgaaacagttttctgtttatcataccaaattgatatcttgtgtatgagaaactttaggtaaacatttttactttgcggttctttgtgtgcactaacattcctaatggcaggaagtggtaatggcatgattaaatcattgttggaaccggtagggcttccttgtagtgcaacaagtgctactatttcgataatccgaggtcctgctccatgccatacgatattcaatctttcaaaaacatttcgactttcctaatgaatcaactcactgtcacactatttctgtattggcaggtcgtacacgttctctagatgtagcaactatctcacaagggactaccaaattcttcagtgtcttgatgcttgcttggggtatgcaaggacttctacttctttgtagtgtagtactctagaatgtagaacttgatttgcaaatgcaagtagtggctgagcttactgaattattctgttggttgtactgagagaaattcattttatttcaggtttagtggctgatatagacatcgagtcagagaaattcagatggatgggtagtgctcgctttgatatctatgtatgtttagttgaacatttgaaaattttctgcaatgcatgttttaatatgcgttactcaactaagttactggtggaggttgaacaaaaaaaaaaaaaaaaagagattgtgtgtttctaactggatgctgttttcattcaactaaagaccttgcgttcactcttctacgacttgcatttgcagggtcttcagaggataatatgcttaagacaataccatggacgaattctatttgtgccagctcctgggttcgaaagctatgggcaacgagccagttgcagtatagataaagagccatctggtagtgataagacactcgtataccaaggacctgatagtaaacttgaaaatctggattggagagaaatgaaaggcccatttgtttcagtatggcttcataatgttccctggggtgctgagaacactttggctgctcctgacgctaaggtcagttaaacattttgaaaccacgaaaacacgatttttttggaatccttttgcgtttacttgctataaaatcttgaaagcttcatatggtctgattaacagttttctgatggcttcctggatttgattgtcatgaaagactgtcctaaactagccttgctatcacttatgacaaagttgagtgatggaacccatgtccaatcaccatatgcatcatatctgaaggtttgccatgcgaacccaattttatagttgtaatatttcatttgatgactttgatgtctcttttcgaaatgaatcggaattttatgattgactaaaaagcttacacgttggtttttactgttgaaaaggtgaaggcattcgtactggagccaggtgcacgcatagacgaaccagacaaggaaggaatcatagattcagatggagaagttttggcaagaggaagaaaatcgtacaaatgtgatcaaaaggctttgatgtcttacgacaagcttcaaataagtgttgatcaaggtttagccactctcttctctcctgaataattctgactgatacatgagatgtgatgagatgagatgaagttgtcccttgtggctataatttgattgatggacattacaatacaaaaaatgagaagatgattcgagttatatagtaaatccctaaagattaccattgagtgtattgtttattgttgtattgctgttgtattgcagttttgagttttttgttagaaagttgtgtgaactaagatattgagaagaccataaatactaaatgtgagatttttttgaactcttggtgtaaagtgtaaacatatttatgttgggggatggtagtcctaaagcttaaagctttgtggcaaatataaaatgaagattaatattgtcaactagcattagtgtgacaaaaagttgggagagattttatgaggcaagcaactaaaaaattgatgcgacatatcatataactaaaatgataaaatattgtccctggaatttaatttggacctaccatactaatgatgacttggcgttatacattgaatattttaattaaaaaaggaataaatatcatagaaaaagcggaaataaataagtaaagtaaatgttgtgagagagctttctttttcagagagtattttgtttagctgatgaggcaaaaacaaatagaagaaattaattacccgaaacaacaacacttcactatttctcctttctcagctgctttcaccattttctctttttctcctccatcaatctttctcacggttttctagggttttatatatgctttcctcttcatccatgtcatcgtcttcgttatctgctagattttgcttcaaccacgaatgttttgagttcaaactcgaccattgccgtcctggttggcgtctccgttctggcgatttcgtcgacctctgtgatcgttgcgcgtaagcaaccttttccgtacttcttttcttcgcttatttttactctccctgttccatttttttgagttgatcatttttttttttttcaagtgtgcttgtctttgattttggaaaacttacttggttgtttttttcctacttctttctttgtgtaatttgggtctgtcttagtaagatgtggcagcctgtggtaatttctgagtttttttgttgtttgctttgttttggagtatagagtccccatgtgttgactacaagccgagaaattaggagccactcttttcggatgttttggaattgtttaacagtgttgaatttaagtgactggaatatagagttttaagcattttgatgggcgtgtgaggactaattcgtttcacctgaattctttatgtggcatcgatgttgtgtaacaagtttagagtctagaggtccaaagtccaagtgacacgaaagagatagaagaagtgatactaggagacaaaataattaaagcaataggaagctactttgcattctgatccattagattcgagaatttgttcactagtggccggttttctgaatttttatattctgcttcatcaaagttagaaattagacacatgattagtttcttaggcttactatgatattttgtgaaataataaattgggtatggtaatggtttctatgtaaacaataaggtcaccttcatgggattgcaaagccttttgagtatcaggaattaactaggaatgagatacttttgctcttactacttcttgattgtaaacatgcatacatgtgttctgtctttgatgggtttatttttggaaaacatgtatcagtttgatgatataatcttcaataattttcgttcctgtatgtagatcttttcttaaaaatgctttgattctttaactatggatgcgtggagactatatagtgtatagtttccttaggcttctgtttttgttctgaaacataaacttcatcagagctgaaaaagtatagttaaagcttacaagttctagttgcattaggcattaaccaacacaaatagtctggtttttctttgtttgatttcagtactctgcagacacgattcttttacctgctctttgcatcaatttcattaacttgttagtgtattatcgattttgcaaatatctaatgattgtattctggttccagctctgcgtatgaacaaggaaagttttgtgacgtatttcaccaaagggcttctggatggaggtgttgtgagtcatgtggaaaggtaactatatgatttactagttaaaattttctatgtctccttggcatcccaaaatcatacatggggtttccagatgtgaagtctctcactaatagcatttcgtgcagcgaattcattgtggatgtattgcgtctgcttctgcttatacgttaatggatgctggaggaattgagtgtttggcttgcgcaagaaaaaagtttgctttggtgagggacgatttcacttttttatttcctgtcaccaaattccatccatattttttctcggaggcatgatgttacctgattcaatgtctctcagtaattatatatcttaagctagcaagcaaacttcaactgtacaaagatcttttcaagtttaagatcgatgttgagctgtagtctgtgtgctataacagtctgtattcatgtgtttcagggacccaatttttcgccatcaccgtcctttcttttccagtctccaatttctgagaaattcaaggacttgtcgatcaactggagttcttcaactagatcaaatcagataagctaccagcctcctagttgtttagatccttcagttctgcagtttgattttcgtaatcgtggaggtaataatgaatttagtcaacctgcttctaaagaaagggtcactgcatgtaccatggagaaaaaaaggggaatgaatgacatgatagggaaattaatgagtgaaaactcgaaacattatagagtatctccttttccaaatgtcaatgtatatcacccactgatctcactaaaggagggtccatgtgggacacagcttgcgtttcctgtgccaattacaacaccaattgagaaaactggtcactctagactagatggaagtaatttatggcacacacgtaattcttctccgctaagtcgcttacacaatgacttgaatggtggagcagactcgccattcgaaagcaaaagtcgtaatgtgatggctcatcttgagacgccaggaaaatatcaggtggttccacgattttggcccaaggtttcatataaaaaccaagttctgcagaatcaatcaaaagagtatccttcttctcttatagatactacattggaatataactttgtatgtttaccagaagcatatgaatcatgctttttttcatacttctgtgtccttttactcttgcttttagtttgtcgttctagcttttgatatgaataagtctatactaggttgtagaatagggtggatgtaaggctatcagataaatggttttagggataggttttactttggatacttctaagttaccagaaccttaacgatgtgtaagatctgaatccgttgtcactcctctctttgagaagatcctgagtgcaactgatactggaaagcggctggtcctgccaaagaaatatgcagaggtaaataactgtttgcttatgcaagtacatattctcgttttcttatttaaatggttaatcatgtgaatagaatttgggatgtggctctctgttgcttatagcaaatacttcactgcttttgtatgttgaatctagtagtcataatatctgaaaactttacagcgtctcaaattatatataagatgccaaatgaacaaggcatctgctatgtaacaggctttcttgccccaactttcccacaccaaaggtgtgcctctcacagtacaggacccaatgggtaaagagtggagatttcagtttcgcttttggcccagcagcaaaggcagaatatatgttctagagggagtaactccattcatacagaccttgcagttgcaggctggtgatacaggtatatcgtttgtgatatagtaatttggtttacaggaatatatgttttatgtagtagcatttgctgttcacaattccatatgtttaatgcggaagcaactttttttctcactcaattactatttttaaatgatatcttttatgaagcatattacacttcttctgagttaataaaatttttctagagcttatgcctgggagctgatttccatttactttttagtcatattcagtcgattagatccagaaaggaagttaattttgggattcagaaaggcttcgattactcaatcgtctgatcaggtgactttccaaattaactagatagcttttaattgtaaatacttatggttcactatagttacaatcttaacttagtagtaaactagcggctagttttaaaagctttcctgaatgtcagctgcactctagagtatagtcaaagcacaaccaggaataacacgctgaagtataatgagtgaatacgcattgtctacttctctattctttgttcaatttgtgttaagtgattaaataggtcggacaagattcacaagtatgcagttcgaatatggttttttttatcatcatctcttctgtctcccattttggttagttctcaaagtgctgagtagtcatgtttattcgggcatggaaatgagttacaaagtatgcgaagtaactaaaatcaaactacaccttttcttgacaagttagcttgacaaatatattatatctcttctccatttccattagcaggctgatccggctgatatgcattcaccgtttgaagttaagaagtctgcttatataactaaagaaaccccaggagtagaatgttcctctggtaagaagaaaagcagcatgatgattacaagaagtaaacgtcaaaaagttgaaaagggagacgacaacttgctgaagctaacatgggaagaagctcaaggatttctcctgcctcctcccaacctcactccatctagagttgtgatagaggattacgagtttgaggagtatgaggtacatccatatgtttttgctctaatttgcataagtggtctatgccgattaagaatcttattctcttttcgtttctttaggatttggctgtagtttctcaagtttcttctggaatacaagattatttcatgatattaaaaataacctgttgttcatatacacattgggtgctagaagttgtttgtctctagcttttaaaatattgtgtggttaatcggcttagagtgctcttacctaaaacagttgataccattgatgtgccgtgttattttgttatcaaccatcgttttttttttttttttttttgtgtttttcaaatcctgttttacttgttttggaacatatcaattcactgagttatttctttaatgcttctcgtgtcaaaataggaggctccaatcatcgggaagcctactgatgttgcagggtaaaccacacatctttgcttttattggcttttctctttgcttttaggtgtttgaaatggtgaatcttatcgtagataatggcggtagaatcaaattagggtactggtactattcattgtccgagagtgtgttgccaagtgttgaaaagctcattgattttcttctgcttcttgtttttttcttttggatcgtgttgtctctagtttcagatcaacgtgcactgaagttgaaggactgttgatatcaccaacaaccacaaagcacccacgacatagagatggctgtacttgcatcatttgcatacaatccccaagtgggataggtcctaaacacgaccgatgctgttcttgtgcagtctgcgacactaacaaacgccgtaggcgttccctgttgctacggagggaaaagaagcagatggagaaagaagacaatgcgcgcaagttgctcgagcaactgaattctgataatggacttcaccaatctgctaacaacagtgagaatcatgagcgtcatgcttcgcctttgaaagttcaattagatttgaacttcaaaccagaaaaggacgaagaatctctccctggttctaacaaaactaccaagagcgagactctgcctcatgatgacacagtaaagtctagcttcacgtcaccaagctcatcaagtgctcatagccaaaataacaaggaagatgaaggaaaactcaagacaaccacagaaattgcagacaccaccaccacaagctccatgtagattttgcagactcttatagctgcaaggtgaatagattatgatgggaaacaccagaaagtttttggtcaatcacctttttaaccccacaggcttttgcgcattttgtagataaatgggcaagttcttatccttactgatgaattgctcattccttttcttactcgcagctaatgaaaatgggcaattttaatctctcttaacgttttatagttgatatagagtctttacatttgttttgaaaagactaaaggagaggaatgttccataaccacatataaagccacccatgtaacgatataaagccaataatcagcacaaaagagttagattcatacattacacttcatgaaaaaaacaatttctggattggcatcatcttttacacaacaaaaggaaaagcttgttttgtctacgaacattcatccccaaaatatatgtagcaaattgtcatgaaacaaaaatctttgttcctaaagccatcattataactacataaagccaaactaaacaaaataaaccgaacacacatcagtctctagtggcacatcggttaattaccagcattaggcaaagcagccatgaacgagttataggatgactcaagatcaaagtgaagttgccgagcctgctgctcagtgagttcatctgaagctcccatctttgacagcctcaaaagccattccttcatcttaatcttcccctcgaaatctggtggcaatatacttagtttgttaagagaagccgagagatcagacaacaacggatacacctgatcaacagcaaccatgttgagtttcaaagaatccatggaagtgatgaagttctgaacacactcagcaacaacagaagcagagcttgatgtagaagccgaagcagcagctctatgctccacagtagctggaacaccagaagtcacaaggcgataaactgcagctgagcaatccatcttgtacgtctctgcaaatctctcaatgtttgggaccatatctttgagagatgcagataatgtcttgaagtgaacaatgagtttctggcactcggtttcgtattcagatggagagattagatcacgaatataagccttctcgagcttctcagtagctttgatgatagcataaagctctgcgaaattctcatacatttctctctcacgcttatcattccataacttgacctccatctttcagaaactgagagctaaataacttgatgagctttcactattatagggaactttggagaagagaatgggacacgcgcaaagacgaaaacaaaaagcaaaaagcttcctagctgatatcaaaatcaatagtaccaagttaataaatcacactaaggagattaacatctaaccaaaacaagagaaatgcaggtgatcatagaagatagaaaagaggaatcattaaaccaaaaagcttaggaggttatctcaagaaccagaagacattgatgaacaaaaaccgagagagaggatgatatgaaatcatgatcataatcactaaagctagaaatggagaaaacccaatgaatctttaccctaaatcattgaaacccaacaatcaaaataccaaatttctacgttctactgaagcaaaaaccataatttatgaagtgagagagaaactcacaaggaagcaagttgggagatttcgatggtagagctacttctccggattatagaggacaaagatatggagattggagagagagagagagaagagagattgggagattgcgtgtgctcacacgacacctctttatgatgatgaattgatgatgaaagcttttcacgcggtatgaacaaaacaacacggaggcaaggcaacgaactctgtctctgtctggatcaacaacaaatcaatcaccatcgattctcgcgcaaattaaattaaatataaatttgatcgatttcgaaaaacgagaactcgattaaccctaaatcggaaataatctgacctgtgggctgtggagttgacaatcgggttatcagagagaatcgttcgagcagagagccaaaccaattcaatccagagactttttgtgtttagtcctttcgcacgccttttcccgtatattacgtgcgacttttttaccctccttcaattaatacattactccaatttttatcttcacaaataaattattttaatattttcatacataaatgagcttttgattggttacaaattcagaacgatagaatcatgaaaaataatttgatgattttttttaagatttcaacaacattactttcgaattttactactcaatgagaacgagtgttttattttgtcacagaagtaagaagaatttgagtatttgaactgattttacaacaattgaacaaagactagagtaacaatggtgaaaaagtttcatttcatgcatacgggaaagatattaatatgagtagtgttctttacttcttttgatgaaaagtgtagtggctttaacattattgttcatatcatctaaattttcaactttattgtttcttttttccccaatcatggaaaccaaaagttgtaaagcaaaacctttagatctttctcctcaacataacaacatacaagatcaccaaagattggctataaaaatggctggtttaaaaccagtccatgtccactctaacgcccaaatcattcggtctttttatcgagtttcttcttggtctcgccgctataaggaccagcatgataagcgtgtttctgaaccgcagcgaagataaccatctcaagacataccaacacattctgaattgcttcttggatttgttctacctccaaccagaaatggtgagattttatgaatcccattgccaccagtatgtctagtgctattccctgcagtttcagaatcaaaagaatcttatgagtatatccaaacatgagaaatcttgttttgaggggtttactgattaatgcaaacattacctgccaaaagacaaagaagacaattcctttgatgcagaggaactttgcgagtggattatgaggagcaagctccttagcaaacacatggtagaatatcacaagagaatacaaggccagagaaaccgagaaattgacaatgatagtgaatgtccagctcaaccatgaaggataaaacccgatgagctgtaaagctatcatcaaagtggagcacacgggtcgaatgaccacaaattgccatgtccagtatttcaaaagtttaagagtgtgacgatccaaacggactacatgaggctgtcaaaacaatagacacaaagcttttaagggtaaagaagcaaatagatattagatgaaatcatgcaatgaagatagagacgaacctgaaaaagagtcattgggaaagaatggtgaatctctcttcctttgattccatcaggcaaaatgtttttgctcatagatatgtttagataactatacatcaatgccaagaatttggcaatgacctgcaaaatatcgaaaaaaattggtaagtgtcgtctctacaatatgttgtatactaacacaagcgataaaacaatatactcacaagagcttcgtagcattctttgatggattcaagaaagaggaagaaggtttcacttcctttgacttctaacaaaccaataaaggaaacaacggcgtagataggagccataagcacaatgatgagtatagccttttgttccttagggttcttccagtggaagagatgctgcgatacaagctgtatcgtgaaatgaagtgtgagcaagacggaaaacgccgagcaataaaaagtgatctgtggaggcttcagtttcgttaggtccatcattgtgtcctgcatcaaaattaatacacataactctttagcatcaagaagccatcagactttgcacaagaattctaatcaatcaaacatctaaatcttcacaaatgtttcagcattatattcagccaaatagctccacatcaaaattcactctttagcttaacattaatttaaactgtacaatgaaaagcaaacatctcatgagatctagaaagctaaatggttggagcaattagatatctccgtatcaaaacagagtatataaccgaattaaaaactcaaactttatagatgactgggaaaacgggtgatgaactcgataaacccaatcagacccattaatttgaaaggtcgaattctgattttgtctatgttcccaagactgattcaaagctagataagcaaaatctctgtaaatctgaacaaagcaaaattagctaaccagagagagagaaagagaggaactaaccagataagagctagggaagaagcgaagatgagactcggagagtgtgaagaaagtgaatcagatctcttagtagttagatcatgaagaattgagggagcatgagaccgccattaatggagtcacaaacgtggtcgtattataaaaatggcgacgcgtttaccacgtgagagagacgctacgattgcataaaaagaagtcggcattggtatacatgtgtctctctgattcgtccacacggttttgtcgcatttgttggagaaaagataagtcttttaaacagaggtcggtatggtatgtatttggtttcaaggattcatgaaattgatatatgattgtgatgtaagttattgattttttcttcattcattacacgtcatgggctgagagaagaaatcaaaagagaggatttgtatctttgagcccaaaaaaaaaaggcaccatcttggaccattggtttggttggaccaaataatataatgatgtggtgaaaagttttttagcggttatgaaaatcaaaataaaaaaaaaaggcggtaagaaaaatggcaatgcagtagaaatggtggttcaaaaatggttttagaagtgagatcatctttatgctcatttatcttgggtttgttcgggctctaacaccatgtacaattttaatcatttgaaaataagtggaaagatctatacatttcatatactttatatacttatgttgaattagctccacatcttattggtaatggtttgacagtttgaattatagcagaaataaaaataaatatatagatttaagaaatataattgctccaaatgaatgacatatagttgaatgattggaaaaataggtgcaaatggttgcctaaaattaagaagttgaaagagttgaatgagcatttatctattttttttaccatttaagatgaataagttggaaaaatgattcaaccctttcaacttaaaaagttggaaaaataaactaattataaagaaattttttcaacttgtatatcttctatttcacagagaaatgagttgaataatattcaacttttatttttcaactcaaaatttccaattatttcatctctatgcaaccattttcagcaaaaccaagttgaacattattcaactcattcatctacaaaagagtagatgaaatggttgaacaagtttcttttataatttgttcatttttcttttttttttgttgaatgagttgaatcaattttccaacctattcatttcaaatcgtaaaaataaaataaatagttattcaacattttcaaccttttattttaaaacaaccaattcatctaaataattttattactttataacaatcgcttgttgaggagatgacttaatcacttttcattttctcttcgtgaattcgttttactaagtttccgttactttcaaatgtactcaaaacaaaaaaaacaatcgcttgttactataataaaagatcgatgaaacaagattctaatgttaagcattttgaaatgttacgaaaccgtacaaacaatttatgtgattaacgtcaaatgcataaaaacgcaaacacaaaaaatagcagttaaatcttataaagatatttcataaaatattacacactcatgaaaggtcttaaaagcttaattagttctcattatcaaagaaaaaaataaaagcttaattagttcttaccgaaaaaaacaaagcttaatgttgatgagtgaacgagtctttccacgtcgtccacactgtcctcgtcgtcctcgttgtctacgtcgtcttcgtggtccaggtcgtcgtaattggaagtggcgagagaaaatccgatttggcggtgcccaaaatcaaatatcgtatgatatctctgagtaaaggcattccaagaatattgtaaacaaattaatatataaatttaattgataagtaatttacgaaacaaaacgtacttaatgtgacgaaatggagagatagtcctccgaagtgaaataaaaagcacatcgggcaaataatttgctaccgctgctgccactttggcatttgtaaatatcatcctttccatatgactagaaaatagaaaacgaaaagagaaagtattaagttaacataaaacaacaaataataataaaatgttgtaaataaaacttacacgtctaccacaaatttgagagtaatctctcgggtaatgagatagaaaaataaatataaatgataaattgcattagtaaatagtatttgatacaaaataaaatttaaacattaaatcctttactaaccgggggaccgtatatatacggacagctcatatgaattaaagttttatgggtgagtgatcctaaaaagaaaaagaagatgtaaagtttatgtactgaaaacacacatatatagatagactcattattgtaattaattattacatgatatccgttgacttggatggaatgcatcctaatgattcatctattaccttcaatgaggttgaagtatatatgctcaacgacaaaatgaatctgatcaacatcccgaacgattgtttctcctcccaaattatagctgtcaccataatgaacttattcatagtaattctgtagccacaccgacaatatatttcgatgtaaaaatctttgatccatcatatttgtcctaaaattatttctaatttatttcttatttttatttgttatctaaatatacctaatctcatagctctattaatattttgacgttaaatcattgtataataaataaattgatgtacgtaacatgttcaaatatatacatttattttcagtagacttttagacacacaatttatatgattagagtcgaatgcataaaatctcaaacgcgaaaaataagcggttaaacttttaaacacaaaataatataaaaattgagcggttaaatcccaattgcggcggttgaatagtaccgatcaaaccaaagattttggaatttgacggaacaaataaaccgtggagcattggtcaataacaacactctttactctttcttccgtttgctcgaaccatctagtctaagagaaagaaaaaatactaaagagaaagaagaagaggacttgaatacggaagcttgagagaatgaaagcgatcgtgatctcggagccaggtaagccggaggttctgcaactccgtgatgtggcagacccagaagttaaagacgatgaggttctcatcagagttctcgctactgctttgaatcgtgcagatactctccaaagacttggcctttataatccaccacctggctcaagcccttaccttggtctcgaatgttctgggaccattgaatccgtcggtaaaggcgtctctcgatggaaagtcggagaccaggtagatatatattcctgtgatttcgtttctggaaattagggactaatcctcaattttggttttagggtttggtgtctctgtgttaagttatccgagcttggatttaggatacagaacatttgaatacactgctcagtgctcacactcatgttcttaatgatttaggattcataacatctgaatttgaatgacttggtttctgtctagttgcaattcgtttacatttgtttagctgttgaggcttcttatatttttgtgttggattggatttagttttactctaggcttaagcaagtaaattacttttgaagtataaagttattgtcttggattacttctgactgtctttgtctcaggtgtgtgctcttctttctggaggaggttatgcagagaaagtttctgttcctgctggacaaattttcccaattcccgctggtatctctctaaaggatgcagcggctttccctgaagtggcatgcactgtttggtctactgtcttcatgatgggccgtctctctgttggtgaatcattcttggtatttcaacttctcttctctttttatgtataaaaacagtttctatggtctggtaaaagccaatccttttacggtcaattctagaggcttttatctattactttgctttgcatttgtcttctctcttgggctgttttgttttctttcttgtctatgtccttgctaatgtttgatagtatctgaaattttagattcatggaggttcaagtgggattgggacatttgctattcagatagctaaacatctgggagtgagagtatttgtcacagctggttggtctgagcttcaatatattgataacctttatgtacttttttccgaaattgttcaaattttcttttaactaacagggagtgatgaaaagctagctgcgtgcaaagaactcggggctgatgtttgtataaattacaaaaccgaggattttgttgcaaaggtaaaagcggaaaccgatgggaaaggagtggatgttatcttggactgcattggggcaccgtatttgcagaaaaatctcgacagcttaaactttgatggaaggttatgtattatcggtttaatgggaggagccaatgcagaaataaaactaagtagtctgcttccaaagcgtctcactgtcttaggtacttaacacaatcaatcaatcatctctcaaaatcaatactgagagtctgagacctattgataattcttgatctgttttgttcctacaggagctgcattaagaccaagaagccctgaaaacaaagcagttgttgtaagggaagtcgagaagaatgtctggccagcgatagaagcagggaaggtaaaaccagtgatttacaagtatttaccattgtcacaagcagcagaaggtcatagccttatggagagtagcaaccatattggtaagattctccttgagacttgattctctgcaaagggagaaatgttcagagacaagagtcatggtcaataatcaataaaatctggtcgattctgttcatagatatctctttacaagagttctgtttgttggcttttatgtatctctgatttggtcaaaaagacactgtaactatggaacatatatagtatcaaataagctgttgtataccaaacattgatttcgaagtagaatatgattttgtaagaagtttttatttattttgggcttaaaaagtgtatttatttttgttaattgtttgatttaataaggatttttaccacctgaggcaaagaccatgaatatcaaaggcaacaacagttttgacttctctcgttttcatcggtccgtttgtacttcttctgataaaaacaaaaattttgcaaaatctaacaacaaaatctttgattcgacaaactttgtaacaaaaaaaatcgaaactttgcaatttttacagaatgagttcgtcgctgcgacagtggtttgctagagtactcgtgcttacacagctcatcaatggagctctgtgttggggaaaagaaggtcactacacagtctgcaaaatagccgaggtcaaaattgattcatgtaattagattctgagctcgaactctaaagttgctgaaagcactgtgattcatgtaaatttgatatctttggtaccaaattaaagatcgaattagctctgcaactgtcacaaatactctaggagattactgttatggtggagtctagatagatactaaacctttgatttggattgaaatttttctgtagacaaggtagtaccttttgtgttatctttgataatgccatttttagtcctcagagctactttgaggaagaaactgtagctgcggtgaagaaacttctacctaaatcagctgatggagatctagcatctgtttgctcatggcctgatgagattaagcaccattggcaatggcgatggactagccctttgcactatgttgacacacctgattacagatgcaactacgagtattgtcgtccgtttattcttccctcttccaattgcttacctgttttcatatccgaaatccaatctatatgttgtgtttgtgaaggggattgccatgatactcataagaatcaagaccggtgtgtgacaggagctattttcaattacactatgcaacttatgtccgcttctgaaaactcggatactatagtccactgtgagtgataatattatagtgagtctgattctaaagcttctgtttgagttctatggagcatagagttgtgactagtctttgtctgcagacaacttgacagaggctctcatgttcttatcacattttattggagatattcaccaggtaaatctctttgccatttaaatgaatcatatcagaacaaggtctgtgtctgaattatatgtaatctacgcagcccttgcatgttggttttctgggagatgaaggtggaaacacgataacagtccgctggtaccgtcgcaaaacaaatttacaccatgtaagtgtttgttatcgaatgctgaaagaaaaagttatctttcctgattggataaattattcttatgatcttccaatgatgaaggtctgggataacatgataattgagtctgctcttaaaacatactacaataaaagtcttccactcatgattgaagcacttcaagccaatcttacggtacaatcttactttctttatgaagctccagtgccagtatgtttataaatccgtcaactcacattgattgtttcctttaactgctatcttcatatagaacgactggtcaaatgatgttccattgtgggagtcatgtcaacttaaccaaacggcctgtccaaatccgtaagcatatataaatatatcattttctgtcaagaatcaagatacctatatgattagttctttgcagcaatgttaaacgcagaaagatggataaaattttgtgtaaagagatctaaaaagttgatggatcgcagagaaatatggttgtagctttcatattgattttcctaattacatcattgtcgagtcagtattgttttggattcttttcaggtacgcatctgaaagcataaatctagcctgcaagtatgcttataggaacgctaccccagggactactttaggaggtatactctctcagcattgaactcaaagtttcttggacatattagcttatctttgaacaatcagtgtatactctgaaacaagatcttagctttctttacccatacatgttcatctcagttatagacttgtatgcaatactgtgatcttcgagacttctctcgtgtttgttctgcagatgactatttcctctctcggttacccattgtggagaagagacttgcgcaaggtgggatacgcttggcagccactcttaaccgtatcttttcttcaaaacctaagcatgctggatcatgaaactgagataaatattcccaagaccactctgttagctcctttttttttttttttttttttttgcacaactctgttagctcctttagctcatgtaatgcttagtttttggagaagctatgcttgcttacttgataagttgatatcacccaacaaccatatatcttgatatctttattaataaacacagtttttcagaaatgttaaacagctggaaaacttccggttacttgcttgggtcgagactcactttaaatgactcaagagtaactatatacaatttgagtaaacaaatatttatgaacgtggtgacaaaataaaaactattatttttttgtttgttgctattccaccataatgaatacatagtaccatcaatggaagtataagactatactccatggagtagaaaaaggaaaaattcaaggctctttggcttcttctttcttctctgcacttgaatcaggttctcattgtttatacactaaaaaaaccttttttgcttactcggtgttgaaaaactgcttctctgtttttaactttggaaagaaaaaagtagaagcttttctcagaatgggttggtcgttgagaatgtggattgtgagtatactcgtgcttacacagctcgttaatggagctctctgttggggagacgctggtcattacgctgtctgcaaaatagctcaggttaaaatttccttaacttactttctaaagcgtagctctaaatttatcttagtaaatgatctatgtgagtatagatctgagagatttcgtacttgagtgagtgttgtaagatacttgaatatcaatttaatactctattgttaagactgagaggaaaaaagggaggctttttgttttgttttgttttactgtttcattgaatctactaaaaactcttctttggacctttgtgtgatatcttgattaataccatttttcaatctttagagttattttgaggaagatactgtagttgctgtgaagaaacttctgcctgaatctgcaaatggtgagctagcagctgtttgctcatggcctgatgaaatcaaaaagctcccgcaatggcgatggactagtgctttgcattttgctgatacgcctgattacaaatgcaactatgagtactctcgtgggtcttttattgatcttttctttcaaatttcactcatgtttctgtttgacgttggtataaaagtatatgtgctttgttgtctttctgtgaaggggactgtcctaaagactggtgtgtgacaggggcaatcttcaattacactaaccaactaatgtctacttctgaaaactcacagagtatagtccactgtgagttagagttctagtgaattctgatacttttgtgtgtgagttatatgaagcatcataatagtgtgacttggtgtttttttttgctttgcagataacttaacagaggctctcatgttcttatcacattatatgggagatatccatcaggttaattgatccctttttgcaagtttagactaatcatattagacaccaagtgatgttctgaattatatgcatttgagactactctgattattgcagctgagattaatgtataggaaacaacataatatatatgcctaatccttattgtggatttggatgttttcacagcctttacatgaaggttttattggagatctaggtggtaacaagataaaagttcactggtacaatcaggaaactaatttgcaccgtgtaagcgttttgttgtcgattatattgatgctaaaacgttaaatttcttctgattgtcttgaaagatctaaactttggaagttaccaagataaagaaaatgttttcttcaatagttctagtaatccaacttgtcaatccctttgaatatgaaggtgtgggatgatatgataattgagtctgctctagaaacatactacaattcaagccttccacgcatgattcatgaacttcaagccaaactcaaggtacaatcttactttctttaatcagcttcagcaagttatagtcatatccaagataaaactctactcacatttgtaactgccatcttcatatagaacggctggtcaaacgatgtaccttcatgggagtcatgtcaacttaaccaaacggcctgcccaaatccgtaagcatacataaattgctcatataaattttcctttccattgattttaattgcaagatttcgcggttgaagatctgtaaaagttgctgatcattaacagagtaaaatggttttagttatcatatcttttttcttatatatcactattgttgattctgtatgttcttgttgtgttaaggtatgcttctgaaagcattgatcttgcctgcaagtatgcttacaggaacgccaccgcagggactactttaggaggtatacttactctctgaggtttacaagatcaatagtcactctgaaacaaaatcttctttagctttctaatatgcaacaatgctttaaagttctttttctctcatatgtctttctacagattactatttcgtctctcggttaccggtggtagagaagagacttgcacaaggcggaattcgcttggcagggactcttaaccgaatattttctgcaaaacggaagcttgctagagcatgaaaaaagatccaggagaatcacttgaacatccatgaacactcttatgtattaataatgtgtaatggtagtagttaaggttatggtttggtattgttcctgcgttttaactataataagtatgaaacgaaaactgtacgtctacaagaaaacatagcatttgacttgaaaaatcaaacttaactaaaccaaaaccaagatgtttgaatttgaatcgaaaaatgaactaaaactagcataaaatcttacttgttttatcattcataaacctgaaaaaaatagaacctaagtgaaactatagtttgagtgcaaaaacaaaaatctgatcattcaaatcgaaaaaccgtaagccaaaaaattcgcatcaagaaaaacacatttcaatgaaattacaaagtttgatcacgattcatgatgatagatatcttggagtctgacatccaaaagaagagaaggaaacagagccaaggtcaacttgccggacaccagaatcagttaattagattcattggtaaaaaaacccggcaagtcatccttggctcaacctcattctctattcttccatgcaagaccctctgatacaactagagactctcatcatcgtaatcatcattatcatgttttctctacctttcttttcttgtcttgtgatcttgtcatactcgtgatgaaggtatttataggcatattgaaatgggaaatgtgtggattaatttaattgaaaattcatataatgttattatatgcaataaatccatgcatggttttaaactagtagtgcatgcaagctacaaaataaaatggaattttgaccacaaccgtatattgaagaatataattactttaaaagattggctgaccttatattatcaaattcgaataagaattttatgtgaataatattcgtactctgaaggcatcgacgcatcgtactagtgtgacataaaaatccacgtgtcgtatgtttcttaggattggaatcatagtcttgtgtggggttgatcaacaaaaggtgttatcgattgtcgtagaaacaatttagaaagattctttataaatagtctttttaaaaacattgccacaaatttcaaatgttgcggataaaatggaatatatattgaaaatttcagattgtcctttgggttgagaatatatcatttggagactcatcacattgtgaagggggagtactagtaaataaattttttcccaaagccaattgttgcacgagctagtaaataaatagtaatacatgtgatccaaagctattacacactctttatagctactagagtttcgatttgtgttatagctcccgatcgattaattgggataagccggttttattccatcaacatgaagcttccataaattcactatatcaaataaataattaggccaaaatataggaaattaaataagaccatttaaatagatctaagacgggagatattaggattgattatcttcaaattatgttttcaatttcattagttaggatttaattacatataggaatagaaaaattaccatcaaatggggaagatgagcaatgttcatataggattataaacaagtaaaaaaaaaaaaaaaatttatttttgggtaagaaatatatgagaattttgtgcgcgttccaaaaactcttgtaaattttggcaagcttatgaatattacataaagtttggtatataactggaaacatatttatattactaaaactcgtttaatattaattgctaaagaaagaaaacaggtaacaaaagcgttaaagttaactttgattctatttattgatagatcccatcattagattatgaaatatcgtatccgattagataaattcattaccaacctttttttctttccttttggtaaactctttcattttaaacatattgaatgttaagtgggattgctaacataaaatagtaaaagtttttttactataggacaacgatccaattccaagctaaagattgatatataactagaaatggtatttaagagcttatgactaacactagagaccccatctaagcccataaaatgaggttatctaagcaagttatgtctcacgtaatgatcattattgggctttatgggtaatctatcccgttactccaaatctagttcagctgccacgtcactctaactaactcgttggaggggaaagagtgatattgaagcaaacaagaacaacgacgattatgggttttggggttttatccatttctttgtctaattttatcagattttgtctagatttttggatccaaattattagcggaaatcgaaattgggttttacggttaaatctcgttcttgaaagcttcccttccatggggctttttatctggacttaaaagcttgtgctagtctcacttgatactaatgtaaaggaaggagctttggaatgcttaattggcaagtgactagtggcacaactgtcagtttatatattttgattaaacaaatcaaacgtgggtctgtggatgggcaataaacaacaacataaattgaagaatatcatcaccccaaatggtcaatggatagattagagaaatagaaaaatcaaaagaagctttggcaaagagctaaagatcaaagcttttctttgaggtaattcgtttgactctttttttttttttttttttgcttgaatcgtgttgttctctttgttctgctagagatttgatctgtaaattatgtgatttattaagaaattgaaagctctgtgtttcagaatgagattgtggattgtgagtgtactcgtgcttacacaccttgtccatggagctctctgttgggggaaggatggtcactacactgtttgcaaattagctgaggtgacttttcttgattagtttctgagatgttacactctaagatgaactctgtgaaagtgttgtaagatacttgaagattgatttagctttagagaactgtgaaaacaaaaatgcatctaggagctttctttattagttaggatggagataaatgtggtttaatcggcgtttcatcgaatttctttgagattggatcatgctttagactgaaaaggtattagctttgttgataagatgatttcaatttccaaatcctcagggattctttgaggatgatactattgctgcagtgaagaaacttctgcctgaatcagttgatggtggtggactagcagatttttgctcatggcctgatgaaattaaaaaactctcgcaatggcaatggactagcactttgcactatgttaacacacctgaatacaggtgcaactacgagtattgccgtgggttatcttttcctccagcttcatacatgtttctgttctgtttctgcttccattggctatgtattttctaagttcaactctatgtccttttgtgttttgtgaaggggactgccatgacactcataagcataaggactggtgtgtgacaggagcgatcttcaattacacaaaccagttaatgtctgcttctgaaaactcacagaatatagtccactgtgagttagattttaagtgaatctgatacttcttttaatgtttcagtttactgatttctgtgtgagtacatcgatcataatagtgtgacttagaagtctttttctttctgttcttggcagacaacttgacagaggctctcttgttcttgtcacattatatgggagatgttcatcaggttagtcctttttgcaaattcagtcgaatcataatattacaaacaaatgctgtcagagttatatgcatttgaggctactactctatctactctggactctggaggtttgattagtgtatagtagcaacacaagagtatggctaatctttatgtggattatgattttcgcagcccttgcatactggttttcttggagatctaggtggtaacacaataatagtcaactggtaccataacaaatcaaatttgcaccatgtaagtgctttgttttttagtcatattgatgctaaaaagtatctttcctgacacggaagtggaacgatcttaacttgaaggtctgggacaacatgataattgactctgctctagaaacatactacaattcaagccttccacacatgattcaagctcttcaagccaaactcaaggtacaatcttgccttctctaatcagcttcagcaagttatagccgtatccaagataaacacaacttacattgagtgtttgttgttacgtctgtcttaatatagaacggctggtcgaatgatgttccgtcgtggaagtcatgtcactttcaccaaaaggcctgtccaaatctgtaagcaagcatctatatatctgttaagttgcttaatagcagagaaaacttagttttcgttaccatatcattgttgattctctttgttctttgatgtgttaaaggtatgcttctgaaagcattgatctcgcctgcaagtatgcttacaggaacgctactccggggactactttaggaggtatacttactctatgaaaccagatcgtggctttttgttttctttaatcatggacatgacttgatcttctgctttctctgcagatgagtatttcctttctcggttacccgttgtagagaagagacttgcacaaggtgggattcgcttggcagctactcttaatcgtatcttttctgcaaaaccgaagctcgcaggattatgaatctaagaaaaagatccttgagaacccacgtaacaactccttttaagtgttttttataacactgtgaatggttgagtcatgactaatgagtgaacctccaaaatcttcatgcaaaaatttgttattttgggacatggttcaaacttccaataacaaaccacactaacggataacactttgcattttttttgtttgttttcagttttgttaattagtatccttcttcttatcttatgaaaaaggtaagttaacataaaggagtaaaatagaaaaagaagttagatttcctcattagattaggaatgataattcgctatataaagatttcaagtgagacataaaaagcctaagcgcaaaacacacaaaaaagagtttcttacgtgaaaagctacttaaaccctaaaagagagagagaaaaaaaaagcaaagccgacacagctagcgctctcgggtgcacttccacagcaatgaacggagaagagccaccttttaaaagaagacggatgaattttcttatgcttcctgatgatttggttttaaactgtttaatttggcccgcatctcaagatagtactatccaactctctctttagtatccaagagattccgctctatccttacttcaacggagctttaccagacccaaactctcttaggccgcaccgagagttgtttgtacgtgtgcttaacgcagattacatatgacgcttctaacccacaattaatttggttcactctttgccgcaaaccaaatagctcaaaaaagattttaatcccaatttcatatcctaaatctgcatcatggtcggatagtgtagtggctgttggtcctaatatctacgctattgggggattcagtaataatagaactaaaccttcgtctagcgtcatggtcatggattgtcgtactcacacatggtgtgaggcccctagcatgcaggtttcccgtgtgttccaatctacttgcgtccttgatgggaaaatatatgtaacaggaggccgcggaactctcgattcaacgaaatggatggaggtttttgatacgaaaacccaaacttgggagtttttgcaattcccgagtgaggagaagatatgcacaggctataagtgtgagagcatagtgtatgaaggaactgtctatgtaaggtcgtattttcataatgtgacttacaagctgcataaaggtagatggatagcggcagacttagcgatgaataatggatggcgttgctcatcatttttttgtgtgataaagaacgtgttctactgttgcaatagaagtggtaacggtatgatcgattggtatgactcggaaaaaggatcatggacaactatgaaggggttggaaagattgcctaaagtttatggtaatgttaaattggcatattatggtggaaaaatggtggtggtgtacgtggagtgctaaggagtggggtaacgtgagaaaaatttggtgtgcggaaattacgattgaaaaacgcaaggatggagagatttgggggatactagaatggtttgacgatgtatataaagccaaggatgagctagaatatttagctgtagtgcatgctgttgttactaccatctgattgataagagagtcatgtgaacattgttcattgattcaccgatgcaataacgaatttatctactatcatttgttttgattttctttctaaatcttttttgtttgttcttgtattgaattttaccttacatttattaagaaagtcaactatttgtcaacgttactggaaagttaaaaaggtaaaagtaataataatctgagagttaactttggacatcttcgccggagccgagacggaaggcgtgatggaagagatacaacaacaaacgcagaaggaagaacaaaagcaccgtgaagaagaagaggaggaagaggaaggtccgcctccgggatgggaatctgcagttcttcctcctccaatcgtcaccatcaccgccgccgtaaaccccaatcccaccaccgtagaaattcccggtattcttgtagtcttgtctattttagggtttatcgatttgcttccatttcttgctacagtctgatcaaattagagatttttagtggagtttgtagacttttagagataacccattttcgattccgagaattgattagtgttttttttctgcaaatcttctttgtttttggggttgttgcagaaaaggcccaaatggtatgtggatcttgcaggcgtttgctttcttatctaagaggatccaaacatgttaagtgctcctcttgtcagactgttaatctcgttcttgaaggttcgttcttccatggcttttttatctcttattcattacttgaaaagcttttgttgataatctcagtcacttgaaactcttaatggaacaatcttggaatgctctctcagtctagttttacttagcatgtgtgaatgatatatctatgttcttttgagaatctcaaaatgtaagcttcctgagaccaaatgagtttagttcttaactgacacaagaatgatctttggttaggattcttctcttaagcttttgtgagccttttggtctctactccatcataatgtctcctttgtagaccatttatgtggtctttatcctttactcttactactcttggggaaattgtgtgatcttaagaccaagattgttcttcttagcttgtgaatcacttggcctcattattgatgaaatagccttcttctcttatcggttctggacttgtcgttctttgtttgcagctaaccaggttggtcaggtgaattgcaacaattgcaaactgctactgatgtatccttatggagctccagctgttagatgttcctcctgcaattctgtcacagatatcagtgtatgtattcacagatggttttgtgctccatgtccaaatcatacttggaagagttgatacattttgagatccgagtaagtaatcatctgatgaatcatttataataaactgtgttatatttcaggaaaacaacaaacgacctccatggtctgagcagcaaggaccactcaaaagtttaagcagtctcaggagagcagagaattaaacttgaaccgatttttgtcaattttgaaccggtttgacgactaaaaaccttgtaataatgtcgaaggatagatgaaataaaatcaccattaataatctcattgaattc

SEQ ID NO: 608 - DNA, 107702 bp, Arabidopsis thaliana
gaattctgataatggacttcaccaatctgctaacaacagtgagaatcatgagcgtcatgcttcgcctttgaaagttcaattagatttgaacttcaaaccagaaaaggacgaagaatctctccctggttctaacaaaactaccaagagcgagactctgcctcatgatgacacagtaaagtctagcttcacgtcaccaagctcatcaagtgctcatagccaaaataacaaggaagatgaaggaaaactcaagacaaccacagaaattgcagacaccaccaccacaagctccatgtagattttgcagactcttatagctgcaaggtgaatagattatgatgggaaacaccagaaagtttttggtcaatcacctttttaaccccacaggcttttgcgcattttgtagataaatgggcaagttcttatccttactgatgaattgctcattccttttcttactcgcagctaatgaaaatgggcaattttaatctctcttaacgttttatagttgatatagagtctttacatttgttttgaaaagactaaaggagaggaatgttccataaccacatataaagccacccatgtaacgatataaagccaataatcagcacaaaagagttagattcatacattacacttcatgaaaaaaacaatttctggattggcatcatcttttacacaacaaaaggaaaagcttgttttgtctacgaacattcatccccaaaatatatgtagcaaattgtcatgaaacaaaaatctttgttcctaaagccatcattataactacataaagccaaactaaacaaaataaaccgaacacacatcagtctctagtggcacatcggttaattaccagcattaggcaaagcagccatgaacgagttataggatgactcaagatcaaagtgaagttgccgagcctgctgctcagtgagttcatctgaagctcccatctttgacagcctcaaaagccattccttcatcttaatcttcccctcgaaatctggtggcaatatacttagtttgttaagagaagccgagagatcagacaacaacggatacacctgatcaacagcaaccatgttgagtttcaaagaatccatggaagtgatgaagttctgaacacactcagcaacaacagaagcagagcttgatgtagaagccgaagcagcagctctatgctccacagtagctggaacaccagaagtcacaaggcgataaactgcagctgagcaatccatcttgtacgtctctgcaaatctctcaatgtttgggaccatatctttgagagatgcagataatgtcttgaagtgaacaatgagtttctggcactcggtttcgtattcagatggagagattagatcacgaatataagccttctcgagcttctcagtagctttgatgatagcataaagctctgcgaaattctcatacatttctctctcacgcttatcattccataacttgacctccatctttcagaaactgagagctaaataacttgatgagctttcactattatagggaactttggagaagagaatgggacacgcgcaaagacgaaaacaaaaagcaaaaagcttcctagctgatatcaaaatcaatagtaccaagttaataaatcacactaaggagattaacatctaaccaaaacaagagaaatgcaggtgatcatagaagatagaaaagaggaatcattaaaccaaaaagcttaggaggttatctcaagaaccagaagacattgatgaacaaaaaccgagagagaggatgatatgaaatcatgatcataatcactaaagctagaaatggagaaaacccaatgaatctttaccctaaatcattgaaacccaacaatcaaaataccaaatttctacgttctactgaagcaaaaaccataatttatgaagtgagagagaaactcacaaggaagcaagttgggagatttcgatggtagagctacttctccggattatagaggacaaagatatggagattggagagagagagagagaagagagattgggagattgcgtgtgctcacacgacacctctttatgatgatgaattgatgatgaaagcttttcacgcggtatgaacaaaacaacacggaggcaaggcaacgaactctgtctctgtctggatcaacaacaaatcaatcaccatcgattctcgcgcaaattaaattaaatataaatttgatcgatttcgaaaaacgagaactcgattaaccctaaatcggaaataatctgacctgtgggctgtggagttgacaatcgggttatcagagagaatcgttcgagcagagagccaaaccaattcaatccagagactttttgtgtttagtcctttcgcacgccttttcccgtatattacgtgcgacttttttaccctccttcaattaatacattactccaatttttatcttcacaaataaattattttaatattttcatacataaatgagcttttgattggttacaaattcagaacgatagaatcatgaaaaataatttgatgattttttttaagatttcaacaacattactttcgaattttactactcaatgagaacgagtgttttattttgtcacagaagtaagaagaatttgagtatttgaactgattttacaacaattgaacaaagactagagtaacaatggtgaaaaagtttcatttcatgcatacgggaaagatattaatatgagtagtgttctttacttcttttgatgaaaagtgtagtggctttaacattattgttcatatcatctaaattttcaactttattgtttcttttttccccaatcatggaaaccaaaagttgtaaagcaaaacctttagatctttctcctcaacataacaacatacaagatcaccaaagattggctataaaaatggctggtttaaaaccagtccatgtccactctaacgcccaaatcattcggtctttttatcgagtttcttcttggtctcgccgctataaggaccagcatgataagcgtgtttctgaaccgcagcgaagataaccatctcaagacataccaacacattctgaattgcttcttggatttgttctacctccaaccagaaatggtgagattttatgaatcccattgccaccagtatgtctagtgctattccctgcagtttcagaatcaaaagaatcttatgagtatatccaaacatgagaaatcttgttttgaggggtttactgattaatgcaaacattacctgccaaaagacaaagaagacaattcctttgatgcagaggaactttgcgagtggattatgaggagcaagctccttagcaaacacatggtagaatatcacaagagaatacaaggccagagaaaccgagaaattgacaatgatagtgaatgtccagctcaaccatgaaggataaaacccgatgagctgtaaagctatcatcaaagtggagcacacgggtcgaatgaccacaaattgccatgtccagtatttcaaaagtttaagagtgtgacgatccaaacggactacatgaggctgtcaaaacaatagacacaaagcttttaagggtaaagaagcaaatagatattagatgaaatcatgcaatgaagatagagacgaacctgaaaaagagtcattgggaaagaatggtgaatctctcttcctttgattccatcaggcaaaatgtttttgctcatagatatgtttagataactatacatcaatgccaagaatttggcaatgacctgcaaaatatcgaaaaaaattggtaagtgtcgtctctacaatatgttgtatactaacacaagcgataaaacaatatactcacaagagcttcgtagcattctttgatggattcaagaaagaggaagaaggtttcacttcctttgacttctaacaaaccaataaaggaaacaacggcgtagataggagccataagcacaatgatgagtatagccttttgttccttagggttcttccagtggaagagatgctgcgatacaagctgtatcgtgaaatgaagtgtgagcaagacggaaaacgccgagcaataaaaagtgatctgtggaggcttcagtttcgttaggtccatcattgtgtcctgcatcaaaattaatacacataactctttagcatcaagaagccatcagactttgcacaagaattctaatcaatcaaacatctaaatcttcacaaatgtttcagcattatattcagccaaatagctccacatcaaaattcactctttagcttaacattaatttaaactgtacaatgaaaagcaaacatctcatgagatctagaaagctaaatggttggagcaattagatatctccgtatcaaaacagagtatataaccgaattaaaaactcaaactttatagatgactgggaaaacgggtgatgaactcgataaacccaatcagacccattaatttgaaaggtcgaattctgattttgtctatgttcccaagactgattcaaagctagataagcaaaatctctgtaaatctgaacaaagcaaaattagctaaccagagagagagaaagagaggaactaaccagataagagctagggaagaagcgaagatgagactcggagagtgtgaagaaagtgaatcagatctcttagtagttagatcatgaagaattgagggagcatgagaccgccattaatggagtcacaaacgtggtcgtattataaaaatggcgacgcgtttaccacgtgagagagacgctacgattgcataaaaagaagtcggcattggtatacatgtgtctctctgattcgtccacacggttttgtcgcatttgttggagaaaagataagtcttttaaacagaggtcggtatggtatgtatttggtttcaaggattcatgaaattgatatatgattgtgatgtaagttattgattttttcttcattcattacacgtcatgggctgagagaagaaatcaaaagagaggatttgtatctttgagcccaaaaaaaaaaggcaccatcttggaccattggtttggttggaccaaataatataatgatgtggtgaaaagttttttagcggttatgaaaatcaaaataaaaaaaaaaggcggtaagaaaaatggcaatgcagtagaaatggtggttcaaaaatggttttagaagtgagatcatctttatgctcatttatcttgggtttgttcgggctctaacaccatgtacaattttaatcatttgaaaataagtggaaagatctatacatttcatatactttatatacttatgttgaattagctccacatcttattggtaatggtttgacagtttgaattatagcagaaataaaaataaatatatagatttaagaaatataattgctccaaatgaatgacatatagttgaatgattggaaaaataggtgcaaatggttgcctaaaattaagaagttgaaagagttgaatgagcatttatctattttttttaccatttaagatgaataagttggaaaaatgattcaaccctttcaacttaaaaagttggaaaaataaactaattataaagaaattttttcaacttgtatatcttctatttcacagagaaatgagttgaataatattcaacttttatttttcaactcaaaatttccaattatttcatctctatgcaaccattttcagcaaaaccaagttgaacattattcaactcattcatctacaaaagagtagatgaaatggttgaacaagtttcttttataatttgttcatttttcttttttttttgttgaatgagttgaatcaattttccaacctattcatttcaaatcgtaaaaataaaataaatagttattcaacattttcaaccttttattttaaaacaaccaattcatctaaataattttattactttataacaatcgcttgttgaggagatgacttaatcacttttcattttctcttcgtgaattcgttttactaagtttccgttactttcaaatgtactcaaaacaaaaaaaacaatcgcttgttactataataaaagatcgatgaaacaagattctaatgttaagcattttgaaatgttacgaaaccgtacaaacaatttatgtgattaacgtcaaatgcataaaaacgcaaacacaaaaaatagcagttaaatcttataaagatatttcataaaatattacacactcatgaaaggtcttaaaagcttaattagttctcattatcaaagaaaaaaataaaagcttaattagttcttaccgaaaaaaacaaagcttaatgttgatgagtgaacgagtctttccacgtcgtccacactgtcctcgtcgtcctcgttgtctacgtcgtcttcgtggtccaggtcgtcgtaattggaagtggcgagagaaaatccgatttggcggtgcccaaaatcaaatatcgtatgatatctctgagtaaaggcattccaagaatattgtaaacaaattaatatataaatttaattgataagtaatttacgaaacaaaacgtacttaatgtgacgaaatggagagatagtcctccgaagtgaaataaaaagcacatcgggcaaataatttgctaccgctgctgccactttggcatttgtaaatatcatcctttccatatgactagaaaatagaaaacgaaaagagaaagtattaagttaacataaaacaacaaataataataaaatgttgtaaataaaacttacacgtctaccacaaatttgagagtaatctctcgggtaatgagatagaaaaataaatataaatgataaattgcattagtaaatagtatttgatacaaaataaaatttaaacattaaatcctttactaaccgggggaccgtatatatacggacagctcatatgaattaaagttttatgggtgagtgatcctaaaaagaaaaagaagatgtaaagtttatgtactgaaaacacacatatatagatagactcattattgtaattaattattacatgatatccgttgacttggatggaatgcatcctaatgattcatctattaccttcaatgaggttgaagtatatatgctcaacgacaaaatgaatctgatcaacatcccgaacgattgtttctcctcccaaattatagctgtcaccataatgaacttattcatagtaattctgtagccacaccgacaatatatttcgatgtaaaaatctttgatccatcatatttgtcctaaaattatttctaatttatttcttatttttatttgttatctaaatatacctaatctcatagctctattaatattttgacgttaaatcattgtataataaataaattgatgtacgtaacatgttcaaatatatacatttattttcagtagacttttagacacacaatttatatgattagagtcgaatgcataaaatctcaaacgcgaaaaataagcggttaaacttttaaacacaaaataatataaaaattgagcggttaaatcccaattgcggcggttgaatagtaccgatcaaaccaaagattttggaatttgacggaacaaataaaccgtggagcattggtcaataacaacactctttactctttcttccgtttgctcgaaccatctagtctaagagaaagaaaaaatactaaagagaaagaagaagaggacttgaatacggaagcttgagagaatgaaagcgatcgtgatctcggagccaggtaagccggaggttctgcaactccgtgatgtggcagacccagaagttaaagacgatgaggttctcatcagagttctcgctactgctttgaatcgtgcagatactctccaaagacttggcctttataatccaccacctggctcaagcccttaccttggtctcgaatgttctgggaccattgaatccgtcggtaaaggcgtctctcgatggaaagtcggagaccaggtagatatatattcctgtgatttcgtttctggaaattagggactaatcctcaattttggttttagggtttggtgtctctgtgttaagttatccgagcttggatttaggatacagaacatttgaatacactgctcagtgctcacactcatgttcttaatgatttaggattcataacatctgaatttgaatgacttggtttctgtctagttgcaattcgtttacatttgtttagctgttgaggcttcttatatttttgtgttggattggatttagttttactctaggcttaagcaagtaaattacttttgaagtataaagttattgtcttggattacttctgactgtctttgtctcaggtgtgtgctcttctttctggaggaggttatgcagagaaagtttctgttcctgctggacaaattttcccaattcccgctggtatctctctaaaggatgcagcggctttccctgaagtggcatgcactgtttggtctactgtcttcatgatgggccgtctctctgttggtgaatcattcttggtatttcaacttctcttctctttttatgtataaaaacagtttctatggtctggtaaaagccaatccttttacggtcaattctagaggcttttatctattactttgctttgcatttgtcttctctcttgggctgttttgttttctttcttgtctatgtccttgctaatgtttgatagtatctgaaattttagattcatggaggttcaagtgggattgggacatttgctattcagatagctaaacatctgggagtgagagtatttgtcacagctggttggtctgagcttcaatatattgataacctttatgtacttttttccgaaattgttcaaattttcttttaactaacagggagtgatgaaaagctagctgcgtgcaaagaactcggggctgatgtttgtataaattacaaaaccgaggattttgttgcaaaggtaaaagcggaaaccgatgggaaaggagtggatgttatcttggactgcattggggcaccgtatttgcagaaaaatctcgacagcttaaactttgatggaaggttatgtattatcggtttaatgggaggagccaatgcagaaataaaactaagtagtctgcttccaaagcgtctcactgtcttaggtacttaacacaatcaatcaatcatctctcaaaatcaatactgagagtctgagacctattgataattcttgatctgttttgttcctacaggagctgcattaagaccaagaagccctgaaaacaaagcagttgttgtaagggaagtcgagaagaatgtctggccagcgatagaagcagggaaggtaaaaccagtgatttacaagtatttaccattgtcacaagcagcagaaggtcatagccttatggagagtagcaaccatattggtaagattctccttgagacttgattctctgcaaagggagaaatgttcagagacaagagtcatggtcaataatcaataaaatctggtcgattctgttcatagatatctctttacaagagttctgtttgttggcttttatgtatctctgatttggtcaaaaagacactgtaactatggaacatatatagtatcaaataagctgttgtataccaaacattgatttcgaagtagaatatgattttgtaagaagtttttatttattttgggcttaaaaagtgtatttatttttgttaattgtttgatttaataaggatttttaccacctgaggcaaagaccatgaatatcaaaggcaacaacagttttgacttctctcgttttcatcggtccgtttgtacttcttctgataaaaacaaaaattttgcaaaatctaacaacaaaatctttgattcgacaaactttgtaacaaaaaaaatcgaaactttgcaatttttacagaatgagttcgtcgctgcgacagtggtttgctagagtactcgtgcttacacagctcatcaatggagctctgtgttggggaaaagaaggtcactacacagtctgcaaaatagccgaggtcaaaattgattcatgtaattagattctgagctcgaactctaaagttgctgaaagcactgtgattcatgtaaatttgatatctttggtaccaaattaaagatcgaattagctctgcaactgtcacaaatactctaggagattactgttatggtggagtctagatagatactaaacctttgatttggattgaaatttttctgtagacaaggtagtaccttttgtgttatctttgataatgccatttttagtcctcagagctactttgaggaagaaactgtagctgcggtgaagaaacttctacctaaatcagctgatggagatctagcatctgtttgctcatggcctgatgagattaagcaccattggcaatggcgatggactagccctttgcactatgttgacacacctgattacagatgcaactacgagtattgtcgtccgtttattcttccctcttccaattgcttacctgttttcatatccgaaatccaatctatatgttgtgtttgtgaaggggattgccatgatactcataagaatcaagaccggtgtgtgacaggagctattttcaattacactatgcaacttatgtccgcttctgaaaactcggatactatagtccactgtgagtgataatattatagtgagtctgattctaaagcttctgtttgagttctatggagcatagagttgtgactagtctttgtctgcagacaacttgacagaggctctcatgttcttatcacattttattggagatattcaccaggtaaatctctttgccatttaaatgaatcatatcagaacaaggtctgtgtctgaattatatgtaatctacgcagcccttgcatgttggttttctgggagatgaaggtggaaacacgataacagtccgctggtaccgtcgcaaaacaaatttacaccatgtaagtgtttgttatcgaatgctgaaagaaaaagttatctttcctgattggataaattattcttatgatcttccaatgatgaaggtctgggataacatgataattgagtctgctcttaaaacatactacaataaaagtcttccactcatgattgaagcacttcaagccaatcttacggtacaatcttactttctttatgaagctccagtgccagtatgtttataaatccgtcaactcacattgattgtttcctttaactgctatcttcatatagaacgactggtcaaatgatgttccattgtgggagtcatgtcaacttaaccaaacggcctgtccaaatccgtaagcatatataaatatatcattttctgtcaagaatcaagatacctatatgattagttctttgcagcaatgttaaacgcagaaagatggataaaattttgtgtaaagagatctaaaaagttgatggatcgcagagaaatatggttgtagctttcatattgattttcctaattacatcattgtcgagtcagtattgttttggattcttttcaggtacgcatctgaaagcataaatctagcctgcaagtatgcttataggaacgctaccccagggactactttaggaggtatactctctcagcattgaactcaaagtttcttggacatattagcttatctttgaacaatcagtgtatactctgaaacaagatcttagctttctttacccatacatgttcatctcagttatagacttgtatgcaatactgtgatcttcgagacttctctcgtgtttgttctgcagatgactatttcctctctcggttacccattgtggagaagagacttgcgcaaggtgggatacgcttggcagccactcttaaccgtatcttttcttcaaaacctaagcatgctggatcatgaaactgagataaatattcccaagaccactctgttagctcctttttttttttttttttttttttgcacaactctgttagctcctttagctcatgtaatgcttagtttttggagaagctatgcttgcttacttgataagttgatatcacccaacaaccatatatcttgatatctttattaataaacacagtttttcagaaatgttaaacagctggaaaacttccggttacttgcttgggtcgagactcactttaaatgactcaagagtaactatatacaatttgagtaaacaaatatttatgaacgtggtgacaaaataaaaactattatttttttgtttgttgctattccaccataatgaatacatagtaccatcaatggaagtataagactatactccatggagtagaaaaaggaaaaattcaaggctctttggcttcttctttcttctctgcacttgaatcaggttctcattgtttatacactaaaaaaaccttttttgcttactcggtgttgaaaaactgcttctctgtttttaactttggaaagaaaaaagtagaagcttttctcagaatgggttggtcgttgagaatgtggattgtgagtatactcgtgcttacacagctcgttaatggagctctctgttggggagacgctggtcattacgctgtctgcaaaatagctcaggttaaaatttccttaacttactttctaaagcgtagctctaaatttatcttagtaaatgatctatgtgagtatagatctgagagatttcgtacttgagtgagtgttgtaagatacttgaatatcaatttaatactctattgttaagactgagaggaaaaaagggaggctttttgttttgttttgttttactgtttcattgaatctactaaaaactcttctttggacctttgtgtgatatcttgattaataccatttttcaatctttagagttattttgaggaagatactgtagttgctgtgaagaaacttctgcctgaatctgcaaatggtgagctagcagctgtttgctcatggcctgatgaaatcaaaaagctcccgcaatggcgatggactagtgctttgcattttgctgatacgcctgattacaaatgcaactatgagtactctcgtgggtcttttattgatcttttctttcaaatttcactcatgtttctgtttgacgttggtataaaagtatatgtgctttgttgtctttctgtgaaggggactgtcctaaagactggtgtgtgacaggggcaatcttcaattacactaaccaactaatgtctacttctgaaaactcacagagtatagtccactgtgagttagagttctagtgaattctgatacttttgtgtgtgagttatatgaagcatcataatagtgtgacttggtgtttttttttgctttgcagataacttaacagaggctctcatgttcttatcacattatatgggagatatccatcaggttaattgatccctttttgcaagtttagactaatcatattagacaccaagtgatgttctgaattatatgcatttgagactactctgattattgcagctgagattaatgtataggaaacaacataatatatatgcctaatccttattgtggatttggatgttttcacagcctttacatgaaggttttattggagatctaggtggtaacaagataaaagttcactggtacaatcaggaaactaatttgcaccgtgtaagcgttttgttgtcgattatattgatgctaaaacgttaaatttcttctgattgtcttgaaagatctaaactttggaagttaccaagataaagaaaatgttttcttcaatagttctagtaatccaacttgtcaatccctttgaatatgaaggtgtgggatgatatgataattgagtctgctctagaaacatactacaattcaagccttccacgcatgattcatgaacttcaagccaaactcaaggtacaatcttactttctttaatcagcttcagcaagttatagtcatatccaagataaaactctactcacatttgtaactgccatcttcatatagaacggctggtcaaacgatgtaccttcatgggagtcatgtcaacttaaccaaacggcctgcccaaatccgtaagcatacataaattgctcatataaattttcctttccattgattttaattgcaagatttcgcggttgaagatctgtaaaagttgctgatcattaacagagtaaaatggttttagttatcatatcttttttcttatatatcactattgttgattctgtatgttcttgttgtgttaaggtatgcttctgaaagcattgatcttgcctgcaagtatgcttacaggaacgccaccgcagggactactttaggaggtatacttactctctgaggtttacaagatcaatagtcactctgaaacaaaatcttctttagctttctaatatgcaacaatgctttaaagttctttttctctcatatgtctttctacagattactatttcgtctctcggttaccggtggtagagaagagacttgcacaaggcggaattcgcttggcagggactcttaaccgaatattttctgcaaaacggaagcttgctagagcatgaaaaaagatccaggagaatcacttgaacatccatgaacactcttatgtattaataatgtgtaatggtagtagttaaggttatggtttggtattgttcctgcgttttaactataataagtatgaaacgaaaactgtacgtctacaagaaaacatagcatttgacttgaaaaatcaaacttaactaaaccaaaaccaagatgtttgaatttgaatcgaaaaatgaactaaaactagcataaaatcttacttgttttatcattcataaacctgaaaaaaatagaacctaagtgaaactatagtttgagtgcaaaaacaaaaatctgatcattcaaatcgaaaaaccgtaagccaaaaaattcgcatcaagaaaaacacatttcaatgaaattacaaagtttgatcacgattcatgatgatagatatcttggagtctgacatccaaaagaagagaaggaaacagagccaaggtcaacttgccggacaccagaatcagttaattagattcattggtaaaaaaacccggcaagtcatccttggctcaacctcattctctattcttccatgcaagaccctctgatacaactagagactctcatcatcgtaatcatcattatcatgttttctctacctttcttttcttgtcttgtgatcttgtcatactcgtgatgaaggtatttataggcatattgaaatgggaaatgtgtggattaatttaattgaaaattcatataatgttattatatgcaataaatccatgcatggttttaaactagtagtgcatgcaagctacaaaataaaatggaattttgaccacaaccgtatattgaagaatataattactttaaaagattggctgaccttatattatcaaattcgaataagaattttatgtgaataatattcgtactctgaaggcatcgacgcatcgtactagtgtgacataaaaatccacgtgtcgtatgtttcttaggattggaatcatagtcttgtgtggggttgatcaacaaaaggtgttatcgattgtcgtagaaacaatttagaaagattctttataaatagtctttttaaaaacattgccacaaatttcaaatgttgcggataaaatggaatatatattgaaaatttcagattgtcctttgggttgagaatatatcatttggagactcatcacattgtgaagggggagtactagtaaataaattttttcccaaagccaattgttgcacgagctagtaaataaatagtaatacatgtgatccaaagctattacacactctttatagctactagagtttcgatttgtgttatagctcccgatcgattaattgggataagccggttttattccatcaacatgaagcttccataaattcactatatcaaataaataattaggccaaaatataggaaattaaataagaccatttaaatagatctaagacgggagatattaggattgattatcttcaaattatgttttcaatttcattagttaggatttaattacatataggaatagaaaaattaccatcaaatggggaagatgagcaatgttcatataggattataaacaagtaaaaaaaaaaaaaaaatttatttttgggtaagaaatatatgagaattttgtgcgcgttccaaaaactcttgtaaattttggcaagcttatgaatattacataaagtttggtatataactggaaacatatttatattactaaaactcgtttaatattaattgctaaagaaagaaaacaggtaacaaaagcgttaaagttaactttgattctatttattgatagatcccatcattagattatgaaatatcgtatccgattagataaattcattaccaacctttttttctttccttttggtaaactctttcattttaaacatattgaatgttaagtgggattgctaacataaaatagtaaaagtttttttactataggacaacgatccaattccaagctaaagattgatatataactagaaatggtatttaagagcttatgactaacactagagaccccatctaagcccataaaatgaggttatctaagcaagttatgtctcacgtaatgatcattattgggctttatgggtaatctatcccgttactccaaatctagttcagctgccacgtcactctaactaactcgttggaggggaaagagtgatattgaagcaaacaagaacaacgacgattatgggttttggggttttatccatttctttgtctaattttatcagattttgtctagatttttggatccaaattattagcggaaatcgaaattgggttttacggttaaatctcgttcttgaaagcttcccttccatggggctttttatctggacttaaaagcttgtgctagtctcacttgatactaatgtaaaggaaggagctttggaatgcttaattggcaagtgactagtggcacaactgtcagtttatatattttgattaaacaaatcaaacgtgggtctgtggatgggcaataaacaacaacataaattgaagaatatcatcaccccaaatggtcaatggatagattagagaaatagaaaaatcaaaagaagctttggcaaagagctaaagatcaaagcttttctttgaggtaattcgtttgactctttttttttttttttttttgcttgaatcgtgttgttctctttgttctgctagagatttgatctgtaaattatgtgatttattaagaaattgaaagctctgtgtttcagaatgagattgtggattgtgagtgtactcgtgcttacacaccttgtccatggagctctctgttgggggaaggatggtcactacactgtttgcaaattagctgaggtgacttttcttgattagtttctgagatgttacactctaagatgaactctgtgaaagtgttgtaagatacttgaagattgatttagctttagagaactgtgaaaacaaaaatgcatctaggagctttctttattagttaggatggagataaatgtggtttaatcggcgtttcatcgaatttctttgagattggatcatgctttagactgaaaaggtattagctttgttgataagatgatttcaatttccaaatcctcagggattctttgaggatgatactattgctgcagtgaagaaacttctgcctgaatcagttgatggtggtggactagcagatttttgctcatggcctgatgaaattaaaaaactctcgcaatggcaatggactagcactttgcactatgttaacacacctgaatacaggtgcaactacgagtattgccgtgggttatcttttcctccagcttcatacatgtttctgttctgtttctgcttccattggctatgtattttctaagttcaactctatgtccttttgtgttttgtgaaggggactgccatgacactcataagcataaggactggtgtgtgacaggagcgatcttcaattacacaaaccagttaatgtctgcttctgaaaactcacagaatatagtccactgtgagttagattttaagtgaatctgatacttcttttaatgtttcagtttactgatttctgtgtgagtacatcgatcataatagtgtgacttagaagtctttttctttctgttcttggcagacaacttgacagaggctctcttgttcttgtcacattatatgggagatgttcatcaggttagtcctttttgcaaattcagtcgaatcataatattacaaacaaatgctgtcagagttatatgcatttgaggctactactctatctactctggactctggaggtttgattagtgtatagtagcaacacaagagtatggctaatctttatgtggattatgattttcgcagcccttgcatactggttttcttggagatctaggtggtaacacaataatagtcaactggtaccataacaaatcaaatttgcaccatgtaagtgctttgttttttagtcatattgatgctaaaaagtatctttcctgacacggaagtggaacgatcttaacttgaaggtctgggacaacatgataattgactctgctctagaaacatactacaattcaagccttccacacatgattcaagctcttcaagccaaactcaaggtacaatcttgccttctctaatcagcttcagcaagttatagccgtatccaagataaacacaacttacattgagtgtttgttgttacgtctgtcttaatatagaacggctggtcgaatgatgttccgtcgtggaagtcatgtcactttcaccaaaaggcctgtccaaatctgtaagcaagcatctatatatctgttaagttgcttaatagcagagaaaacttagttttcgttaccatatcattgttgattctctttgttctttgatgtgttaaaggtatgcttctgaaagcattgatctcgcctgcaagtatgcttacaggaacgctactccggggactactttaggaggtatacttactctatgaaaccagatcgtggctttttgttttctttaatcatggacatgacttgatcttctgctttctctgcagatgagtatttcctttctcggttacccgttgtagagaagagacttgcacaaggtgggattcgcttggcagctactcttaatcgtatcttttctgcaaaaccgaagctcgcaggattatgaatctaagaaaaagatccttgagaacccacgtaacaactccttttaagtgttttttataacactgtgaatggttgagtcatgactaatgagtgaacctccaaaatcttcatgcaaaaatttgttattttgggacatggttcaaacttccaataacaaaccacactaacggataacactttgcattttttttgtttgttttcagttttgttaattagtatccttcttcttatcttatgaaaaaggtaagttaacataaaggagtaaaatagaaaaagaagttagatttcctcattagattaggaatgataattcgctatataaagatttcaagtgagacataaaaagcctaagcgcaaaacacacaaaaaagagtttcttacgtgaaaagctacttaaaccctaaaagagagagagaaaaaaaaagcaaagccgacacagctagcgctctcgggtgcacttccacagcaatgaacggagaagagccaccttttaaaagaagacggatgaattttcttatgcttcctgatgatttggttttaaactgtttaatttggcccgcatctcaagatagtactatccaactctctctttagtatccaagagattccgctctatccttacttcaacggagctttaccagacccaaactctcttaggccgcaccgagagttgtttgtacgtgtgcttaacgcagattacatatgacgcttctaacccacaattaatttggttcactctttgccgcaaaccaaatagctcaaaaaagattttaatcccaatttcatatcctaaatctgcatcatggtcggatagtgtagtggctgttggtcctaatatctacgctattgggggattcagtaataatagaactaaaccttcgtctagcgtcatggtcatggattgtcgtactcacacatggtgtgaggcccctagcatgcaggtttcccgtgtgttccaatctacttgcgtccttgatgggaaaatatatgtaacaggaggccgcggaactctcgattcaacgaaatggatggaggtttttgatacgaaaacccaaacttgggagtttttgcaattcccgagtgaggagaagatatgcacaggctataagtgtgagagcatagtgtatgaaggaactgtctatgtaaggtcgtattttcataatgtgacttacaagctgcataaaggtagatggatagcggcagacttagcgatgaataatggatggcgttgctcatcatttttttgtgtgataaagaacgtgttctactgttgcaatagaagtggtaacggtatgatcgattggtatgactcggaaaaaggatcatggacaactatgaaggggttggaaagattgcctaaagtttatggtaatgttaaattggcatattatggtggaaaaatggtggtggtgtacgtggagtgctaaggagtggggtaacgtgagaaaaatttggtgtgcggaaattacgattgaaaaacgcaaggatggagagatttgggggatactagaatggtttgacgatgtatataaagccaaggatgagctagaatatttagctgtagtgcatgctgttgttactaccatctgattgataagagagtcatgtgaacattgttcattgattcaccgatgcaataacgaatttatctactatcatttgttttgattttctttctaaatcttttttgtttgttcttgtattgaattttaccttacatttattaagaaagtcaactatttgtcaacgttactggaaagttaaaaaggtaaaagtaataataatctgagagttaactttggacatcttcgccggagccgagacggaaggcgtgatggaagagatacaacaacaaacgcagaaggaagaacaaaagcaccgtgaagaagaagaggaggaagaggaaggtccgcctccgggatgggaatctgcagttcttcctcctccaatcgtcaccatcaccgccgccgtaaaccccaatcccaccaccgtagaaattcccggtattcttgtagtcttgtctattttagggtttatcgatttgcttccatttcttgctacagtctgatcaaattagagatttttagtggagtttgtagacttttagagataacccattttcgattccgagaattgattagtgttttttttctgcaaatcttctttgtttttggggttgttgcagaaaaggcccaaatggtatgtggatcttgcaggcgtttgctttcttatctaagaggatccaaacatgttaagtgctcctcttgtcagactgttaatctcgttcttgaaggttcgttcttccatggcttttttatctcttattcattacttgaaaagcttttgttgataatctcagtcacttgaaactcttaatggaacaatcttggaatgctctctcagtctagttttacttagcatgtgtgaatgatatatctatgttcttttgagaatctcaaaatgtaagcttcctgagaccaaatgagtttagttcttaactgacacaagaatgatctttggttaggattcttctcttaagcttttgtgagccttttggtctctactccatcataatgtctcctttgtagaccatttatgtggtctttatcctttactcttactactcttggggaaattgtgtgatcttaagaccaagattgttcttcttagcttgtgaatcacttggcctcattattgatgaaatagccttcttctcttatcggttctggacttgtcgttctttgtttgcagctaaccaggttggtcaggtgaattgcaacaattgcaaactgctactgatgtatccttatggagctccagctgttagatgttcctcctgcaattctgtcacagatatcagtgtatgtattcacagatggttttgtgctccatgtccaaatcatacttggaagagttgatacattttgagatccgagtaagtaatcatctgatgaatcatttataataaactgtgttatatttcaggaaaacaacaaacgacctccatggtctgagcagcaaggaccactcaaaagtttaagcagtctcaggagagcagagaattaaacttgaaccgatttttgtcaattttgaaccggtttgacgactaaaaaccttgtaataatgtcgaaggatagatgaaataaaatcaccattaataatctcattgaattcccattctttcagatattacttgctcatcatcctttactgttttaagctttagtggttaaaaagaatgtgtatatatccatacaaaagttgatatatgtactggaccaatataaacaaacacagctcacagtctcacacaatacataaaaacaaaattcatatttcacaggtgagaaaaactaactagtagtctacttggccgaatttgtcaatgaatttcaataattaggtcgtataaatagcaaacaaaacatggactcttacccaaccaaatatgcataaataatttacattacagtttcatataaaatacaaactaatggtgggtcctcgagagagctaacaagagctgtgtgtgggtgaagaaccaacttgtcaacgaaaccaatttaatggaaatcaaccctaaatttaatgaaaccttggacgaaacttacattttgttaaccagtttatccttttaaatcaaacctgcatagattttgatttaagacttgaaagtcttaaatgatatggttggattgaaataatgagtgggccttatagaacagattaaattatgaacaccacaagtttctttttttgtgcgagtaataaaacagttgcttagaaatttgttgtgtttataaatagacactattattaacacacaaatttttgaatttttggcagatggttacagagaataccaattgtggatttcatccaaactttaggtaattaatcctttattttttttatcatgaacacatctgtcaaaagtcctccactatcaaatcttaatttaaactatctgtcgctctttgaataacacatgcttaaattaaatgtcgccaacgccaagtgctgctaaataaaaatatttgaacagtctctcaactagttacgcaagtaatagagactatagagaaagacacaagagtcttctttgcaaagtagagtagtagtacgggcattaaagtgattgtattacacactaaagtccacgaatcattgtcttaactgtattttcataccttccaatttaatgctcttctctatctttatatatcatccagctttttatttaatctcctcaaccaaacccactaaatatctacattaccaaaaatgttcacaaaatctatccttttggcttctcttcttatcatcatcctcgtctctgcaactgaatcagctcgtcaaaagagcgggaacgatggtttaggattcggtggtgtacccggatccggatttatacccgggtttggaaacgggtttccggggactggagttggtggtggatacggtggagggtttggtggtcctagcggagggtttgggaaaggaggtgtggtgagaccaacggttacttgcaaagagaaaggaccttgtaacggcaagaagcttaggtgtcctgctaagtgtttcaaatcttttagccgctccgggaaaggatacggcggtggaggtggcggtggaggatgtactatggattgtaagaagaagtgtatcgcttattgttaagatataataaagatcacatcatctttataatatatagtcattatgatggttatgtattttctatgttatagcctatagattatgagatcatgaggatccttttgtcttgattcgatttgtagcagttttatatgcataatatatggttgtgatgaataaatgagggaactttactgttttctctattgtatgtttgtgtaagagattctaagttaattgtgatttgatctgttttatgatgatcttgaatcttgatttgacacttttaaacttagatttgcaacaaattacataataagaaccaataccatgagcatcatatggctctttttattacatcgaaatcgttgtcttaacagagacaggtattataacatcatgaacaccatcagtccatgttaagcttccaaagaaatagccactgttgactttatgactcgttttagccttaaccgagaaagtgagtactctctttgctgcagagttaaacaccagagtggttgggttcacggtgagagttataccgagaggagactcgattacagctttataaactgacttgatgggtccaacattggttacagttcttgtaagtgtgacttctttctcaagatttggaattgtgattgaaggtaagttgatatcaagaattgatggcttgggaattgtgcatttagtctttttaccaagcacacgagagattgaagagtcgatgtaacccgcggaacacatataattgatgtaatctttgatccccatatcgtagacaagaccaggttgagcagctttatcagggtttacaagtcctcctccatagtcaaatggatctgcaagcttcttgtttgatccttgagcaaaaatgggttctccggatggacttgtcctccaagctacaaaggaaatcgattagtcggtttgttcttgaaaaagaagaaaagaagaagaagcaagaacctgttgtgaccaaagctgatctcattgcagcaggagaccagttagggtgtagtgattttaggagagcaatgattccagaaacaacaggagtcgacatcgatgtccctgaataaagtccaaatccgttgaacgcatcaggatcaagcggactcactgccgcgagtatgctaacacccggagctgctatatcaggctacagaataaagcttgaccacataattactcaaaaacgtttaaccacactttgaagtaaacatagataagagacacaatggatttataaccttgagaatggctggtgaaacagaattaggccctctagatgagaattcagcaaccttagtcattgcaggctgaccgtttagggtcgtagcagcactaattctcacagtgggagatctgtaggtttgacggatcaataatgtatatatttaagaaatgtaaatggacttatgtaacagagtgttttggcatcaagatagagagacctggtagtacgtatgtattgtaaaatgtgagttccaatctcataatctgtgaaaatgtacggtatagagttgtatcgagcaagaagatcatcaggctttttggctaagatgactgctactacacctctccctgcaattgaagaaggatgagtactatcgaattcaagaattgttttccccttcacatcaacattatgatctgaatccaagaatgctaaactggttgaaatctccggtccagtgaacagagattcagcctaattagataccaaaaaaaaacaacaagttaaaaaaataactccaaacgttcaactatttaactaatttgagttttttgggtgtaaaacgtacgaagagggtttggttattcccaagtgtgatctttgtaggaaaagaccggtcaagagtagtagcagcaacagtcaagagccaaggagcagcattggtaatattctgagcaccaggcccatcattaccccccgcagccacaactgtaatccctttggccaccgcatgaaaagccgcgataaagtcgaccgaatcgacctcggaattctcgggaattcccgccccaatagaaaccgacaaaacatctacttgatcatgtatagcatcatcaaaagccttccacatatcagcaactgtgcatataccatcgtatcccactacattccaacataccttgtatgaggctattcgggcccgaggggctccacctcggaccgtacctgacaagatcccacatccgttacgaatattttcttataaaaccggtaccttgactcttaagttaacttttttagtgaatgaaatccaaaagtttttgctatatcagtacctcgggctaggccatagaagctcacgttgggaacgaatgagccaccggctattgtggctgtatgcgtgccgtgaccaattgcatctctgttggatttgaaatcttggatgattgttctgttgaatttccctccagtctcggcgagtagaccgcttagatagtactttgctcctattagcttgttgttgcaatgtattttggcgttaaactgttctcctgattcacattttcctctccaacgctgaggtattggtccaagaccatgatcgttgaagacctttgactccggccatattcctgcatagatatacatacatacatgatgtgaatcaaggagaaagatagagatagagttatatttagagagcgagagaaagaccggtatcaacgacgccgatgatagcttcactgcccatgttggtttcatgaagtagaccttttgcagatgatgatgaagaaaaagaagttggatttggagagaggccaagatgatcccaagttcttgtggttttcagtttcagaatccggttcgggataacatggattacttctggatgctctgtgtttatgtacaaaaatcttcaatgctcaaagatatgaaactttcttaaatgtgagtttgagttttgttgagtacctgagattttctttgcttgtgaagatgtaagaagcgccgcgaaaccagagaatccatattggtagctgtagatcagcgagttatgtgcgtcgtctttgctgtatatatcattagagacacaagtaagagaagtgctcctaacaaaacaaaagataaaaacagaggaaggtccaagttccgtgaagaaacagagtatggcgacggcagttttcttggcacccaagaaaacgtatgtaatatattattatcaattctagcagatgtcttgaatacataatggagataaattatatatatgaaaagtttaataggttaatgtttaatatagagattttatcttggaagatgattaaagtaaagtacctttgaagaagtgattcaagcatttgatgatgagaagctgtgaaaagttctggatcatcgtgttccctttccccaagatacactatataaacctaataaattggccaaaaaaaacaccggaaaagtttagaaatatcagtaaactcttagcgattttcgcaaatagataccttcttttctctaattacatactttgctgtcactgtctgaggctccttcagctgcaagaaaactcacccctgtcttaggaaataggaccaaagcaatcgacaatagaaacacaagtgtggataaacagttctccattgtctgaagtgagaagtgtgtgcatgtgtgactgtgtggtatagaagcttttttatatacatataaatagtaaataattcgtcttaagcaataaaatttggggttagattcgaatttggttcggattcaattattggtttattcaacttattatggtaattccgaatcagaccggttttatctctcgtgtagcgttactgatattcccaccataactttttggctcagttttaactcttacaattgtcgtctttcttattatagatatacgaatagtgtacctaattatatatattacctaattataattcaaatgagtataagactataagaggatatcaataatttctaactaaatgagtaggttaggtaactgtaattaagaagttggtagatcatgattgactgaattactcaatttagtatagaatgattatattctgaacttttgaaatatagaagactctacaccgaaatataggatcacaggacagcaaaccaattccggatttttttttaatgtgtatatcgttttgaatttgttttttttacacactttatactttatagattataaaatggtgaccacggatagttgaatctctttgatagatagtggaatattccaaaggtagtacgatgaaactaattatatggcaatcaaagaatcgtaatgtgtgcaatctttgcttaatatataactaactatttaacaaaatacagaatcaaaaattatatgataaatcaaacaatcgtaatgtatatgtgcaaattttgcttaaaacagaattacgttttcacgtacattacatgattcgccacattatgttaatttggctataaattagttattaaagtatatagactcaacatgaaaaaactcggtcaagggagattaaaatggcaaacattaatcattgttaagccttttaagactttcactatggattgtaagaaggagtgtattgcttattgttaagatataattaagatcacatcttgattcttgatcttaataatatatagtcattatgatgattatatatttgctatgttatgttatagctatagattatgagatcatgaggatccttttgtctcgattcggttttagtagtttttattatatggataatatatggttgtgatgaatagatgaggaaagattactgttatctctatttgtatgtttgtgtaagagattctaagtttgtgatttgatattttattatgatgatgatcttgaatcttgatttgacactttgaacttagagttgcaagagtagttacataagaacaaacacaatgagcatcatatatatggctctttttattacatcgaaatcgttgtcttcactgagacagggattgtaacatcatgaacaccatcagtccatgttaagcttccaaagaagtagccactgttgactttatgactcgttttagccttaaccgagaaagtgagtactctctttgctgcagacttaaacacgagtatggtcgggttcacggtgagagttatacccagaggagactcgatcacggctctatagactgacttgatgggtccaacattggttacagttcttgtgagtgtgacttctttctcaagatttggaattgtgattgaaggtaagttgatatcaagcattgatggcttaggaattgggcatttagtctttttaccgagcacacgagagattgaggagtcgttgtaacccgcagaacacatataattgatgtaatctttgatccccatatcgtagacaagtcctggtttagcagctttttcagggtttacaagtcctcctccatagtcaaatggatctgcaagcttcttgtttgatccttgagcaaaaatgggttctccagatggacttgttctccaagctacaaaagaaacagatcgattggttcgtgatggtttgtttatgaaaaagaagaataagaagaagcaagaacctgttgtgaccaaagctgatctcattgcagcaggagaccacttagggtgtagagattttaggagaactatgattccagaaacaacaggagtcgacatcgatgtccctgaatgaagtttaaatccgttgaacgcaccaggatcaagcggactcactgccgcgagtatgctaacacccggtgctgctatatcaggctacaaagtaaaaacatgaccagatatataagaccatgtacataggagattttttgtgggtatcataagcctaaaaatattaaattaatagacaaagcaactgatttggacttgagaagtatcactggagtgataatttctgataccagtctctaatgacgtggcggcttgtaattagtcgaaaaaacgcgtttttgtggaaaatgagagaaaaaaaaattatttgctctcgactatcgctccagtagccgatgctagcatgtaatttcgattttacaaataaattttgttttttgatgataccaatactggtcttaccactggaaagagattattatgagtatcataaaaaatctcaaacaataaacaagcattaaaattaataataaaaaattgttgatgatactctatgagtaccaactatgtgcatactctaacaagtttacacaaaaaggattcaacttttaaagtaaatatagataagaggctttataaccttgagaatggctggtgaaaccgagttaggccctctagatgagaatgcagcaaccttaggcgttgcaggctggccggttagtgttgtggccgcactaattctcacagtgggagatctgttggtttgacggatcaataatgtatatattccagaaatgtatatgaacttatataagtatgtaacagagtgttttggcatcaagatagagagacctggtagtacgtatgtattgtaaaatgtgagttccaatctcataatctgtgaaaatgtaagaattgtctggggcaggacgatcatcaggctttttggctaagatgactgctactacacctctccctgcaattgaagaaggatgagtactatcgaattcaagaattgttttccccttcacatcaacatcatcatccaagaaagctaaacccgttgaaatttccggtccagtgaacaaagattcagccaaattagataccaacaaaaaacaacaagttaatttgagcttttggtagcaaaaacaataaggtcgaactttgaactattttctcaaagttatttttggtatcaaacgtacgaagaaagtttggttattcccaagtgtgatctttgtaggaaaagaccggtcaagagtagttgcagcaacagtcaagagccatggagcaacattgcaaatagtctgagcaccagacccatcatttcccgccgcagctacaactgtaatccctttagccaccgcatgaaaagccgcgataaagtcgaccctctcggaatcctcgggaatactcgccccaatagaaaccgacaaaacatctacctgatcatgtatagcatcatcataagccttccacatatcagcagatgagcatataccgccccatcccactacattccaacatgccttgtacgaggctatgcgggcccgaggggctccacctcggaccgtacctgataagaatcccacatccgttaagaaaaataaataatgtcttataaaaccggtaccttgactcttaagttaacctttttagtgaataaaatccataaggtttttgctatatcactacctcgtgctagaccataaaagcttgcgttgggaacaaatgagccaccggctattgtggctgtatgcgtgccgtgaccggttgcatctctgttggatttgaaatcacggatgattattctgttaaattttcctccattcatggcgagtagaccgctttgatagtacttagctcctataagctttttgttgcaatgcattgtggcgttaaacttttctcctgatctacattttcctctccaacgcttaggtattggtccaagaccttgatcgttgaagacctttgactctggccatatccctgcatatacatacatacatgatgtgcgccaaggagagagagcgagagagttagatttagagagagagagagagttagatttagagagagagagagagagagagacctgaatcaacgacgccgatgatagcttcactgcccatgctggtgttatgaagtagacctttcgcttttgcagatgatgatgaagaaaaagaagttggaattggagagaggccaagatgatcccaaattcttgtggttttcagtttcagaatccggtttggtataacatggattacttctggatgttctgtgtttatatacaagattctggattaggaaccaaaaaatcttcaatgctcgaagaccttacatgtgagttttagttttgtttgcgtacctgagattttctttgcttgtgaagatgtaagaagcgccgcgaaaccagagaatccatgctggtagctgtagatcatggagttatgtgcgtcttctttgctgtatatattattagagacacaagtatgagaagagctcgtaccaaacaaaggaaaagaaacagaggagggctcaagttctgttaaaaacagagtatggagaggttttcttgggtgacaagaaacgtatttgttatataattatgaactaatcatatgtctgaatatataatggagattgaatttaatatatggaaagtttaatgaaccgtcacagtatatataaacaagttcaataggttaatgtccaatatagagattagtctctatagaagaaattttggccttcttttaaggatgattaaagtaaagtacctttgaagaagtgattcaagcatttgatgatgagaagcggtgagaagttcaggatcatcgtgttccctttggccaagatacactatataaaccttataaatccgccaaaaaaccaccgaaaaagttagaaatatcagtaaattcttagcgatttttcgcaaaatagaacaccgttttaatttagttacatttacataccttgctgttactatctgaggctccttcagctgtaagaaaactcagctctgtgttcagaaataggaccaaagcaattgccaatagaaacacaagtttggaacttaggaaagagttctccattttatgcagtgagaagtgtgtgtgattctgtcgaagagaagctttattatatacatagtgtgtctttagggagtgaactattgcgtaagattcgaattcaattattggtttattcggctcaatatcggtatggtaattctgaatcataccggttttatctcttgtgtaacgttatttcccgccatggatctcaagagggctcagttttaactcttacaattgtcgtctttcttattattgatgtctttcttattatagatatactaatagtgtacctactttaatttcagctgagtataagaggatatcaatcatttctaactaatagagtagattaggtatctgtataagttggtagatcatgattgtctgaattactcattttagtaaaacagattatattctgaactttaatatatataggatcacaggagagcaaaccagttccattttttgcatttatgtgtacactaaaatatcacatctttataatatatagtcaatatgatgattatatatttgtatgtaatgttacagctataggttatgatcatgatcttttataagagattctaaggtatttgtgatttgatcttttattatgatgatcttgaatcttgatttgacattttagacttagatttgcaacaaattacataagaacaaacacaatgagcatcatatggctctttttattacatcgaaatcgttgtcttaacagagacagggattataacatcatgaacaccatcactccatgttaagcttccaaagaagtagccagtgttgactttgtgacttgttttagccttaaccgagaaagtgagtactctcttagctgcagacttaaacacgagtgtggttgggttcacggtgagagttataccgagaggagactcgatcacagctctatagactgacttgatgggtccaacattggttacagttcttgtgagtgtgacttctttctcaagatttggaattgtgattgaaggtaagttgatatcaagcattgatggcttaggaattgggcaattagtctttttaccgagcacacgagagattgaagagtcgttgtaacccgcagaacacatatacttgatgtaatccacaatccccatatcgtagacaagtcctggtttagcagctttttcagggtttacaagtcctcctccatagtcaaatggatctgcaagcttcttgtttgatccttcagcaaagattggttctccagatggacttgtcctccaagctacaaaagaaacagatgatagtctgtaacggtttgtttatggaaaagaagaataagaagaagcaggaacctgttgtgaccaaagctgatctcactgcagcaggagaccacttagggtgaagagattttaggagagctattattccagaaacaacaggagttgacattgatgtccctgaaagaagtccaaatccgttctgttcttctggattaagcggacttattgccgcgagtatgctcacacccggagctgctatatcaggctacagagtaaaacatgaccacatatttagcaaagtttactcagaaacgttaaaccttttgaagtaaacattgataagagacgcaatggcttaataaccttgagaatggctggtgaaaccgaattaggccctctacatgagaatgcagcaaccttagttgttgcaggctgaccagttagtgtagtagctgcagtaattctcaccgtgggagatctgttggcacgacgatcaatgatgtatatatatacatgcacttgtgtagttaagagagtgtttttgtttcaagatagagacctggtggtacgtatgtattttaaaatctcagttccaaactcgtaatctggaaaaatgcatggtacaccattgcatcgagaaagaagatcatcaggcttttgggctaggatcactgctgctacacctttccctgcaattggagttgcactatcgaaaacaagaactgttttccccttcacatcaacagtgtcatcactgtctgagtccaagaaagctaaaccggttgaaatctccggtccagtgaacagagattcagcctaaaaacgaacgaacaaaagaacaacaagttactcaaaaaagaactccaaactttgaactgttttctctaactagtaaaacgtacgaagagggtttgattattcccaagtgtgatctttgtaggaaaagaccggtcaagagtagttgcagcaacagtcaaaagccaaggagcaacattgtcaacagtgtgagcaccaggcccttcgttacccgcagcagccacaaccgtaatccctttagccaccgcgtgaaaagccgcgatataatcgagcttatcgacttccgaatcctcgggaatacctcccccgatagaaaccgacaaaacatcaaccccatcatgtatagcatcatcaaaagccttccacatatcagcagatgtgcatcttccatcagttcctcctccttcatctctcattacgttccaacacgccttgtacgaggctattcgggctcgaggagcaccacctcggacaagacctgataagaatcacacatcggttaaaaaggaaacaaactattgtcttataaaactagtaccttgactcttaagctaacttctgtggtgaaataatatatatatatatatatatatcagtaccttgggctaaaccaaagtagctcacgttggggacaaatgagccaccagctattgtggctgtatgtgtaccgtgaccgtttgcatctctggtggattggaaatcttggatgattgttctgttgaattttcctccaattgcggcgactacaccgtttagatagtacctagctcctattagcttgttgttgcaatgtattgtggcgttaaactgttctccaggttcacattttcctctccaacgcttaggtattggtccaaggccttgatcgttgactgcctttgactctggccatatccctgcatatacatacatacatgatgtgagccaaggaaagagggagggagttagagttagagaaggagagagttagataccggaatcaatgacaccgatgatagcttcactgcccaagttggtgtcatgaagaagaccttttacagatgataatgaagaaaaagaagttggaattggagagaggccaaggtgatcccaagctcttgtggttttaagtttccgaatccggtttggtataacatggataacttctggatgctctgtgtttatttacaagattctggtttagaaactttgttttcagagtcaaagatacgaatattccttaaatgtgagtttgagttttgttgagtacctgaaattttcttagcttgtgatgatgtaagaagcgccgcgaaaccagagaatccatgttggtagctgtagatcagggagttttgtgcgtcttctttgctgtatataacatgatatgtaaaagtgaaatatgagctcataattcataacaaacaaagtttaaaacagaggagggtttcaattctgtgaagaaaaacagagtatgggctaatgagtttcttgtgtgacaagaaacgtatgtaatatattattatcaacctaacagatgcctgaataaatgttttaactaataaacattaaacatgtatatatgacaagtttaatgaatagttactgtacatataaacaaattcaataggtaattgtccaatatcattattagtagaaatttttaaaagatgattcaagtataatacctttgaagaagtgattcaagcatctggtgatgagaagctgtgacaagttcaggatcatcgtgttctctttcgccaagatacactatataaacctataaaatccgcgaaacaagagtaccaacaaaatttaaaatccgttaactcttagagatttttgcaaatagagaaaggtatttttagttgaatactttgctatcactgtctaaggctccagcagctgtaagaaaatccagctccgtgttaagaaataggaccaaagcaatagccaatagaagcacaagtttagaactttgtaaagagttattcattttcttaagtgagaagtgtgtggtggcatagaagcctctatggttgtatatatagtaaataattcatctattattcatctttcaattcacgtttcatgactccaccaccatttgggatgaacttttgggttaaattcgaatttcggctcggatttggtttggttcggtttaataattgagagtagtgtcaaactcaaaacaatctcactttgtttcagtttttctttcgggttaatatttggttttatcactgaagtacattgtattcaattttggttggttcaaaaaaaacttaccaaactaaaaccaatcctctcgtaatggtacttttgttataattattaagatttgaatgaaaaataggatttcacactttatagataaaatagatagtgaccacccatagttgaatctctttagtagtgggaatccaaaggtgttatggtacgatgaaccatatgtgactcgtttttcagcatgttttataatggctagtacttagtagtttaattagtatgtatgtgaaactcattgtaaacagaaaccaaaatgacaaacattaatcattgtagaagcggaatccacttagcttaaaacctttaagtggtaaagctaaatttgtctcatttcaagcatatatactttcttatgtttatattaatcttagatttcatttgtctagcaaagttaaacttttaactacgtgttaaaaaaattctgacatcgcttgtaggctgaataaccattcatatttggagagacttcttgttgtttctaaatgtgtctaccatgtagaggcctatgtataatgattaataagcgagatttgaaaagaagataaatagataatgttgaaagaaaggtgaagaaaggcgatttaggaaccctacgactctacgagtcatcatgctcatgataatgttgaaagaaaggtgaagaatggtggtagcccggtaggacaatgagtggcataattggccatttgtcgctgtttcattactctcccggaatgaggtgtggtcgaatcatttgtcgcctaatattggaaaagtaatagaatacatcattgaaaaaatccacagtatgttaagtttttttcatcacatgcagggattgaacaacccaaggatcatgcctatgaattagttcacactatgcatatgacagtaacatatgaacataatttggtttcaggagcgaatgtcgtgaaaatgtacatatttttgcctcgcttaaagataacaaggtgcactgaaatagatcacatcgacggtttattctgtagaccgaatgatcaatcttttaaaaaccataaacgctgaaagtactcggacaatttgaaaaacaagacgtcgcttacaaaacaaagccttttttccccactttttttgttccaagtctcaggctttgaatttgttcaaattccaaaaacaaagttttacttaagccttcagataacaacatagtatagaatctcataagcattaagactaaaactcaagatctctgactcaaagactaataactctggaacaagaatctctccctatctctctcatgtccagaatccagaatccttttccgtgtctcttccagaacacctcagaatttgaaatctttcttcttcttcccttccttgtcatgcattttcctcttcctactattctgctgcacatgctgttaaacattccaccaagtaaacgtttgattattcatccgcattcatatcaatagtgttgaaaaaaatagagatataaatataaagaaagtcattacctcgacgaccatgtcactcaagtccactggcttattgcgcaatttctcctcttctcttgcctcctcatacttggcaggtaaaacattttccatagcatccagctcttctggctgtaagctgacatccactctgtctgtcttctgccctctcagcaaatcaacctgctcaatttgacacaattgcatacgttagcccacttgtcatcaagcaaaacaacaaatctctgagcatgtaacaacagactgcttacccttttggctcccgtcttttcttgagtaccagtcttaataacgtatgtgtgtgaggttcccagcaatgttccaggagcaacactctctcccttttcctcgagtaccttcacaagtcaaaaaaaaaaaggcattaacgaccagaaacagtgaattattggtttatatcaaactaatagaaaagcctacaaggcgtgtaagatcatcaaaattaggtttcaaacctggtatagagccctatcaggttcctttctctgatccttacgaagttcaattgcatccggtgtctctataccagtaggagtgctgaaagaaggggaaaatcacaaatcagctttatacttagattatactgataaggaaacaaataaatagtatacacctcataaatgcataatgataacaataccttgacagtgtatcaacagattcagtgccgtcttctagttcctcttcatccatctcctcttcttgttcctcttcttcctcctcctcttcttcttcctcttcctctaaatcaccccagtgcttgctcttatcaattggctcctcctaagataatgataaaatacaaccgtcatactctatcaccaaattgtatgatctctaaatattcaataggacgcttttactttgtattttgtggtatctacctcgtagcacaatatgcaattactaaggagaataacagagagagatgaaaacagttacctcgtagttaggctgatcttgttgctggacaccaaaaacatctccatacaatggacgcccatactatgtaacacaaacgataagaacgggaaaaaaataaaagttagtagatggcatagaaataataaaaaagaagaatgtagataaaaaaaaatgcttacttcgtcaactggaggtttcccccagccgccagcatgaaaaccaaagctagctccaattggaataggagcattcaaaccaggaattttcagatgtgggtaagaaggaggcggaccatatctctgtcaaagaagagattaaaggtgaacaactcgattccaatcagaataattaaaaagataagtcacaataaactcacctgcatgttaatcagccatgggggaggagcgccttcaggcataccaagagcttcttttaagtcgtttgacaaaaaccctggtttcgtttccctcagtttaacctatttcccaaatgatagtaattagattttaggtaaacaaaccaatgaaaccaagcaatgtaattatagataaagctgaaaaaacatgtcacaaggaattacctcaaattctttcccttcaaaatacaaatcgcctagagctgacagcttaggctttgtttggtatttgaaaaatgcatcatgaagtacctgagaaaggaaagaatagcttcacttgtcagttatagaacagatatcagcaaatactcatcacaaaacaaagattaaaaaaaatagaaacctggtagtcaatgtccatctttcccatttttggttgcattctctcccgttgcttttgcttcaatttcttaccatcttctttctcaatgtaagcctacataagaaccacacaagaattagctgacagtagaagcatttagcgacttgcaccttatattgatagagaataacttttacctgtctaatcttctcaattccggttgcagcaatgaaatcaggaagatgaaatggctgcttctctatcccacgctttccctgcaaaaatgaaaccccgctgagatgccaccaacttataaaaagaaagaaaaagcagtataaaagtactacaaaaacagatgcatctaaaagcaagatcactatcatgcatacgaaaacaaaatacagtttcagaaagggaatatcccaaactgattcattaaacagtttactccaaaacctaagcaccacagatttcatatatagacagaaaaaaaaaattaagagtcctctccggttacacctacaagtccaggctccatggttatcacagatgttctcctgcaagaagcatatataggtataaggaaacttaattgacatggttatcacagacgtttctatccctcttgatataattcccctatgtaccagtaccacacccacaaatcacagaaacatatagttaactacagtacattactagaattatcacaaacctgcaaatattttctcttctgcgaccaatgtcttggaacaggaactgtattccggtacgacttcaaaaacactaacagctttggatctgctgaagtcgcgtcccagacctgaaaattgtaaaacagaacttatgaatatacaatagatatctacacaacgagataaaccttggtactatgaacacaatagagaagcatccatacctcaacaacatcaggcctagcggaaacctgcttcagctcagcaatcttcattctccgttgaagctgaggaaacagaaattcagaatattcagaatctaaagaatgcaataaaacaaattgagaggtaataataaggtttgagctatacctttttcttcttattagagatgcctttctctttgttctgattatcctgctcgtcgtcgtctgaatcagaatcagagttaaccttctttttgacatcttctttctcctcagactcatctttcgtaccgtcttcttcagaggcaagaggttcgcggaagttgaacttctcgaagatttccttaaactcatcgttaaaaccatcttcaaattcagcttgctctggaacatactctatcacaatctgctcacaaacctatcaaagagaaacatataccaaaaatcatcagcaaacgataaacaatcacaaaccctaagaaaaaccctagaacacctctccatgaatcgagtacgagaagatgagcacaaagttaacctgtggctggggatctgtattctctttggattcagaagcagcagaaacgtccgatgcatctacatcggcttgggatgctttgttgttcttcttctgcttccgtctgcggcggcgacggtcaatctcacgagatttcttagaggaagcggaggtgtttccgttggagacatcaccgttagaaacgacgctatgaacgagtgcgacggttgaatcggcggtcatattcggtgttctctctgaatcggtgatgtgaaaagagagattgagaggagaaggaagaacgacggaaatcgaggatatacgtatatgaacaagagtcggtttgctgaaattctctctgattctatttccggtttggcataaggcccatataagtagaagacgaatatatctgccaataggcccaacactttatatttttcttcgagtgtaagaattgttttgtagaagaccatctactagtaactaatagaaaatttcaaaggaaatgtatggaacaatattcaaacactactataaatgttggcacgagttaactctacattattcgtaaaaatgttctattgaacttttaaaattataaaattacagtttacacaatgtcttgaaattttgaagaaagttataagtatcaaaattgtatatatgtgggtatttgagatttaaataaaattctctgactaacaacaaaacttttaataaaatttaaatgttttagtttattattcgtaaaaatttagtttttacatgaattgaggtaatttttattcactttgagattttattaatgtgagcacgactcccggtgtatgttatcggttgtttattatgcaattagaacaatatacattgtgcctttttagtttcaaaattgttttcataagacattaggaaagaacacggaaaaaaaagacattaggaaagaattttgtaacggcttttgtacgtaacggttatttttaaacaaggaaaaaaatactgtctataaaaaaaaattatctttacgtagttgtgtattttagaaaacaaaataaatcattttttatttactaaactattattttataaggaaaagattgaaaagagtaggggaaagatatatgtgaaaaaatattcatgcttggtagataaaaaatatttcacaaataaagagacaagtatatgtcaaaaatatcatgtcttttgaataaataatcttctaaaaaaaaagaattagatgaactataaatatcttgtggtatatgaatccttgacactgtaaaaatcaaaacatgagatcagaaacacaagtataaaagtacattacaagtacggtatgaatcgaaaaaaaaacagaatttgacaggttttgagctgataaaaactatttcaggcttttattaatttttaaaaatagtattaattgtttttaaaataagacataaataaaaaaaagaacggttaaagaaaatgaaggggcccttcgtgttttgttttcccttaaaaaaaccaaggacaaaggcataatgccgtattcacaatcttgactcttcgttatctggatctagggtttctctcgatttttagaacgccacaaaacctaataaacttttcccagatacacaaacaaactcatcatcaaccaaggaagaagaaagaaactagggtttttttttgtggattcatcatcggtattttacagatctatattcaaagggaacaaaatcttaaggaacaaacactaaattttcattctttctcttatttacccatttatcaaaaatcttccttttgttttcctgattcttgctaaagaaaaaaactcggatccaattcataaactagtgtggactggtgatcaatctatcaattctggccaagggacaacaaaaagtttagattttgatgaaccaattttgagatgagacaatagacatccattgatctgtaaactttaagaaggagaaggagaaaagaaagtatgtatagtaataatagagtagaagtgtttcatggtgatggaagacttggagaattggagatatacccttcaagggaattgaatcagcaacaagatgatgtgatgaagcagaggaagaagaaacagagggaagtaatggagctagccaagatgggaatcagaataagccacttttctcaatctggcgagaggtgtcctcctcttgcaatacttactacaatttcatcttgtggcctttgtttcaaattagaagcttcaccttctccagctcaggagtcactcagtttattctactcgtcctgtctcagggacaacaaggtatctaaaccttacgaacctttaagccttactcagacttagattttatcaactaaaactcaaaaacacttaatgataaataggattttgtgtcattatttaacttccttaatgtcagagctgcatcaagtttggggctttagaaacttttagtagagtgggggtttgaatcttgtgttgtttgttatgttacaaattgtcctcatatttgtgagttttggatttttgcttcttgcagacagcagtaatgctcttgggtggagaagagctccatttggttgctatgtactcggaaaatatcaagaatgaccgtccttgtttctgggcatttagtgttgctcctggaatttacgattcctgtcttgttatgttgaatcttagatgtctgggtattgtctttgatcttgatgaaacccttgtagtggcgaataccatgcgctcatttgaggataagattgacgggtttcagcggagaataaacaacgagatggaccctcaacgccttgccgttatagtggctgagatgaagcgttatcaagatgacaaaaatctattgaagcaatatattgaaagtgaccaggttgttgaaaacggggaggtgataaaggtgcaatctgaaattgttcctgccttgtctgacaaccatcagcctcttgttcgccctctgataaggttgcaagagaagaatattattctgactcgcattaacccaatggtatgcaagtcttgaatcagtatatgtctgttagtttctgttccccgtatacatatatgtttagtgcttactacacatttaaaagacaataagtggtggtgtgctgtgtggtggatttccttgaatacttgtggtataaccttttatttttcatttgctcctttctggagcacctagatttttctgaattcttgtggctgaatctgcattcctatatttacacacagattcgtgatacaagtgttcttgtgagaatgaggccctcatgggaggaacttcgaagctatttgacagcaaaagggcgtaagcgttttgaagtatatgtttgcacgatggctgaaagagattacgccttagagatgtggaggctccttgatccagaagggaatttgataaacacaaatgacttgcttgctcgcatcgtttgtgtgaaatctggtatactttttggtatcttatacctgcttatatttcatcatggtaaaacttcttacaagcttgtaattaaccaccacaggttttaaaaagtcactgttcaatgtgtttctcgatggaacctgccatccaaagatggcattggtaattgatgatcgattgaaagtttgggatgagaaggatcagccgagggtacatgtggttcctgcattcgctccctattattctcctcaagctgaagtaagtataatttttacctagttgaaattggttatgaaaaatgcagaagcatgtgaatttgataagaatattattaatcaaaagaatcacaagtcatttagaatggaacaaatgaagccttataagacctaacataagctagctttgtggtgagttctacgcaaggggtctttgtgggcctggtttgttgcacaatttctaccagaagtgatagtcttgacttttcagtaataaatggtgtcacatatagctcgtttccttttcttgtaggctgctgcaacaccagtactatgtgttgccaggaacgttgcctgtggtgtcagaggtggatttttcaggtaagatgtcagatttgataatagtagtttgttttcttgacatctctactgatcaagggtgcttccttagtacatacttacggtgaaatggtatttgaacttggttacagggattttgatgatagtctgctaccaaggattgctgaaatttcttatgagaatgatgctgaggatattccttctccgcctgatgtcagccattatttggtgtcggaggttagtcgtgatacttgttagcgattgggagtagataattttttggttctcttccaggcagtctgggagcttattttactcacctttgaaactgcttcccagtaactcattcttttttcaatataggatgatacatcgggtttaaatgggaacaaagatccactttcctttgacgggatggctgatactgaagtggagagaagactgaaggtgatttacattttgaggctctattgttactgagttattgtggtgatccattaaagatgccaactccagtaaacatggcttctggtttaaattttctgcccaatgttgaaattcaaatacatttttccgttttattcaggaggcaatttctgcatcttcagctgtccttccggcggcaaatatagatccgaggatagctgctcccgttcagttccccatggcttctgcttcttctgtttcagttccagtaccagtacaagtcgtgcaacaagcaatacaaccttcagctatggcctttccaagtattccatttcaacaacctcaacaaccgacatcaatagctaaacacttggttccttcagaaccaagcttgcagagttctcctgctagagaggaaggtgaggtacctgaatcagaattagatccagatactaggaggagactcctcatattgcagcatggacaagatactagggatcctgctccaagtgaaccttcatttcctcagagacctccagttcaagctccaccctcacatgtgcaatcaagaaatggctggtttcctgttgaggaggagatggatcctgctcaaattcgtcgagcagtctcaaaagaatatccgttggattctgaaatgattcatatggaaaagcacaggcctcgtcatccatcatttttttctaagattgataactcaactcagtctgacaggatgcttcatgagaatcgcaggccgccaaaggaggtaccactaatcttatttaacctatgattttacagttgtcagtttttttggtctttatactgctgtacgacgtttagtgctcactgtgatatatttgcagtctctccggagagatgaacagttacgttcaaataacaatctacctgactctcatcctttctatggtaagccatcaaagttatttgttcttgtatcattttgttctgaagataaatcactgacttgggtattgggatggactctctaggggaggatgcgtcttggaatcaatcttcctctaggaacagtgatcttgacttcctacctgaacgaagtgtctcagcaacggagacttcagctgatgttctacacggaattgctatcaaatgtggagctaaggtatgtaaatatcatcatgattaccattaattccatacgtgagttgatgtgttattattccatgacattgtaggtggagtacaaaccaagtttagtttctagtacagatttgcggttctctgttgaggtacgtattgctcttagacgtatctgtttgtatggtgtcagtaattttggtggaaccttatgctctttgagatcctatatttcctttgagtgaggttactttgttgattgtgtcaactgtacattaaatctatgttttttttgcaggcttggctttctaatcaaaaaattggagaagggattggcaaatcgagaagagaagccctgcataaggctgctgaagcttctatacagaatttagctggtaagactttctgactcatgatttactcgtgtcttaatctttgtctgcagagatactatttgagatagattgtttgaatctgctatattgggtgaatgttatttgtttgatgtttctaaaccatcttcacaatattgggtgtagatctcaatttttcaaccaatctgtttagtctgtaatattaatagatctattgtagcttcgtgttggtcctcataaatgggtttatatcaatgagtatgagtactgccaccacaaacggttgcgtgtcagtatgttatgatatcaaaactgtgggtcccttccctttacaagggtgagagctatcttggatttgtggcagttggctcaggtttaatattggtcggcttcattcacattgttcttataatgaggctttaaactcattgttgttcgtttgtttccagtttcttgagttcttactcctttttttgcagatggatatatgcgtgcaaatggtgacccagggcccagccacagagatgctacccccttcaccaatgaaaatataagtatgggaaacgcaaatgcgcttaataatcagccatttgctagagatgaaacagcgttgccagtttcttctagacctacagatccgagattagaaggttctatgaggcacactggctccattactgcactcagggaattggtatgtatctccttagtgcggatactgttgattgatatggttgcttgcttacattcacatattgttttttctcatctttgattcatctgtaaccaaattccagtgtgcatcggagggtcttgagatggcttttcaatctcagcgtcagcttccatctgacatggtccacagagatgaattacatgctcaggttcgcacccctaaaagattagaacacagaagtgttaaattttttaaaaaaaaaatctaagatagacaattttcagttaaaagagaaagattcatgattttctcttcagggccatcagtatatttcatatctattcaattggtttgaagtatctagagtgtagacccctcttgatactctttgtaatatatttcaggttgaaatagatgggcgtgttgtaggggaaggagttggatcgacatgggacgaagctagaatgcaggtaactcaactaaattcttgcctcgggtttattctgatcccatcttttcccttctctgacgttcttacctttaggctgctgagagagcactgtccagtgtgagatcaatgcttggtcaacctctgcataaacgacaaggatctccacggtttgttcttgactatatctatatgattatcaaaataaaaatgtcagttgatatattttaaaaaccggtttcttgttgatgtttagatcatttggtgggatgtcaaacaagcgattaaagccggactttcaacggtctctgcaacggatgccatcttcgggaagatactcttaaaaataaaaccatgtgaagaacgaaccacattctacattaattccattctcttggtaaaaacagctaccaagacgaattctttgtcaagttcctttcttcgccaaatgatgatcaagacagcgagagttgcctctcttgtattgatgtaacaacaatttgaggcggttcgcgatttttgtatcatagaaactcttgagttgaagcatcagctcgagtggccacaaagataagacctaaggatgaacgtttagcttgttctcaggctgttaagtttccacaaagctttttctgcagtttccatagttaacagtccttgttttcactacaacattaagagcttgatttaatattgtaaatttttactgttctactagtaagtgtttaggttttgactgattcaaaggttatgagaaaagttacataaactatgtgttggaactgtggaatcaacttatcctttattgagaaacatcaactaaactttgcacaagagtataacccaaaaataaaaacacaataagaccagtttatatcacagaacaagctcagctttaaacaaattactgtaaaaagcttcacagcattaaaataaaacacaaaactctctagctcctgactcagacttcctcctcttcagttacggactcagagaaacttgcttcagatttaatatacttgtaccatttggcacaaatcaagtaaaccacgaaatcagcagcggttagaccagctaaaaggaagtagaatctctccaagtgtcctttgttgagattttcaggaatccagccatgcacatcatctgttgtagagatcttcatgacaatggaaactaacaaactgcttacatagttcccaagagatattgaagccatacatagcgcgcttgcaaagctctttagcccggttggtgcttggctgttgaagaactcgagttgaccaacgtacatgaacacttctgatgcacctatcaacatgtactgaggtacttgccaaaaaatgctcaaagtgctggagcttgagatcgaagtagcactttccggttccttatttttcagtctgtgtatctctacgattcctgcggaaatcatcgccattatcgcaatcacaagcccaatccccatcctctgaagctcagtgagacctttgttgcgttctgttttgttaagtcttgcaaagagtggatcaagaaaccgcctgtatgcgaagatgaagaaggcgacactgagaatgtcgaaactagacatgcttgaagctggaatccggaagtttttgatgtttgtcttcatcgctgctccttgcacaacgaacagtgaagccatttgggtgaaaaccacagagtagaggatggtgcagagccagattggtaagagtcttaatacacatttcacttcttcgacttgagtcaccgagcagagcctccatggatcgtatttcgatccgctctctactttctcagcctcatcatcaggtgtaacaatagcagctctatccaagaatctgtagaaaataatagagagagagttaacactgatcttgacgatggtttctgagattataacagaacttttaattggttatcttacctgaagcctttggtatgaagaatcttcttatctccagtgtattgagtctcagaatcatagagattcaactcttcatggtgcacatcaatcttagcctttcttgttgcagcaaccaacacttggcagaatctagaccaaggactctctctaggcgtaaagtgtcggtactttggcgtgccaatcaagaaaagcactaaccccgcaaaagcagagccagcagacgcccaaaatccaagcggccattccccttgatcctcaaagtaacccaagacagtatttgagaagagcgatccaagattcagagccaagtaaaagtaactgaaaaacgcgattttcgagtgtccttcaacggaatcctccgcatcaaactgatcagctccaaaagtagctatgttcggctgataaccaccataccctaacgcgattagatacaccgacagataaaacagaaccgtcttaaacgtcgaatgaggcttacacggcgaatcttcaactccacaaccacttggttcaagcaataacgcaccagtagataaagataacatcatcaacccctataatccattaaaacatgttaacttattgttaaagaaacaaaccctagaaaaagacagagcagtgttgaagacacttactgcaacgaaacttgcttgaaagatagcacaagtcttgtaacgtccccaataagagtcactgaggaaagcaccaagcaaagagaagatatagacagttcctgtccatttactaacattattagccgcttctgcattgtcttgtcccatcactcgagtcagaaacagaaccaaattcactcctacaccgaagaacgcaagcgtagctagtccttgattcactatatcaaccaaaaacccatttctttagaatccaaaacacaacactttaagacaaagaacagtggtatatatagagagaaagagagagagaatcattacctagaatgagaatagcagtgagccatttgccggtattagctcggatagctggattgccgtgacgatcaacgctaccgtcttgagtgcaaacctcaaactgtctaactttttgatccatagattcgatttggtgtagagatatactcaaaaagattccttatcttgatgatcctaatgattatgatgattatccagagaccggttaaagaggaaaccggtggttagagaacaaaaggatcgaaaactcaggaatcgaggaaagtgaagaagtgaaaagagaaagatatttaatagtgatattgagagttgcattaaaagtgtgaagaagagagcttatatttatagagagctcagaaattgagtcagagaactcagaagagatcctttctttgacgtctctttctttctatggtgtttaatttaatcaatttaattgtaaaggttttgaaacgggctgctaaaatatatgttcggtggatttttctcgacagaattttgttatctcaataataatcatatgctattttaattttttaactagtttttatgaataaaaattaaaagagataaatctaaatgatctttttcgttctaaaatatttatttaatacgaaaagtagttatgtaaaaattttaatttgaagagaatctgactttgtgggaaaaaaacggaaatgccactgttatatgcgaataaaaccataaattacggtataggaacttaaaacgtagtattgaaaattggcatccctaaaatctatgaagaaggagaaacacctggttaaaggtaagccaagcgaatgtgtgaccagttacacctggagggctgctggaagagactgataaaatcaaaaaacatgagggaaaataaaaagagtaaaaaccccaaataattgttcttaaataggaaaaaaaaaagaggggaaaaagtgaaagtaagaaagttccccactaaaacaggatttggtgtctctttcaagcacgctacgctcgtgtgtagctgtattcgattacgactttcctcactcctaacttatattataattggttctattcttaatccatgtttaagccctaatttaagtctaaatctttgatacgttttggtaattttctttttgttgtgttagatccttttctgtgtctcacatatactatgtttttatctttctttctgatttttttttgtgaacagaattgtttatctttcaaaaataggattatatttgatttcatatttggatggataaatacaaacatgtttggtatttggcaatccaaactttaatttataccaattcgctgattggttaattatgaaacctagataagtgaaaatatgaaatacatctaaatcttctatagtattttacgcaaatcttatctgtcgaattaatgtctagattcattgaagcttggggatatttacaaattccagcttttttacctaagaaagttagacctaaatctgaatcgaacaatctaaattaatacacattgtgtcaaaaaaatttggatcgaagttttaatgatcacgaaagaactatgttctagacttctagtaatgtcctataactttgttacgtcctactaaattaagttaattaaccattcacaagatactacgtgcatcttggttaagaacaagtttaggtttaaaaaaaaaaaatgtttaggtttaaatactaaatgtagaacagtggtagttttgaacggacataccttgatttaggttttgatatggatgatcggcagttgaagtgttaatatcgcctgattaaaatccaatttgtccacgacaatttactaagcaatacaaagtcgttctctttatatatatatttgtgttgcataaatcaaaattcaatcataacaacaaataaaaatatataatcaaaatccaacaccttattttaataggactcaaatatgagttataaattcctgattccctgaggatttagagttacagtatatatatgaaatatttcacttaagtttatttactcttctcattagagtacttttcaatttaaagtctatttactctcatgattagaattagttcatgaaatctttacaagtctcaatgatgtaatataactatttggtttatcgtgtctttgaacttaaaatcagactaatatctaaatatctctaaatcatcacgtaaagtatgtgatgcgtatacttgtatgtgaacatggtaaatggttgtgctgtattggaaggaaagtttggactataccatttgaataactatgcgattatatcatatatcaaaagttaatttacgcctaaccaataaattttttttaaaatgcgaatatgatataatgtaatataacccaacacggatccaaccaatccgactcgtaaactttttgcccaccacatcagtaaggaaatttattcaaaatggttagttagataccggatatatataatctatatcataagctcatgtaagacatattcatcatcgcttcaatgcaatgatataaagtgggtagtataactagaacagattattacaagttagcaagaataagttgatcacatatacgatatcttgtaaacaaacaaaacacgatattaaggaacacgtaataataatttggtttaatttccgcctgttttcgagctgacaaatgaaagaaaaaactcaaaagaaacacgctaaaggcttctcacgaaattaacgtggaccataagacaaaatgccaaccaccaacttatatataacgacaaaaatagtaatatattatttcgtgaaaaagactaacaagtgacgttcttttttaattgatatatattttgaggtatgctaattaagcagccaatttgaggaggattcaagtggcaacttgaaggatgttgtcgtctgcaagctgttctccaaaaatacgttgaatattttttaaattcacccaaccaagaagctttatgtcttccaacgaaaacgaccttcaaaaatcaaatttctatagactaacctttttgcaaaaaaaatattcctcaattgactaatgttgtggctaaaaagttaagctagtaataggctaagtttttatatagtgttaatatggttttcatttttaatgtaaacctttttatataaatacgattaaataacatgcaaatctgattttgaatagtgtaatacaattgacattaaccagtatgcgatacgttctgctattaatgtatagtattactctcagaataaatatcacattgacatggtacaacgttaattcccatgtaaataaatgtataatgtatagtttttctggcgtcatatttatatatttgttaccaactacgattttggtcgatctttaaaagaaaaatatctcttgtactaaagtgctcggctactacgtggaaactgcaagaacgataagaacaaaagtggcagctttgacttttgattccacaactcaaactttgcttgcatttgcaatttggcatttcggctaacagctctctaaataagtaatcaatatgtaattagttgttaaaccacgggattaagacaagcgctcatcatggtctatatattataagcgctttcaattatctatcccgttttatatatcgcttatcaactttatcagaatatataaacccaatttgcataaagtctagcgaaccaagcaagttgcttctcagttattttatttaactttcttattttccacattgtttgaatattttgtagttagagatgactctagtgacattaagtgctacttagaatatccttccgatcttaggtaagccatgacatatatcacatatatatgataagaatttttataagaacccttgttatgaagaacagaagaaggtttgtctattaattatcaatctgaattataatgcattaatcagatgtaaagatttaccgtacgcataaaccatataattatctcaagtgtaaacggtagcaacaaaattgtatcgcaagactaacatacctttttaatactattaagtctataacaaacaaagtagcattaattgatgatttcgtaaaactaaacgacgtggtttaaagggtctacataattaaaatattttgttcttgaacttttctacacagagtagttcaaaatagtacgttataatatcatggggctgtgaaagagttataagctgtcatttggaataatatacgaacttgcttgtacatgtgttgtggacagatttaatataattatcgaaacatgaaagactttgttcccagcaacttggagattagatgtatgaaaataaaatcaaatgatataagagagagcttatatcaagcaaaaacgacgttgttgtggttatcgttagtgactggagctaaaaattgagaataaccacttgttcaatattaaacattcacacatatgtagtttatgaagtccatagataagtactgttttatagatttcaaagataagaataaaaaaaaatggctgacgtctcgacttcattaattgttgttttcattcggtgaatatatataatcacgagtagaaagtcgaaacaaattcaaattctaaaatctgtaggaaaaaacttagttttttacatttaaatgttcattctatcggatttatatcaagatgatatataaacacaacgatgatactattataagtcattagactacacgatcaaaatttattaagcgtacgaattgtataagtacgattttactgtgtgtaacatacgaaaagtaataatctaaaattttctggacagagaattattaaaggcaataataaattatttcataagttttgtgtaaaagctacaagttttaaatttctatatctccactatgcagttgtcagataaaatattgtagagaaagatgaaagtggtaattttgagcaatttggagattagctggaatgaatatatatatatatatatatatatatatatatgtaaaatcatatggtttagggtagaccttaattatgtgacacgaaatcaacgtccttgtgcttatcatcaacatgggagcttataattgtccacctcatgcatcttgatccacgtaactaaaaaaccatcacttgctcattgtttaaagtttaaatgcacatgcatatatgtatttagttttcttgtttgatctgtagtctctgaactctgaaaggataagaaaagagttgacaaaaaaaggataagaagaagatgaattaaatgacaaaaaatggctgaggttagaattttgacttcaatcggtgaatgaatttattagactatatatcgagggagacgatgacttatatatcgctgataactttctaaatcaagacacgacaaaaatgtcttatgtataactcatattatacgcacaatgaagtatcttagacgaatcatccatcttatcaaacttaagtaatttgttttttttatctcgacgtaaggcaagttgctatttattataccaataatttcattttccgctatttgcatgaatcagtctcttttgaattttatataaataatttaattaggtcgtaattgtttcaaacgtacgtacatgttgcttttggaaaaatcagatgatctaagggattctgagatatcttctccaagaactaaccgcttttgttataagcccattatgtatatgcccatgtacaaaaaagtaagagggcccaacaaagacttgcatttgtaaatactatggttgttaatttattacgtcgaaataatatatttcttttgttcttttttgtttgattgtttaaaagaaataattatttcaaaaatattaattttttaggttttcaatgcaatagttattagttataattgataaattgtaaacttcaatacaaattattgaatatcattaatttacagttattgaaaattgtaaattacaaagaacaatacatttaaaaaagtaacatttaatatgttttcttaatatttgtgtttttcttaaaaaatcaaaccaaaaggaacatatcgagtatgtcttggtgaaccaagttttatggaatcttttgtaaacattattttttcacattgaatttttgttacgttttttcgtactaatatattaatgttgttttgatacaaattcgaaaaagactcgcaaaggattgtataaaacaaaaagttttcagatcatgaatccaaggtgaaagtgaatacaactacacaagcatcttatgaactaaaagaaagacgtttcaaaacaaaacaaacataaaacaggatggctagagcctagaccagcgaatcccgtatcgacaacatctagtccgtgccctgcctaaagccaccactgacaacattttttcttaaagcaatcatgtcatatactaaattttgatagacctgtctaaattgctttttcgaacaaatactaaaccttgatagacctgtctttgttttttcttaacaacaatataaagctgtcatgaagatggaaatggttcatgcatgcaacagagatggaaatagatgaaaaaacgacaaaaaagagaattaaattaagagaagaagagaagaggacaaaagaaaggcacacgtgtatgttagagttgtgtatggttgaatggttaaaggaagcacctgagctgtttagacaagactcatggagagaacaacttttaatgcttttttatcattcattattatgaacaccttcctaaaaccaaagaattatggacatcttctttctcaattcgtatattttcatgtcgctacaaaagtcaacttcgcatgcatgatgcacctatgctaaacaatgctaacatatatagcttatgtaaaaaatgtgttttgtgaattgtgataaaaagaaatccactagctattgtattaattagttttagaaatttggtgttagttttctcaagtaaatcaattgccaaactgtccgatgattggttttgggacaagtgatgtatatattaattccatctagacattatttatttcatgaaaatcatcaggaatttttcgaagaatttgtgatctatagttgctaacgataaggaagcctactaacacgagggttgcaaaagctttttctatgcatttttgggttttgttatctaatcattgatacatcgatcaatgaatttaagttttgtaatagtaatagaaatatttaagaaaacttgatttgactatcaaagcatatctaaaacaattaacatcaatttagaactgaaatcctaaagaaaacaaatatgtgatttctagtttattatcttgtaaaaaaaagctactcttataagtaacgttttgacccaaaataaagtaaagtttcgacattttgcatatacattaagaaactaaataaatatactatgacccccttcgaaaacatgtcattcaaaataaagtacttgtgaaaagataaaactaaataatataaataattacctttaaacagaacaaaatcttctaaaacaacatttatattgaaattaagagtaatacattttagcaacaacaaaaaaattcatgtacaagatccatgtacatttaatgcctactgatatgtactttccccaaacgacaaatatctcttcttctttttttaacatcttaatcttatttatgattcacagagaaagaaaaagagtcaaaatcaaaataacagcttttctccacataaatccacatgtgtgtatactggttactcgactctatatatagtcctaaagctacaatgtttctccatcaaaagtatcaaaagaaagagaaacaacaaaagcaaatcctataattataatcatgagctctgtcacacagctattcaagaacaaccccgtgaaccgtgaccggatcatcccactagatttcaccaacaccaaaaccctacccgactcccacgtctggtccaaacccgaacccgaaaccacgagcggacccattcccgtcatcagcttgtccaacccggaggaacatgggctactacgacaagcctgtgaggaatggggtgtgtttcatatcacagaccatggagtctcacactcgttactccataacgttgattgccaaatgaagaggcttttctctttacccatgcatcgtaagatcttagccgttcgatctcccgacgagtccactggttacggtgtggttcggatctccatgttctatgataagctcatgtggtctgaaggattctccgtcatgggttcctctcttcgacgtcacgctacactcttatggcccgatgatcatgccgagttctggtaatatccaaattaatatcgtctccaaatataaacaatgatattatcattattgcccctagaaaaatgctcattaccaaatttatttggaagaaactaaacatgaagacaatgaatggtctatatttaatttaaacagcattttgcccaaatctaaacactatgtaatatgaaaacaaatgaataagaatatgatacttaatataataactaatcaagaaaataaaaaatacatgatcgttttttggcaaatgcagcaatgtgatggaagagtatcagaaggcaatggatgatttaagtcatagactaataagcatgttgatgggctcgttagggctaacacatgaagatttgggatggcttgtaccagacaaaactggttcaggaactgactcgatccaatcctttctgcagttgaactcctacccggtttgccctgaccctcatctagctatgggtttagcccctcacaccgactcctccctacttaccattctctaccaaggcaatattccaggttagaaatattattagaatatatataccattttatcattttttgtttttcgattaatcaatagtttttcaacaaccacacattaatacttataaagagttcctaaattggttgccagtctaaaggaataaagtttagaacgaaaattaagtaaatctagatctagaattcggactaaactagttacctttcaactaaatgaacgagaaatagaggaaagcaaaaacaaatagtgctatatatcaaatttacagtttaaatttttatttttatatcaaatttacttataaatgacacacaggttttcgtgatatatacaaaaaaaaaaaaatatgatgtaattgaaaacgacatagtactaatactcaccaaaaaaataacaattgtaatgaatagcttgaaatttgaatatttgttatatgacaaacataaaaactctaaaactgaatgggtcgtggatatcacaaatatatgtatattcattccaagtaacataaattatgttgcatgcattgcattggtcaggtctagagattgaaagtccacaagaagaagggtcgagatggattggagtagagccaatagaaggtagtctcgttgttataatgggagatttatctcatatcatatccaatggacagttcagaagtacaatgcaccgtgcggtggtgaacaagacgcaccaccgtgtctcagccgcttatttcgctggccctcccaagaaccttcagatcggaccgttgaccagcgacaagaaccatcctcctatttacaggcgtttgatatgggaagagtaccttgcagccaaagcaacacactttaacaaagccttgactttgttccgttgctgacttagaattttatttaacatgtactttggttattctttaaatttgcgtcgttgcatttataaatgtctttttggattcctagttcatgtcaacatttctgcactaatgttggagcgttttattgtatttatgagttctttttttgttcaaaaagagctttgttgtttttgtattgttttttttcttacttgttataacgaaagggatcgaggtttaagtaattaaaatgaatgctcaacgttataagaaaaatataaataaattagattaaaaaattcacaaatatcagcggatgcaacaatttaggtaattagcaaaagctttggttaagatgttttggatttacaattttacatatagctctttttttttggttcaaaacaattttacatatatataggaacatgtagttgcaacatttttaactaggtagaatcgttttttttttttctatttataaaatatcatgctcattgaaagaaaatgttaaccttaaatagtaaatacgtatacttttaaaaatatataatttaattttctaacttccctcagctcataatgttacatttgaatattctgtaaatatagatgattgttataacactatatataaaattaaattattcatagtttacacctaaaccaatttttttttttgcaacataatcaaagttatatggtaatattaatcaactttattttattcattgatgttttaaattctttgatcaaagaaaatgttttgaattatttgttatttaactataaattttataacaaactaattgaaaaaaagttattagctttgaagtaatcggatctagaaaccgcggaaagaagggaaggaaggaggaagaaacagagcatgtaaaagcttctcactttctccgtaacaatggcgactttttggccatcctcttcatcttcaaaccacccttcaatattcctttatttacaatcatacccttctctcttcttcctcctctttcttaccacctctgcaacttcactcaccgttgcatccttagtgaatcctcactctttcatagctccacgaatcccttattccgatcactgcaaccacatagttccagagtctccgatcgacccatctccctccgctgtattcagccacgcatcgcttgctttcgatgtcagcttcttctccggcggcgacttgttcttcaatcggtttcaatcacagaatggtgatgttaaatcagctagatttagacccaaatcaatccgtaaaactttgggagatgggaagatttacaaggtggaagcgaaattgactttacaaatctccaaaacctctgcttcttcttcttattacggcggcgattttggccagaaaaagcttcaggtaatgcagatcgacggacgtagctcttggggaggagcaagtttcgatttttacgggttttggtcggaatctacaggacaagtttgtatggttggatcaactcaagttttatctgtggaaggtactcgtttgaagatctttgatgctcgtcttatgcttaactattccaaggagtctaatatctatggaagtttggttaagggagtgttagagagcgtggatagcctaagtgaatttaaaacggttttgattcttggtgcaagaaacactcctttgaactatgagtataagttgttagagcaatcgaagttggattgtggggtaaatggtggagagagtttgtcgttagagaatgttttgggaggaatgtgtaaagtatttgaaggtagaagtcatgtgtttggtttgatgtatagaaatgattgtggggttgaccatagttgtagtccttttggaagtgatgtagagtacacaccgggttttatgtcgatgttatcgtttctgtgtgatggggagaagatgcgaatgcttttgtcatttagtaacatgagcggttatagtagtttgtttccatttgatccgagaaccagtttggttgcagagggaagttgggatgtagagaggaataggttctgtggtgttgcgtgcaggatcttgaatttctcggattctttgagtaatgctgtggttgatgattgttccctgaggttaagtttgagatttcctgctatcttgtcgattaaaagcatggctccagtagttggggagctttggagtgcccaagcagagagtgatccaagctatttcagaagaattgagttctcgagcctaaacgatcaactgtggcgtttcccgagtctgagatatgagtatacagaaagcgagagagtgggtaagttatgcggggctggcaagagtcgccccaaaaggaaaggaaaccattaccctgatgctcaaacttcagacatgagatttgtcatgtcagtcaaatattctggagaaggtaatgtcttgagaactgcccgtgcaagtccttactttgtgggagaccgtttgtatcgggatcttttggttcgtgggcaaggggttgggctaactggaatccctatgaatgtcaacagtgtcactaaaagctttacaaatatcacttatagaatccgttctttgaatccaaattccgaatctcgtggagatatctacgctgagggaacatatgatagggatacaggtgagctatgcatggtaggatgtcaatcagttaggctaaaaaacacagtggctatacaaaacgagactgtggattgcagtcttgcaatcaagattaacttttctccaattgattcgagaagcgatgaccgtttaaagggaaccatcaaaagcacacgggaaaagacagatccgctttatgttggacgtatggaggttttgtcgaggtccatctatgttcatcaagcgaaagaatctgtttggagaatggatttggaggttgctatggttttagtttccaatacactttcatgtctcttcttgggtatgcaactctaccatatgaagcaacaccaggaagcacttcctttcatctccgttgcaatgctgatacttattacattaggtcacatgattcctctgctgttaaactttgaagaactctttaaaggcagccataaccagcgaaacttgttctttgagaacgacagatggctcgaagccaaggaaattgtggtgcggatagtgacactgatagctttcttactcgagtgccgtcttctccaactagcttggactgctagaaaaaccggagaccatcatcaccgtgaagatgtgtggaaagcagagaagaaggtttcttatgtgtgtttacctctctacatcaccggtggattgattgcttggttagtgaaccgtaatagaactcctaaaagaatagtatacataggaaaaccgcaagctcggaatctcttataccgtccagtgaacctgaaacgctcatttcaacgtcctcctttgtggaaagatctaaaatcttatggaggtttgatgcttgacgcattcctccttcctcaaatactcttcaacggtttcagcaactcggacttgaagcctcttgctgctttgttttacgttggaaacagctttgttcgattgcttcctcatgcttatgatctgtatagaagtcacagctacgggaagattcttgattggtcattcatttatgcaaaccacaaaatggattattactctacggcatgggatattattatcctctgcatcggtttcctctttgcgtttctgattttcttgcagcagagattcggtggtcgttgtttcattccaaagagattcagagaatatgtgggatatgagaaagttgtagagcttcaacaagctggtgagcaacacaataccaatgactcttgacaatacatatatagacacacagttttgttgtcatacaattcatttatcttgttcttaactgttttaggttgtgtaatatctacagttttgtgggaaagcaaattgttatagagtgaatataaacttcaataaaaatggaaccaaattgccaaagctctaactttgccttctgctgattcaatatgatagtacactgcatttgaaaaaagaacagaggattctcttgtagactgttctatagatgctatgaaaacagagtctagagagtgttcttaacaaaataaaattttggtacatttggtactaataagtattgctgaaggaagactcaaccgttaagaaatcacattcctaaatccttgtctcagaagacatctttggtatcatcacgtcaaggaagaataagaaacttttagcatggacttcttgtgctgagaatcactgtggtttcttcatcgatttcaattttgtcatctttcatacgctgcaacagagtatcaatgttacgtccgccttctcttatatcagccttgacaagagcatgatacatctgtttgttcacaccgatacaattcctaagagatgcaacaaagctttctacttctttcaaacttccttcatccccgacccaactcaaaacacttgtaaccagcgtcaatccaggtctccattttctgctacccacttctacacctaaggcagttttcatacacttgaaagcattttctaaagtacccttttccgcataagcagtagccacaagttcccaagattctggtgtagtagctttccctcttcttgctaaatcttcaagcatcgcttctgccttctcctccatactttttccaatgtaaccacgaatcacagtgttaggcactcgaaaatcataacagttccccgatgatttccattccgtaagtacttcctcagcctcaactaaagcatcaatcttcacaagcgactgcaacacagtaagatagtcctgatttattctccttttacacacatctttctccaaatcccataaccttaaaacctctatcttcttccctaacctagcataaagcgtaatgagatgattgtaaccttcaccatctttcttctccaatctattctccgacatcttcaaaagctcaaccgctctatcacaatcaccaccatcaatataaaacttagccgcaaccgcataagtgttccaatccatagtaatatcctgtcgtctctccatatctctcaaggtcccaccaatcctctcaagatcatacatagcaccaaaagcattaatacatatcctataactatagttatccggagcaacattctcttccttcatctcctccaaaaccttaggaactttctcgtgctgaccaatattcgtgtaaagacacataatgttattgtaagtaagagacgaagtaacaaaacccatctccttcatcttctcaaaatgcaacagagacttctcaacattctgttgcctaacgtaacaattcaaaagagctccataagtcttatcattcttatactgttccttaagattctcaaaatactcttctgcagtgacaaatccataaactctaccaataagatcaagatgaaccgcgtgttctgtcggagagaacacacatacaccagtctcattcatccatttcgaaacctgaatttgaaaaattctaaagtttagttttttttctcggtgtaaagagggaaagagacttgatttgtatagaattacttacctcgagagcgtggaggaagcgtttgcgtctacgaagatcgtgaacgatgcgaataagttcagcaacagagacttttttaccgcattgaacccagttttggagttctgggtaaacacttgattttgggtctcctaaaggactgatttttgagtaaagtgtcgtcttttttactctgttagtgtagtaatatctgctcgcaatcaaattcgccggaattcgtctcagtatattcatcggttccggcgaagaagatagtcaaagattgagactttacaaaaatgaaaaaatacaaataaaggttgaaagtttatgataattgcatattaagcctcaaaacttttattattatctaatttacacctgaatctttctattgaacattttaactctcaaataaaagctatgttttgaggaaaaaaaaaaaaaaaaactatgttttatcaagcttttggtacacgcataaacttgatatcaagagtctgtggacttggagaagcagaggttttctttgataacattcccaaagattattgcggtcttttctagtcttcttagctgctaatatcgtaagctgagaagcttgtggaagccatgaaggaagcgtgtgtttccatggacacacgttgttacaatcgtatgatgaatatgtataatcagatgaatgtgcatggaaaattagatgatctgatgcttgaaatggagaagaatggagtctcttttgaccaatttactcttagtattcgtctcagtgcatatgctgcagctactaatattgaaggaatagagaaaaccatagaaaagatatcattaatgtttgaaacagctattgaatggatttcgcaatgttgagctcatcgataaggcacaatgatgatgaaagcagaaggaaacaaagtgaatccccatacggatgccccatgagaataattaggagcagcaaatttactaaagaatccataaatatatcttataaggtacctttctagctttaagaattagtacagaaatattacacaaatttgtaaatttagtattgttacaaagctatgaccaagagagaaggaaagttcaagtttctacaaaatcagattgcaagctcctcactgtctgcctttagccgatttcaggtgtttagtgagcatccttggtgcaatagccattgacataagctcttgaaagagtaatttgcaagcatatggaatgtatacctgagaatatttagatgaaatgacatcagacaaatgagcatgaaagagataaagatgaatatgaaccacttgcacaacagtttatgtttacctgaacaatatctgttttgttcttgcaacctctgcattcaaaagaattcttcttcagatttgcaatggcaatgagcccgcagacttcacacacatgtaccctatacgcatcactctgatcaaacagcctctctttcaaaaagtgagcagcaccatgtgcaatcatgcaatcgcgctccatttctccaaaacggagaccaccatcacgtgatcgcccttcagctggttgtcttgttaagatttgcaccggacctcgtccacgcgagtgaatcttgtcatcaaccatatgcttcaatctttggtaatatgttggtccaaggaatatcatagctgtgagtggtctgcccgtgtgaccattgtacattctctcaaatccacgcatttggtacccacacttatgaagggctttgcttatattatccacctaacgacacaacattggtcaaaactaataataccaagcccaatgctaactaagcagctaaggaaaatgcaagttaccgtgacatctgtaaagggagtagcatctccttcttttcccatgtgagctgccacttttcccatgatgcactcaattagctgtccaattgtcattcgagacggaatagcatgtggattcacaataatgtccggagtgaccccttcaatcgtccatggcatatcctcctgcgtgtaggtcatgccaacagttcccttctgaccgtgtctactactaaatttgtctccaatttgaggaatccgcacggatctgaccctcactttcacaaacctcaaaccatctgcatttgtagtcaataacacctacacgaagttacaagaattgatcagtttcatatttcaatcctgaaactttctaaacccttaactgcaaggaaaagccaaagttacctgatccaccattccagtttcactatgtcgcaagcttatactatgatcacgtctagtgtatcgggatgattgtccttgagcctcatcttgagatattggagtggttttcccaatgataacatcttcacctgaaactctagtaccctataccaaaaataaaagattgtatgatatgctttctaacattagtcacctaatcatatcagataataaataattaaggaacaataaattataaacttacaggaggcgcaagaccatcatcatccagtttatcataagaaccatgtcgcataccctgcagcagaaacccaagtgttaaacttcacttacaaaaagcaccactgaagtatgaaccatgtgtcaattactttcttaccattgtacttcctctgtctgggcgcccaaagtcttctttgacaagcgtccccatttttttctcctcatctctgtcagcaaacgtgattgcagtataaataaatggaaagaccgaaggcaaacgtccaaaagtatagcatactcacctgtaagaccgaaagaacaaggatcgaaagaaaccacgatctattgaagactgattcatgatgacagaatcttcttgattatatccagaatagcaagaaatggcaacaatagcattctgcacaagaagaagaaaaaaaaacatttgagagatttgatacacgagcaatgctgaattctgaaaaacttctagcaaaaataacttacaattcctgctggaagttgtctaaagtgaagatgctccatagctcttgtagtaaccaaaggcttttgtggataatagagaacataagctaacgtatcctggttgacagaacaataataatttctttaaaatattgagtgatgtaacaagagctgacaagaaagaccacaaattaagagcctagaacataccatgcgaaattggtagttggtgacataaattcccattgcttgcttccccatggcagattgatatgtattacgaggtgactaatacatcaaaaagtaaagggttagttagcatgaaactgaatttacataatgaaatcgcttctgatagaaaagtcatttagacagaggtacctgattatggtcaggaaatggtatgattgaagcacagacccccaatatcagagatgggtgaatctcacaatgtgtgtagttttcagtataagcctcttctgggcggagtctagcttgaaccagatcctacaacaaacataagagtaagatttctgcagaaattagtgcaccacaaactcatttaatcacatcttcatttcattactcacactgatagtcatggaaatcatggtcgtttcctcttcttctgtgtctatgtattctataaagcccttagcaaccagatgatgccaaccatcttcttctgcactttcctgggttatgaaaacaaatattggtacaatggaatttataacaaaagatactttgataacaggtaaaaattagaattttaccctttgttgcagagcatagatatctctcttctttattaagagcttctgattatctacaataaacaacggacggctacaacgtccataatcagtgtatatccggagctctttaagacggatatctctaactacaccaacttcagtgttgacatcaacctgcaagaggaaaaagtaatatgtcacttctgcataaagttgcaatattttcactagcatatatggaaacgtgaaagaaactgcatgcttacccttcgtctcaaacgtctcaacgttttcaccaacatgtcaggatctctatgaactccaacccacattccattgacaaagatttttgtggcttggggtataacagatggagatatttcctatattcaagttaagaccttcaggaaaccacaagaaccaaggaggcagatgttgggtaagaaattgaatgtgaaatgctacagacctcaaaattctcagtaccccattcttccaaaaattccaatataggataagcagctgacccaactgttatgtagaccatgagagccaagtttttcactagaccacaagcctggtacagcaaagccacaatgagcaatggaactataaaatccgaaacacccttattttataaatataacaattttacctgtccttcaggtgtttcagcagggcacatcattccccactgtgagttgtgcagttgtcttggttttgccaattttcctggcatatcagacttgattagattcaagtgggataaacaaaagtacaagccaatctaaattgcaaggatgtggataataaagagaaccatgactaaaatacaccaactgtacgaacagttacacagagacaaaatagaagtgcaggaaaagaacgaggctttaccttcacgtcctattggagaattgagacgcctcagatgtgacaaagtcgaagcatatgtcaaccggttaagaacctgttgttagttaagtctttagagccatataaatcatgcaatgaattataataggccaaaacagtaaacccgataacatacatcaagaaattattggaactcaaaaacataattaacatagaattatcctaacctgagagactccagctcttgtgccagcagcgtttgcctggccccagttcccagtagcaagagaatatttcaggccagaggtaattgttttagccttaatggcaaattgaagattgacttctttgccattgtcaacgcactgtcaaagaaacatgaatcagacttccaaacacagaataacaacttaatactaaagtctttggctcgagaaagagtaactatgtaagataccttttgaacataagatctcacatcccttgttaactttcggaaaagctgcatgtagagaagatgttaggtcagtaagagataaaaaaaacactgatactcaacaatccccaagagtgtataattgtgtgccgggaacaaaccattctaaatagccctccaagtaaaggaccagcaagatccagccttttgttaccataatgatccctatcatcttctggccttcggccaagtgcacaaagcagcagccggtgtatgatatacctacggatcatagcataatatgagcaacacagaaacatgttaagtctataaacattacaagtgagttaaatacctacccaaaatagtaagctttctttgtctcgcaatgctccccaattcctacatgaggaagcatttctttctgaaggatatctctagcatacctgcaatgataatattgcaatcgcaaacctccagtgtgaacatctcaatagttgacatcttagatcataatgtccaacttaattggtttagattatcacatactttatccttttttccttggttacaccaacagttgcaccacgttttccaatatagtcaagtgcaacctgaagtaatatgaaagttatcaagtgattgcaagatcaattcctcaagcataataaaatgtcattaaccaagtgaaaaaaaagtggataccagctgattttgaataacgaaagcttcttccaaggaaggcctgagcaactccatcatctgggtatcggcaaaatcatagcagatgtgttccaatatgtccttatcggcaacaaatcccagtgcacgaaatactatgataataggaatttctgttctgatgtatggaagagtacatcgaatatactgtccagatgaaccctgcatccatttgcaacatagaatgtaatttatttaccattatctagaatttaaagaataaatttcgaggaaggatatagtagagttaagactaattagctttctcttaccccttttgcactagcacgagcaagcatacgcacaaacattgtgcttggaggcctattttggttttcagccatagaacggacttcaccaacataagcatacttatttggctgccttttcttgaacacataaacatgattcgtactcatcttctcctgagcaatcagaaccttttcactgccattaataatgaagtatccaccctgatcataaggacattctccaagctctgtcaggtctttctccgagttctgaaacaaggtacagtaactagaccggagcatgatgggaacctagcaaataatcaaacaagaagaaaacatttctactatcagaacagtagagtacatggaaacacctaaataaatgtgacacaatgaactgagttcggacacctttccaatgaaaactttagtaaaatcctgtgtctccgtaacttcttcaccatcatgccctttcttaataactctcttagtaacatcgacatacaaaggcgcagagtatgtgagatttctcaaccttgcagccttagggaacagggtggcagtctctccatcagactctgtcatcataggtttactcagataaatctgtccaaagctaatcttgtagattgtctgcaggaaaacagctatatcagacatacagaaaaacagatagcaaaacagctatatctcagctcacacaaagtcaaaaatgatttgagcttcaaccgataataaagaccactgaaaggacactttgaaaaaagcgaagagctcaagcattaaatggaaagataatctcggaaaatcaatgagcttagctactcgacaaaggcagaccctaattgcaacaaaacttaaaaactgatttaagctttaaccaatattcaaaaccactgaaaatacacctcaaaaaagcgaagagctcaagcatcgaatacaaagataatcatgggaaatcattgagataagcttctcagataagggctaacaatagactgtctgcaggaaaacagaccaaagggacagcaaaaaaagataccaaactcatttttatagtgccaaaactgatttgagtttcaaccaatactataaatcctcctcgaaagagatgagctcaagcattaactcaaagataatctcgggacattaataagattaccagctcaaagtcaatatccggacatcaatagtcaaaatcattttttgactcttgaacagcatatagctcaagcattgaataacaagacaatctcgggacatcaataagattcaggtaaaccctaatcgcacccaaacggtagaagctcaaatcgaaacactttaaaaccgccacaaacacgataaacccgcacataatttcgaattcccatagaaaccctagaaaaaaacaaaaacgaggaaacaacctccgcaaaatcggactgatggccaggattatgctgagattcaggtcggatctcgatatcagcagactcatcaacgatttcttgcatagtattttgaataaactcatcaaacgaatccagctgttgacgaacgagacctttctcttcgaaataagcagatataacagcccacgcgtcctcctgggtaatctcctcatcgtcatcgtcttctacatattgaggttcaggttcgtattcgttgtactccatttattctcactctctgaagattagagcacagcaaacttcactactcgagctctcggagacaaagagagagacaggacgcagagaatgagacggctttgtgagattgtgagtttataaaggctcgagagagagaagtcggcttaagtttatggaaataaccggtttgtatcaataaccggtttgattaaatgggattataaaaaggatcggtttggttgttagagagcttggattgttaaatgacggaaacacccttactatataaagaaaagtctccggctacatttttgtggcgtcagcgatattttcggaagaagagagagagagacggagagtgaaggcggaggaagggagagagagatgataccgcagcaatggacgccgccgtgtgggagcaaatgcacgaataagtactcagcatttacgcagcttccatgtatgtaatatctggactcttaatttgtgtgaatcggattcgtttttgagttttgatgttcgtggtccgttgttttttgatggtttagttttcgatgatgatgataagaatctgttgttggagctgatagattgggttctgatttggattggtgattgatttcttgattcaaaagtcaatttagtcttccgagtgtttcttctttttgttgttgtttggaattgaaattgggatctgtaaattggattgttgattgatttcttgattcataaaccctaattatttgttggtgcactctacttcattacgattatactaaacattttggtcaagaatcgcttctttggttagattggtccagagacaacttatagttgtagttgcaagtatttaagaacatccatcttgactcgtaattgaataatgtagattgaagaatcggcaacatttatattgattacaagtaagggagattatgcagagttcttagagcttttctatcatgtaattaagaaaatggttaaattagtaggagaaagtggaagataataagttgtagtttatgaactgaaagaaatttaaagggagagagtcaaagtaacggtatcaaagatgcttctgtatccatgttgcttctatgaactattgacatatatgtatgcttaagctagttaaagggcttggtttggctgtttctgtctttctgatgaaagcttttcattctctgatctctgaatttcattcatgggcacaaaagctagctgaacttatgcttggtatgacattttttccatagcaatctgggttttttttcagctttagcatcagtgtttatcctccatgttgttgtatgacattttttccatagcactaatgtaattcctgaatctgtgtagggagagtattctgcaaaaagggatgtgatgccgatagtgactcatgggaagattgtaagcatttctttttaattctttgtaatctgtaacgaaactgttgatgaaatgatgagcggttagatttgtcctcactatggaacatcataaaaaccaagcttgtctcctacataacgaaattacatgttcatgaagagtatcttctgcttttcaggtttaagtttccaagttaatgaattggtgtaatagtagtgtactctctataggtgtaggagactgcagtgaaatttgctacaaagatcctgtgctaaaagacagaccatggactgctgttatagatcgttctcctggagatgccaaatactctgaggtaattcacacaatgaatctttttcttcaaaaaagagaaatggactgaaccgtatctaattgttgtacatgtaactctgtttttaaattcaggaatgctttcacgcatgtgtagcaggctgtggttacaaggtttgtttccttgcttcaacctcaataatttgatgcgtttggaaatacactctacttctctgaacccgtgtggctgtatttttttgtcatcatgcagtttgatgttgaagctgagatagtcaataaggtgaaaccaaagagacctccaccaccaccgccaaagccacaaccaccaccaccaccaccacgttctcaaaaaccaatgcagcctcctactgaggatgttcttgcaacttccgcttgacgtatctcaacccccatcaaaggctaacacttggaactcctcaattttttggtatctaaacatatgagggagtattacttttcagagtagccaactcaaaggattggtccataaacttttttttttctttttcttttgatagtttttgcaatagagattggagagtagatattagtgggactcgtcccgtgatgaaagttagagcatccaaaaagctcaagttcctaaattccattgaattttttgttttcttaatatgtagaattttcattcttatcaaaagaaaaacaaatgtagaatttcctttcattagatccaataatatttgaacggcacaaaatttccaaataagaaagagtgacaaagagtctagccaatcagagaatgaggagaaagttttcacaaacatccttgaccgttgtaactaattagtagtaaattacttattacccgggaaaaccgtatttaagtaaagaaagttttcaatttcacgattttacttgccataacatttgtgtacgtgtcgttatactatttgtcagatgacttatttccctttttcaattgtcgggaatattttgtagtagacttactataaatatatacaattctagcttactccacaaataaaccaataatctttgtaacgaaggaaaccaaaaaacaatcatggctgattcttcctattcttttgtcatgaagatgacagtgaagaccacaccggcgtcagatttagctttaacaaacctcgcctattgttctccgtttgatctccatcgtttcgccgttcccgaaaccgccgatctcttcctcgctaacgtcggagaagtttttgttctatcaatctcatatcctttttttattcacttacaattttgatcttattcacacttttctttattaattatcgtcgtttctaaacattttgtcccacgggtttatcacatctttttcagattccaattaagcagttataccttcttatggagatggcagctcaaagagatggcaggtctgaagagccggtttacattaggaaggaaaaactcgacatcactcatttcatggattgtcttcaggaatttacccaagagatttgaagtttcagttcattattcttagactctcatatgtaatgacatcgtagtaaggagaagattcatatattgcactaaaatcctttgaagatgtcaaagttgatatttgattattggcacttgacttgttaactatatgaaacttttatgttggttattatgtgttatacatttgtataaacttgcttagattgattagacgagagtatttacatcacttaaaaatcgaggatagttcctgacaaaatggaatgttttctccttcaaaatcaagtcacttcttagtgattaagagttggttacttattttaaaaatttccaccactaatgtattgttttctttttcttcattaaatttgttcgcctatcaacatcggtgagactccgtgatgaaaaattgaaaatcacacaatggtctatggacccacaacaaaccattcaaaacaacctcgtgtcaaaacggtgacgttcaaacttaatcacatcacataaagcagctacacttaaacaagaacaagaaaaagaaaaaacaagattctctctctctctctcacatggctcatctcttaaaccgcgttagatcttcctggtcgtcgatcttaccattaactataacattcctcgtcatcttcaccggaaactcactcgccggagaattacgtccttccgatcatggcttacagtaccaattcagctcaccaccgacagaatctcactcacctccgggaaaaatgaagtccttctttggagattctcattcttcttctcctcctccttctcaccctcagctcctccctaaagccacggcggcagacggcggagacgacgattcttggtggcgagatggagctgggatcagacgtgatcacgtgatgaggcacgtgtttcttgcggcgagtatcatctgcggcgtctccggcgttgcgcttctggtggtttttactttgatttacttctttaggtatcgtaaacataatcattcgaactcacccaccggtaacgattctaaagaaattatattttgattattgttcttcttagatttaaaattttaattgtaatctttacttatttttttcaactgatcttttactttgtataattttttttttttttgcactttgctttatttcgacgacttttatgttttgttgcgctagagggttataaagagcactgttacacccacatattattgttggcaaaaagacaaggaaaaaaaaagaggagaagaattattatattttgtggttataaggacttgtgaagcttcgaattgtatgtattgtccaatataaaatgattaaaaatgacgaagaaggtttatactttatagttcattaatgtctgttcattttatcatttatataacctttgcctatggaaaatggaagcttcgtgccaaaaaataacattataattgatggctagttcttgtattacgtaataatcgtttatactttattcctaaacttctgtggtcattagtaacgaagttcttcattaatcaaatattttaacaagttagagtgattttttatggtattcaaagcaaacaatcacattaatccactgttagcttatgaaccatatattgcaatgactgtgtcacatagacgaaaaaaaaacaaaaaaaaaaacgacaaattagttgaagaatgatatatttttctcttgagtgtataataagtgagccttgaaattacgatagaaatatcaaacagtatttgataattagatggcagcattaaattaattatatgcgccagttatactatttctcctaacaatgggacccaaatatccgatcagattatttttctagtcaaattagttatcttattgtctgtccattgttcgttgttattgaatcatgtggcatcccctcttgattttgtaactactatttaaattacgattaaacactaaaggtttcttttcatgaataattatcataaaatgctttttgagtcgctatttctgtttcaaaacaagtttattctagttcttatagaacaaaataaaagagattggaaattgaatagctcatgaagagttttattgtgaaaagaaaagtaaaagggtagaaaacttaaattgtcaccttgcttataaataaaaagaaactacatacaccttgcaataaatttggagaaaattgagtaagacctaattaggaccgggtcagattagccatcgaaagataatgtgaaagttaacatcattccattaaacaacaacaaaagcttcacaacattcctatctacaaatggttagttttttgcaacaaaaataacaattaatattcatattcttttggaacaaaagctaatgaagtcaagtcaatcacatggaccgtttcactagaattgttttgtcgttttagaactgtgggacatatcaccacttcaccttacgatacatagaaaatataaaaattcagtagcctcttgcatttgtatttttatctctcaatctcaagagttacatattctcttataaattaactactaatttttttctaaaatacagcctttctttaaatataaatattatattacactcatagtaacattatgggtatacagctaacaaatattagaattgtcgaggaattgaagaaaggtaaaatacaaaacgcgtgggttgaacaaatctgtgaactttgcattgtttaattccatatgtaattagtacagttcaatatgcatgagacagttcacagttgtctacaattgattattatagtgctgcgaatgctagagtctctataaaaatttaaacttacggttatagttctttggagtggatttatataatacactactagttggaaaaacaaataatttattgaatatcatttgtaggatgaaaacaatgatgatgtataacggtctatataatctatattaattatgactctagttggtaacactgaaatgaaacaaaaatgacctactatcatttagaacacgaagacctacaggggaaatgaaggggaaatttctagtttttttttcaataaaatcgtggaatggcggagtttaaacataaatcatgattcccgtgaaatcatatgaatgataaaatttgaaactcacaaatcattaagctatgcaatgtttattatctatttgtaaaatattcttaaaataaactaacaaattagttattttttgttggaaaaaataattaatatacattgtatactacaagtagtgtcatggttacccactcacttctcttgtccgatcaagtcatacttcttcttcctcgattcgtcttcaccatcacattctctctaaatttggccatctcttgatcttttcttgtttaattgtatggtaaattatatgtttgcttagtgagaactttatacggaaatgcttagaggcttctccatcaaatgaaagaagaccttcactcatagttgtttccacgagagttcctcatattaaaaccaacaagcgagagtctctgtaataatcttcaggtatttctatcataatgaaaactttcttttatttcttcacaataagtaatcatcaatatatacaacaaatattaactatagaattactatgtcattttgagagttataattttgttccagagatgaaagtgatcattccgaactttatcaatatcataggttaactaaagttcatatgttattgagatgggtcatagattattgaagatttagtgttcacaaattaaatgtactaatctacttccatggaattaagaaaccatgtacatgcatatatatacttccctcttattccttctatgtgttttctactttttcttatatttttttaactaatgctttgtgtttattcatttttttttctcttacttctgtaatagataaggaatacttcttgtattgagcttcttacaaatataaaactttcattaacgttttggagttggcttctgatcttctccatcaacattcaacaatggcaatgaagatgaagggaatatacaaaagcttcaaatccataatgtttggtataactttctaccatatatttagttgcttataatctgatgattaaactccattatatgatgatctacaaactttctcgcaactttatacaaatatatcgtaagttccagacataaaataacattacgaatttaatattatgctttacaaatgtaaatttcgtaagttcaagtataaccccacaaaacgaattttcggtccattatttagccaatatggtccatgttatgtatccatgggagcattgagtagatgttttatgtgataagtattacaagaacagctattaaatgatgaattttttttggtcaacagttgggaaagaaagagatttggaaattgggcacccaacagaagtaaaacatgtggcccatattggttggggctcctctggcagtgatcctggttgggtaagctctctctctttatctaaatattaatatttcttgttatacttttcaagtctgaactatacatttaaaagtatgttatgaatatgaactcttgaagtatcaaatgatgttttaacacacacaatactgataatctagttttctgatgatgcttatttcaaaatttatttgtttttcggggtgtagatgagtgactttaaggcaggagcagagtttttatctccaagaacatcatctttcagtcatacaagacattcagattctttcttcaccacttctgattccactggtaattttattgctgcgtgcactaaattaatagagtgcataaatattttttagttagagttacatactaaatggaactgtttatcttcgttaaactacagaattcgatcaggaccaactgaatatatcagataggataagagatgtgcctcctataccagtaggtctatccaagattcatactaagagcaagaataggagaaagaaaccatcttcgacgtcatcaccaagatccagaccatctccaaaatcttcgagatcaatgggtttatcgaagtcatcacataaatcaatggtgtctcggttaaactctaatgcataattagagtgaactaaaaagtacaatgaatatacgaaaatcaaaagcttgttcattgtgcaaaagatttttttttttttttttgtagttctcgtgattttctttttttctaagtgtttgattcgtagttctttttttccgtagttctcatatatcgaaaagttctatgtacattgtagaaagacgtaaaaaaataaattattttttgtgagaaaaatttattgtttaactaatttttcttttgtaatatagatgtgaactttgtttggaaatatgaatttttttaaaaaagagaatattaatatagaataaacttaatagcaatattataaaatatttcaaacactttaattttcttaagagaacaaacagtcttcatttttgttttcatattttaattttctttaaccgacaatgtatgaatgtactcttacagcacttatgaggtctaaataataccaaatgattaaatcatattaatgtttataacttactatgagaaatcaattataaagcattatccaagaaagaggcaaaaataataataatgaaaaactctttaataaaaaaagccaagcaatgaacgtgatgcttttggttgcctaaaggcccggcccatattgccaacttgtattatctaacctaatgttactcagtctcttaccatagtccatacaattgcatttttatttatgcatcttgatttactgtgtacatgtaaaaatttagaatacacaacatcttacaaataaacacagtacaaatgtttaacaaaagaaaaacatagtacacatatatatataggccccgagcgttcatcaaatgaggctgagacatatagctttgacggcccgttacttaatcatctttaaagtacagagcagggtgggacaaaattgtatgcgattagttgttgacaaaaaaacatacatatacatatttaattttgtcatctattatatataccattttaatcacatatacaattctgagcttaacaatccatatatggatgatttgatgtcttatgatttttctagaattgtttagttttctagagcttaacaagccgtagatgattggttttcttctcatctacaacgaacactatgtaaattgtaaattattttttaaaatgaaatattaagtttacgcatataattactaaatatgaccaactttttatatgttaggtttcagaaaattcaaaatcgtgttgtcataatttttaacataaaagtacgaatctatttcgatgtaattaaactagaagcacaagttgactatattgatccaattgtcaagtaacattcttatttagggtatatacactcactaatatctcttgcaagtaatcttacattagcatttatcttcactatatgattaccggtctcctctttataagcaaccacagttataaaaaaaaactttaaacaaaaaaatagctttcacaactaaccattatagttaaaagaaaaaggcaatttcgaaaataaagcttagtttcttatttgacatattaaactttttagttttacattgattctgaactgtacccaatttttttaaagcttatcaaagaaaaaacaagaacaaaacgatgcatagtttctaaaatgtgctaaaattcagaaactgaaacatgattcattgtctgaaactttgtttcaaattactgaaaataatcattcactggaccaaaacaaataaataaaataaaatcgaatttctgaatttggaaattggtttttggtttttaattttaaacaaaacaaaaacgaaatttgaaggcaataaatgagttagttggtaggcagaagtcactcgttcccactagctattattattagaagaaacgtccccacaactccaaggcgtttcagttcctttaatttactgaattaccctcctcatatctataaaaaatcacctcttgtaccaatgccccatttacacatcctgtcgtttatttctagactaagtggactacatgtcggttatttgattcgcaccatgcgtatttggattatcgctaacacaccccttcaaacaatacgcttaactcgtattacaaaatttcaagtgatgaattatctatgtataagatatagataggaacaactaagcatcgagaaatttgtatataaatcaactagacttatatatatttcgatacagaatttatacgtattatatcaaattaattagtaattgtttcctctacgtgagtttaattaacaatgataagctacattgagtgtatcagttctaaaactttatagtatgctacaatcaatttttctaagtaacaacttcaagcaaggaatcacacacacacagtggtacataataaacttgattttaatatcatatgatcagcatcattaacggaataagttaagtaattcgtcatccatactactaagtcatattaaaatcataatcaaacttaaaagccgattagaaagagagcaaatatatctaaaaattcacgaggaagacgacaaatgcaaggaaacacagctagtattattaaacttaatagatattggatgaatgactgcataatatatatcacattaaaagtggacataaatttgcatatgtgtaatgtacctctccacaattaatcgcggaccatttattttactattacaagtcaagtaactttatattgttgatccataattcttttcgaacataaaatcatatacttaggccattttcaactgtcaaaactcgaatccgagaaccaaatttcaccattttccaaaaatgatgagtgtcgaccaaatggggtactactgtctaatcaggaacttgtgaacaaattttcaaccttttccaaataagacgagtgtcaaccaactttttccaaccaagagatattgggttgctacacaaatacttaatagccattgcatatttatgcatatgcaaatgcagggtcgtggcgtcagaaagaaacataggaccctcaacatatttaatattttgggagctatatttgactatttcatattagaaaataataataaaaaagtgttggttttatatcaaattgtaatttacgaaaaacttatgcttttgcgcaatgatttttgtaaagtatctactatgtttagtgtttacattgattagtaggctgccgttttttttcttgtgtattatgtactatatatgaatatgaacatttgtaaaagtgaatcttgtcattttcttgttgaaaacatatatagtatgtgcaaacaaagcataggttaatccaataccacacaaataacacgtcaggtaaatccaataataaatcgtatgtgcatgtatgtgtattcatgtatgttacatgaatgtctgaatcagtcagtgtacgtatatgatgtaggtgatgtaaatcttaatgtatgagctgtttcttggaccatggtccacaatggatattgctccccaactacattagtcaatcgactggccaatttttaattaagataattaatccaaactaccattaaatataactttgaccttttttctattcatttttagatattattggaacttacgtagtttacatgcatctcatccctttcttttgctccttgaaagtgggtccaatcacaaaaaatgatcttatattttgtattttgtattttaaaaactcataattatataggttcaaaaatttaattaacatcagtgtatactataattactactctagccaacaagataaattcattttgacatcagccaaaagataaaaatttggttaaaaactattggattagcttttagtatttaatattttatgtactgattaaatacgaatttagaaatctaggatataagtgagggtgtataataagggaggggtggaccattaatagcgatgtgcaattaaaaattatgattaagaatctaggaaatttgtagattgcttagttatttttatggcgatcgtcgtgtcaatgtcatggattttgaaactttaaattaatctcttaaattagcacctacctttgaattttatagaatctttttattttatatgtttaattttatagaatctaactagcttattttgagattaaattgtttagttacttttataacagtataaatgtataatgaggacctaagaatgtagtcctgtaatgttcttgctattctacttaatctcatcaccaatcaaccatcaaaagaagctagtactaataaaacctgcaggtattcgaataataattaagctcaaacactatactaatttatggaggattatatattcaatgaattaggaacctcatgatggacattattgactgatataatgtgtatactaattgtgagtatttaaaaaccatacaaagcatttatatgtccacatatattggacacacatgcaatcaatgttcaatatgctccacacacagaaataaaaatactctttctgatcatatgatacatcatacatatactaaaaaaatctaaaatgaactataaccacaagcatatataataacaatgaaatggtaatgtttcttcatttttatttgttcaaattcttattcggttgttttttcttaccctacgagaatccgtgaggtcaaagggaaacagtgattttttttttgtattttgttttttaaattgatgaactgtaaaactctctctctagaaaaatatataagtagtagtatgaattttctctcactaaaagcattaatggacctttcgataatcataaatgcaatgcaccctctctatgcatttcgcaataactccttttccttctgccacatcctcttcctcacctctttctcttcttccctttctcctaagttcctcctccaccaaattctccatttatttcgttaactatcctccatttgttttcttctgaagagtgatatattctacctttctctggttaaagaaactccctgaatccaccggttatgtcttgaccggctataagcctataaactgatgccctaagacacctttttaggtttctcaataattctccgcatctatcttttcttctccacaagtaagagaaccagaaaaccagagaagaagccgagctagctagggtttcattgtgtgcacaaaagtaagatctctctctctaaccaatacttgtgtaatttgtctttgtttctttgagcaaatattgcatgtttgttcatattagccggatccgttttatattttttcatgatctacattttatctttattttgtttgtaaattaatgagttttttttttttttttctgtttttgtcacgatctaaaaaacaagcgttacaaagaagaagaaaaacctttttggagttagaagtgtaaaaggggtttcagtttgacgaattttccttagtagttgtgtaaaaaaaggccattgacttaatgtcaactctatatatctacacatttttttattaattagtttttgtttttttcccacttcatttacctttagtcaatgaatttttactgaaaacgttttttcaaggtcaatttcactgagttaaaaaaaaaagttttatttttaaccaaaaattacgttttttcctaggcttcggtaacctgtgaattcctctatctcactagcttttatgtagaagagagagaaggcaacattaaattcgatctaaaacttcaagaaaccaaaacaacacttcaaaaaaaaaaagagatctgttctatagagttttaatcttttctttcgactcgagtttggctcaacaaagtttatatcgatttggcactctaaaatgtaagtagaaccaaatgaatcttgtattttatgtacgttaataaaaaattagggtttcctagacgacaatctcgtcatccgtttcttctttgtctacctctgcgttttcttgtagatccgatgatgtgctcagtcttgtgactttcaagattgattttatcgttattgtttgaagatatgtggtttgattattttctcaacacattgtgtccttttagcgctttacttcagtttctctctaattttcataatattattattgaacattatgcttaattattcatccgaatattcgtgtcccattttttaaattgaatttcaggataacttgtattttatatgcaacgaggttatgtcacgtagtgggtgcatttatattcataccctttttgataagatgaatgcatatgcttatataagcgtataggtataaataaccatcaaaaatagagaaaaagaccaatattttgcttttcggttacttatgaaatgtgaaaaagaccatataaatatatctattaaagggaagtatagtttcataaaatcttgaggattacattccataaaccaagattaccttccgtttttgctttgatcctcttcttatcaaatatataaacatgaccatttgatctttcattttggatagtgggatatacaggcagaagaaaatcgagataaatcaactaaatgatttggataatcatcttgaagatttgaaggaaaatccaagagcttcaaaaactccaaaaattgataggcatccatcatcatcatgtatcatccaaacatgttcgaatctcatcatcatatgttcgatatgacgccgaaaaactccgaaaacgatttgggtatcaccgggagccacgaagaggatttcgagactaagtccggcgcagaagtcaccatggagaatcctttagaagaagagcttcaagatcctaatcagcgtcccaacaaaaagaagcgttaccaccgtcacacacaacgccagattcaagagctagagtcgtaagaattttttctacttgaaaatgtttttattgtttttcgaggatcacttagggtttatgtgtatttgtttgtttggttacggttttaggttcttcaaggaatgtcctcatccagacgataagcaaagaaaggagctgagtcgcgagctaagcttagaacctcttcaagtcaagttttggttccaaaacaaacgcactcaaatgaaggtatttttactatatagtatatatatacttcggccaattttgattattaattctattattttcatttaccggtctcgaatcttcaagagagttatatatatatttttcagaataatcaaatgaatttgatgtgtatttccaaccacattttgatttagatactacgaagccttatttaaacacatgtacttagctagttccaagattaagttcattttgtcaaaagatctatccatttgttttggtatatactcttgatgagaccaaacataagaagatatataacattgggacttgtataggcacaacatgagaggcacgagaaccagatactgaagtcagaaaatgacaagctccgagcagagaacaataggtacaaggatgctctaagcaacgcaacatgcccaaactgtggtggtccggcagctataggagaaatgtccttcgacgaacagcatttaaggatcgaaaatgctcgtttacgcgaagagattgacagaatctctgccatagctgctaaatacgtagggaagcctttaatggctaattcctcttctttccctcagctctcttcttcacaccacattccctcgcgctcgcttgatcttgaagttgggaactttgggaacaataacaatagccacactggtttcgttggggaaatgtttggaagcagcgacattttgaggtcggtttcgataccttctgaggctgataagcctatgattgttgagttagctgttgcagcaatggaagagcttgtgagaatggctcaaactggtgatcccttatgggtttcaagcgataattctgttgagattctcaatgaagaagagtattttaggacgtttcctagaggaattggaccgaaacctatcggtttgagatcagaagcttcaagagagtctactgttgttatcatgaatcatatcaatctcattgagattctaatggatgtggtataattctgttactctaactctgatttttaaaattttaacaaaggttctaacttatagttgacacttttgctgttctttctctgtatagaatcaatggtctagtgtgttctgcgggattgtatcaagagcattgactctagaagttctctcaactggcgtagcagggaactacaatggggcattgcaagtggtatgacactcaaagaccttgatttggttacttgctttacaaggtattattcttaatcatgtagtgagatttctcatgtgtttgatctttgttttcttggtatgcaaaagatgacagcagagttccaagtcccatcgccgcttgtccctactcgtgagaactactttgtaaggtactgtaaacagcacagtgacggtatttgggcggttgtggatgtctctttggacagcctaagaccaagtccgatcactagaagcagaagaagaccctctggttgtctgattcaagaattgcagaatggttactccaaggtaaacttaaggtctaaattgataattttaaaagtatgaggttgagaatttgaaaagaagagaaatgattaggtgatggttttgttttgtttgaaggtgacatgggtagagcatattgaggtggatgatagatcggttcacaacatgtataaaccgttggttaataccggtttagctttcggtgcaaaacgttgggtggctacacttgaccgccaatgtgagcggctcgccagttccatggccagcaacattccggcttgtgatctttccggtatgtacaccacaccatcaaatgaaaatatttttagggtcattttgatcaatttgttaatattggtattaaattgaaaaatattaatttactaattgagtcccttaactttatggtaattatgaaagtgataacgagtcctgaggggagaaagagcatgctgaaactagcggagagaatggtgatgagcttctgtaccggagtcggcgcgtcaactgcgcatgcctggactacattgtcgaccacaggatccgacgacgttcgggtcatgacccgaaagagcatggatgatccgggaagacctccaggcatcgttctcagcgccgctacttctttctggatccctgtagctccaaaacgagtgttcgattttctcagagatgaaaactcaagaagcgaggtaattaatactcaagtcataaagaggccctttttgaaaaaaagatcgataagttacttattcttgagttcaatttttgcagtgggatatactttccaatggaggcttggttcaagaaatggctcatatcgcaaatggtcgtgatcctgggaatagtgtctccttgcttcgagtcaatgtaagtaatgttcttgaaatctagtagtttctgtataaccccactgttgcttgtgttcaaagtctcaacattttgtttgtttaaaaacagagtgggaactcagggcagagcaacatgttgatcttacaagaaagttgtacggacgcatcagggtcctatgtgatatacgcaccagttgatataatagctatgaacgttgtcctgagtggtggtgatccggattatgtcgctttgttaccatccggattcgctattttgccggatggctctgctagaggaggaggaggtagtgctaatgccagtgctggagccggagttgaaggaggaggagaggggaataatcttgaagtggttactactactgggagttgtggcggttcactactcacagttgcgtttcagatacttgttgactctgttcctaccgctaaactctctctcggttcagttgctacagtcaatagtctgatcaaatgcactgtcgagcggattaaagccgctctggcctgcgacggagcctaatcgatgttttcgggtaagcttttttctttatgttttcatctatttttggataatcacactttcttgatatgttttggtttgtgtttttgcagaaggtaagagtgaaaggggaggtttagggagtttatgataatgtttgtggtcttttgtttttttaagtcttttgagattctccaaaggaagtcaagaacgcacctttttgcgtttaatctcatttccgcgtttgttagcggcgggccgaaaaaaagaggcttgagaaagaaaaggtaaagaggttcgggtattgacttctgctggaaccaaaaaaaaaagaatcgggtttgttgtgtttcggcggtttagcgttttgcgttttctttgttattatttatcattgactagtgaacagtttagcgttctgcttttcgcgtctactgtgaaactccttgttattaagccactctagtggtactgtcattatatattatgaatctatgaaactgtgtttattagtttgtttctttaatccaaacttgagattctcttctactttttacatctctttcaatctgtttcaatatgaccaaaaagaatgattttacagaaataaatatttgtccttatattgaagaaaacaatggctacaaataatatactaatcagtgagctttgtcatgttctaataatttaaaagatatctatcgttgtcggttcttgcaatctaaagtcatattctttccaagtgacagaaggaaaattaacaattgaattaatctcaacaacacaaattattttgttggcccatcaaatctttattactattttccattagtcagaattttgaaaatttcaaatcattagcaagctggtttggtgaaatatcattgtcaacctaaaagtgaagaagccactcatattccttttctgtctatataacttataatctcgaacacataaaaaatgaaaaatctttagtttctgaaattatggagaccaagtcatcaaaatgaaaaaatctatagtttatgaaataatggagactaagtcatcaatgtacctttctcagttccgactttggctctgcttcatcatcacaaccttggtctcattgtcatcttcaacaagatggtatgatgatcatatctcattgaaagagattcacgcagaagaaactttccattttccaaaaaactttctctttggcacagcttcttctgcttaccaggttcttagttcttctttcttttttacttcagtcctcaagtataatacaatcttgtgttttaacattagttttgttgtgtgctcttatggtatattcagtatgaaggagcttacttaactgacggcaaaaccctaagcaactgggacgttttcacaaacatctctggtaagatctcatgaaaccattttgtaaattgtgatttaagctataacaaaaaattcaaaacttttagggtttttgttaccattcttgtctctcaagtcaccataagaaactgacgtatacctttcttgatatatctttgtacaggaaaaattgcggatggaagccatgggaaagtcgctgttgatcattaccatcgatatccggtaactaactgtaaatctatacatcaaatatcaattttcgatacaaatctcacagtaataagtgtctagcaagaaacaagttgtaattcttacgttaacagggagatttggatctgatggaagatcttggagttaatagctatcgactttctttatcatgggctcggattcttccaagtgagattttattttttcatgtatctatatatcaaactttttttttgtgttttcaaaaacttctgtttgttttcccagagggaagatttggagatgtgaacatgggtggtatcgatcattacaacagaatgatcaatgatattctcaaaacaggtaataattaaattttcttgagaatatttctcaagaccaagataagaaaaaaaacaatacttagcacaatcattctcaggaatcgagccatttgtcacgttgacacattacgacattcctcaagaactcgaatatagatacggaagttggctaaacccccaaatccggtacgtagatacacacacacaacacatatgtacaagtagacacatacagtacaatgatacactgaaattaagataattgttggtctcagggaagatttcgaacattacgcaaatatttgcttccgacactttggagacagggttaaattctggtctactttcaacgaaccaaacgttcaagtgattttgggttaccggacaggaacttacccgccttcacgttgttccaagccttttggaaactgctcgtgtggcgattcttacatagagccacttgtagccgctcacaacattatcctttcacatttagccgccgtcaacttataccgtacaaaatttcaggtatatcaatattgttaccgtgtgtgacaaaaaaaaaataaaaaataatcaatattgttaccgtgtactaaatatttcaaaactcttttaatttaagattggtttcgtttaggaacaacaaagaggacagatcggtattgttatgaacacaatctggtttgaaccgattagtgattctttagcagatagattagctgctgacagagctcaagctttctatttgacttggtaagctggattggttttcaaaatattgttcccaccttagcgccattaccggggttttgatatcgaaagagtgcgaaaaatgcaggttcttggatccggttgtgtttggaagatatccaagagaaatgcgagaaattcttggcgatgatcttcctgaattcacgaaggatgatcttaaaagctccaagaatgcattagacttcattgggattaatcagtacacaagcagatacgcgaaagattgtctgcattccgtatgtgaaccgggcaaaggaggttcgagagctgaaggttttgtctatgcaaacgccctcaaagacggtttacgtttaggagaaccagtaggtagaccaaccaatcgaaagtaaaactgtttagaaacatttctgaggtgtttgattatggtaatgatgcagactggagtaaattggctttctgtttatccacaaggaatggaggagatgttgatgtatgcaacagagcgatacaaaaacattacattgtatgtaacagaaaacggtaagcacgtcggcactcgtctttgtctctgcaatttctgcgacagtttttgatctcatcaattttgcaggttttggtgagaacaataccggagtattgttaaacgattaccagagagtgaagttcatgagcaactacttagatgcactcaaaagagcaatgaggtaattatgcttcaacttcagaaaaaactcatatatgtctcgattctaaaccctaaagctacttgtgcaaataggaaaggagcagatgtaagaggatacttcgcctggtctttactagacaacttcgagtggatatccggttataccataaggttcggtatgtaccatgtcgatttcagtactcaagagagaaccccgagactgtcagcttcttggtacaaaaacttcatcttccagcacagagctctatcaaaagatgattggtgcctgaaacaaaaggaagacacaaatttctttcttatttgattcttccattaagtaggagagtaatgtaatagtaagctgttttgtagaaatcagttccaataaacaagacatattccttgtgtataacaaaaagttctttacctctcatttactgcggcaagtttagataagatcctcgacatcagaacatgtgtttcatctccaccatggagtcccagcttcatagaagtgctcgccatcatcatcgtcccatgagatttgacaagcttgaagaccgattcctaccctcggttccttgccatgtctatcaatccattcggcaacagcggtttccttttggttctcctccattgtgtaatgtttctttgctttcccatacgggttggtatcaggattccccatttctgcaatcgctgctggcatgtacatagagtcaccaaccaacggtgccccacaagctgcaagctgggcccggatctgaaaagccattcaacatagcaactggatgatcccaacatattcatatgattatcatgtctattaggatatgggtcgatgaacatacctggtgagtcttgcctgttaaaaggtttattgtacactcataagcaaactcttttgaagtccatccacagtcttcaatatcgtgtttcttctcagtagctgcatcgggccaaggaatcttcttacattctaaaacctcaagttgacacaagtgccagccttgaattgaatctgcatttcaagaaatattcacatcactaagaagatccatagcatcgaatattcaaaatatgttctgatgatgattcttgacatttctgtagtgtttaccttcggctacgagtcttggagccatattttttgggcgcatataatgtgagataattccaatgggaagaggtgccgcagcaagagcacgatatagtttcttcacttctttattcttgaaaataagaataaagaacaaaacgtattgaaaaaattaactaatcagcacagcttgttcctgtttccagtcaaacagcattgtaaagcaaactcactcttatttttgtgtggaagaccgagcagtactcttttgttctagcaaagacgacactgtagagaaagaaagcaatttaacctggtcacttaaaagatgttaacttaacaaacttcaaagcatgaaaaagcttttacaggacagtaccagccttctgtacagttatcaatctgatgcgttgttttcagtggttctggtaaatccaatgcacgtgaggcaaatgtagcacagctctcttcgatgttatccgtcgtgcccccaacctgataacattccaatgtaggtcaacacattcaatcgctaagttcagtacttaaaccacaatcagaagtttctaagaaattgatgaaaagaaatatctctgcatacccaagaaatggaacacaataaaacattttgatagtaagttacagtcacataatgtataaaactagtccaacaatatttacaaggtgaagtactttttttgcaagatatctaatgcaactacaatggtcaagaatattgaaaagaaagcctaatggatatattacacaccgtagtcccggcaggtttatccaaaatgacataagagtcagtcacagcaacaatccgtgacttccaatcaatttcataacacctgataaacaacacaccctcaagtcaattgacaatcaccaaaccttccaatttcaaaacacattccttaaaatatgtaaataccttggagaacgtttcgggtgaacatgaacacgcaaataagttccagcttcagcatactgattggtatgagtcacacgaaacgttttctgagcttctctaacagtttttcctttaatagaagatctcttctttagtacagaaggagaggttacttcttcaaacagtataatttcctcaggagtcgcagttggtggaggtttaggacatacaagagcgtaatgtacagctccaaatcgaataagatctgcaacatatcttcatagaatgaaaatttttttatatacactccattccaagctctaaacatacgagtacttagaccacaaagagttagtgacttacaaaggaggaagatctaattgtttagagataaactcagatacaagaacgtcgtcttctaacacaaccatatgttcaattcttggtggaagattatatgcaggacatggcatcaatcgattgtattcatggtatctgaaaaaaaacacatttcacagtaaagtatcgaaatttgaacgaattgaatcaaaagaatcagactttaaacatacccagaattggaagaagaagagagtgtggtttgattttgagaatcggttttgagtaaggacaagcaagtgaatctctttggagaagaaatgaaacgtggagagtgtttgttggaacgaaacaatggagtagtgacacgggtggacgctaaagtacgcaggagagataccggcgcagtgaggttccggtaaccgccggttaacgccggcgaagccattgttgatgctgtggtaaatgccctaagaatcgttatcgttatagcgccaatctactatttgggccgaactgaatctttgtattgggcccatttgagaaacttggttcagtgataaatttggttggtttggtggttaattccggtttgttggccgtctctagtttgtttgtgggattgatcgaaattattatgttccctgactttatggtaaaaggagaaacatactaatctaagtgaaaaataatctacggcatgatagaaggaaaaatagttgaattagcccatcatgatttaaatgttagagaaaggtcagattactgtataatggatttaaataaaaagttgggtgtagccaaaaagaaaatgtaggttgttcgaatattgtagtctaatttaaaaatagttttatgtaatttatcaaccgaatcatattttgtcatttctctaacaaccttgtgtcattgtatttgcgttgttcggctgttcattttggaacaacatctctacttctatattcgcttaaaatcctcaatcttcgacatgtctttgttaaaatgtccaaaataatatgcatttatctatacatattacgtctaaaatgttgatggaccgatcctagtagtcttttttattagaaaaatataaaagttaacagtgagattatatttgaacataaataatcttaaatacagtaaaaggaagaaaatagataaagaaatgggatgaccaaccaacaaaagccatcacctatcatataaaaagataatacattttctactactttagcttcaaggatcttaataacacttcgttaccacttgatcaagagaaacaaaaagaaaagctgttcataaaaactctctatcaatggctgctccaatcgccataggaacacgaggaaccatcggatcgcttgtacgtaaagaaatcgactacttcaaaaacttctctacatgtcatccccaattcgatccacggagaggcaattcggaagaaaacaaaaatacatttaaacaaagagatcggtcatcatcacggttgggttcttggttctctaaaactaaatggagaaagaagaagcggcagactcgtggtggcggtggcaagttttttccgagtatgtgctcggcggtggaggtttccggcgagaatcgagttccgggtttcaactataggatcttgaagagtgatcatcagaagggcttgcgtgtgtagaaaggagtcatcatttatgtggattacggtaaagacaatgagatctacatacagtttttcaaatttaaaataatgtctcattgtgttacatacttacaagttacaatgtcaatgagcatatattcgaacttttaaaatgaaaaaagaaaaaaaagtttatgctcaaggaattcctttttcgtttgatccggtctggtctatattcaaatttggattcggttctattcccggtttaaacgtggtatatcgtcgaatacctttatattccacatatatatggatcctacgtagcacaagtcaaaagtcaatcttcaaatgctcgagtactttattttcaggcctcaactttgttgatgctaaaacaaaattgtgcttgtatatattttttactctgaaactggtcttgttggaacagtgaacatggatttgaaggtgacgttatacaaaacttggacaagagctcacatcttgaattccaaaaaagagacgatgttatcatatttgtcacaggtgactaagattttgctcttggctctgtacgtagtagccacctgattaattcatcaactagagtttgagagcacacaactccaatatggaccactaatgaaaagttccttagctcttgaattctggttataaaagatcttgttgaattttgtgggtttctcagttggttaatgacttcaacacgcttatggagctcgatacaaggagagaagaaccattgcttcgattccgagatcatagtgttggatacttaataatcttcacacagtcatgtacaacacatagaatccagagatcaataagagaatggagcgaacgtattttgatggctgttgagttcaactacagcaaactcttgctgtctctatacaacaagaacccgtagtttgcgctgcggtggtctacaaaattatgtcatggcttggccgttttcggaatgctaaagatttgtctagttctgacgaaatttgaggtggaaagtgatgatgaagccacatggacggtcaaaatcgaaatgattgaaatttttgtttataatacacgttctacgtttctttcattagattctttgatgaattcatcagtttttgttcgtttcattcttttgttccttttgtcgtaattttaaacggaataatactatgattttatgaaccttatataacaactaaaagtgtccgaacaagcccttattgacgcacacacgtttttatgtctacaaaattccggatatatcaagcaagtatcatcaacacgtctccaacactcatacacggtcaagccgcctacctaactcaccttgttacaaaacaatatcttatggcatgtgttacacgatttcaaatatgtatatgaataatttataattcttaaatcttcatattactgaaattaactcgttttaacagattgaatgaaaatatatattatccttcatttgtattcgttttttttttggtcacaatgacaataattctactataagaatatcgaaatatatatggagaattccttaaagattagatagacctaccaattaaaagctgctggtaccactaagttttagttcgaacatttgtattaaacccaactctactcttttcgcattttccatctagaataacatctaaaatatgtctataatatatttttatggaaatagataaataattcataattattatatggtgacaaatcaaattaaaagacgttttgaaacttcttttttgactaaacgagctcacagttctctttctcatcacatctctatcattagaaaaaaatattgttaataatgtacatgtttttttttctttttttggggtcaaatttggattcactcaaaatagttaaaacatagaatcccatgtatcaaaaaagaaaaaaataacacctaaccctataaataaaagattttatacaataaagatcttatgtttttttatcagagaaaaacatgtcttgtttttataattctgacttcttagtaacaaatcatgcatatatgaaattcaacaaatttgaacccaaaaatagagaggtgaaatattaaatgaccaaaacaaatgataaaataattcagaggacgtgtgagggaacaagccagaagctacactatcgaaaagatcgcatcaatctcaaccgttggatctttccttcatcatcatctctctctctctctttctcttccatctgacctgtgatgtgagtttgcagatattcaaacaactcaatcctcattccctttgtttcgcctctctggatttcgaagagctgagagattagggtttctcgattttcgagattagagtctaatccccaccaccagcatagctgatatcctggaggagagaatgacggattcgggtctaatgatgccggcggagattgctggaattctaaccacggcgattacgagttggtgggatgatgttaatgagtcaactcagtggcaagatgggatctttttcgctctttgtggtgcttatgctcttgtttccgccgttgctcttgtatggctttcaaatttcttcgtaatacatgaaattttttgtttgggagtgaaattagttttctaaaaatgcttgcttttaggtttatagatcaatttcttagcgtgtttgacatatctttcctcttctgtttaacaaaagaggtgacctttgttgttgagacatcgttttctatctaaatcattgagctttgaaatacttactcattgtatagtttgattgattgtttctgtagtttatttctgggtttagttagttgtgttgcaatttctgaccttttgtttgaaatgggattatgattggtaggttcaactgataaggatccaaatgagagtgcctgagtatggttggactactcagaaggtgtttcatcttatgaactttgtcgtcaatggaggtgattattgtgtgtttctattgaccaattgatagggtttttgtgtttgtcagcacctttgggattatgttttgttgaatttctctgttgtgtgtgtgcagttcgtgcggttctgtttggatttcacatgcaagtatttcttgttcatcccaaggtgagagtgttctcaacttagttctggtttttgcatgtttgatttggaaatggtggattttgaaagctgcatctttttaagtatctaatgtttctgtgaggtaatgcaggctctttgctgggtactattggatcttcctggccttctctttttctcggcatacacgctgcttgtgctgttctgggcagagatatatcaccaggtacctaaaaagaaatttttgatgtgtgttgactgtcttttaaacctgccaacaagctctgagtatatattttgttgccactaatgagcaggctagaagcttacctacagataagctgcggataacctatatttctgtcaacgtggctgtatatttggctcaggttcatatctgatttttagcttcttttttttttaattcccgtttatgttgtagttgctgagtttcctgagatccatttatatacatcttttgcaattattggtgtttcgaaactgtagattgtgcgtgtttcctaccttgtccttctttcattaactctgtaaccattctttgctaccaagaatctgtgtgaccttagtcactagacattttaggtgaatcaaaagatgtagaataagtttgacatgtatttgatgtctctatcagattggtatctgggcatacatctgggtacatgataacagcactgtggagttagttggaaagatatttatcgcaggtaggttctttgtctggtcaagcaagtttgctaaaacctttactgcttaatctataatattccctctcttatctaaaatctatattgacctattcttttggttaatcttcttcttctagttgtgtctttcatcgccgcattaggcttcttgctgtatggaggaaggtctgtgtttttgttattttcatatgtctcatcatcaaaatgtctgcaagttcttcattggctttactgggccgtcttttcttatgtgtttttttttatgccatagattgtttttcatgctaagaaggttccctatcgagtcaaaaggaagaaggaagaaactccacgaggtacttagattcatatatctgtatgtgaataatttgtcttatatagttccataaaactttgaacccaaacatttctaccttcaaatattcgtctcttttcattgcaggttggatctgtgacagctatatgcttcacctgcttcctcataagatgcgttgtggtaagctcaaaattaaatctttagcttccgtcattgttttagttatcctgtgatgtgttatttaatgtattccatgcaaacatcaggtggctgtatcagcttttgacaaggatttaacacttgatgttcttgatcatccggttctgaacttaatctactatatggtaagtaacactacatcttcattctttctctttcttattctcattcattaactcgaaaaaaaaaaaactacaggtggtagaagtacttccatcggcactagtcctcttcattctccgaaagctacctccaaagagagtatcagctcaataccatccgatccagtagaaacctttgtcactgaaccatctcacacggtgagtatgatgctgtttaagagaagagtaaagattaaaaaaaaaattggggcaaaaaatgaaaggtgaagaagaaatcggtgtggaatctgcgtgagtttttggaatgcacgttcatataaatgattttacagcttttagttgttgtagcccgccgtgacttttggtttggtagtttatgtctgttaaaattataaattgctcttctgctactttgaaaaatctggtcagtagtacaagaggtttaacatttgttgcgtcgatggttgattgttatgttatgtttggtaaaaaataaacgaatgctcttctccagtttcctttatgcttttgtcaactgttacatcttcttctcctaatgatttgtatatacttaagcttttccataaaactaagtcccagtgaagaaagaaactacgtaaaccgagaaaaccaagcaaaaagagggtttacacaacataaaatgattaaattgagaatcatttgcattacctcggtattacatgggctggaaataacttattgggccttggacctgattttccaaaaatggtcgctcacattaatatttatatgtgattttacagtgacaactccacaaatcagccctaactctgtttttgttttcttcgacgactgaggtcttttctctctcgctctcgtcttcctcttgattctcttcttcttttctggagtttcgctgcttttttagcctgtaaaaatgacgaaaattttgtatgaatttgtgtgctgatatgctcgaatccacatgttacgcttgtgttgaataatcatatcatttggttatcgaatcaattctagttccaatttacaaaaatctatcaaactctttacgttttctggagtatgttgagcttgaaactagtgacatagatgaaacattaaaaaaacatggaattgttaagtttgtgaaaattggattcgtctttgtgattctttattctttgtctttgctgtgatatataaagattttgtatagaacaacaatttgggagatggagacactgaaattgctgtatttgggattattggcagataaaagattcatacaagaaaaaagcaaatttcgccactgatggatcctatggagtcgtctagtgaacaggtgatgagttcatctctgtcactttaatggcttttactattggtttatctgcttatacaatcaaaatgatatcatggtactgttttagatggtgtttattagcctaagttactgtaaaataacaaatgaaaaaacctctgaaatgaaattgtatttgttgtttttacttttaaaaggacattgttgaagagagtcaaaagctggttgactcattggacaagcttcgtgttagtgctgcgagttcatcttctaatttcaagaagaagcctatcattattatcgttgttggaatggcaggtaataatatcatttctcactaatgttttaagttttggtttcctgtgaagggatttcattagtttgatcatgtgagatgtttgtttgttatatgtgtaggtagtggaaaaactagctttcttcatcgcttggtctgtcatacttttgattcaaagagccatggttatgtggtgaaccttgaccctgctgttatgtctctaccatttggtgccaacatcgatataagagacactgtcaagtacaaggaagttatgaagcagtataatctgggtcctaatggtggaattctcacttcactcaacttgtttgctactaaattcgacgaggtaaacatacctctggaattagtccagatgattactgatttcttctcacattgtgttagttctctcggttttcattgattgatctgtctttgtttgctacttgttttaggttgtctctgtgattgagaaacgtgcagaccagcttgattatgttcttgtggacactcctggtcagattgagatctttacatggtctgcttctggggctataatcactgaagctttcgcttcaaccttccccactgttgtcacctatgtggttgatactccccgttcctcaagcccaatcacttttatgagcaacatgctttacgcttgtagtattctctacaagactcggttgcctcttgtcttggctttcaacaaaactgatgtcgcagatcacaagtttgctttagaggttaactttctttaattgcctactttattattattgtgttgtaatatcttctctttaatcctttggtactgatttggttttatgcagtggatggaagatttcgaggtctttcaagcagcgattcagtctgataactcgtacacggcgaccttagctaacagtctctccctttcactctacgagttctaccgtaacataagatccgttggtgtttctgcaatctctggtgctggaatggatggcttctttaaagccattgaagcaagtgctgaggaatacatggaaacttacaagtaatgatgcattcttctcttcaattcaccctcttttgtctgcaagttctacgctcatgatttgtgttttacttcagggctgatcttgacatgagaaaggcggacaaggagcggttggaagaagaaagaaagaaacatgaaatggaaaaactaagaaaggatatggagagttctcagggaggcactgtggttttaaacactggtttgaaagacagagatgcaacagagaagatgatgctagaggaggatgatgaggactttcaggttgaagatgaagaagacagtgatgatgccatagatgaggatgatgaagacgacgagacgaagcattactacctatgaattaaactcaaagaccaggcttatcaagacgcttgtactggttttgtttgcgtccttcccttgttgtcccagttgtgtagttaaaacataagaattgattctctttgtgagacattgtctaatgatctaatgacgaaactataaactagcacttttgaagactttgtacacaatttgagttcatatgcacaaggaggaaacacatttgtatcggacaagaaaagcagacagaaaactagggaaaaaaatcagagccaacactatctcacttccacattatccacaactataaaggtcaagagtcaataacattatctgagtacacttgaactgtgcgttgtggctggtgttttgtggaggatcaagattcagtcttggtggatttcatcaaaaggcgcatgagcaaatctcacatcttctggccttgcaatcacgactggctcatcagcaaatagggccttgaggaaagatggagttttcaagggacgtcgatccgtcattcggggatacacaaatgccaagaagtagtatgcgtggcccgctatcattccctataaatttggataaaggttacggataaggatgatgatgcacagaaagggaagaagatatatgtgaaagcgaattaggagagatagcgtaccagaaaatccccccatgcacttgcaccaacaaggatagagaatccaagaagtacctgtaatttcagaatttggtaaaagaggcgatttaaagcatcaaactagttagggaacttccgtgaagagaatgcaaaagtccaactaacccatggtaaataagctgctgtgaaagtgaagaggccaaggaaactcatgtggatgtaaggattttgtttactccatacatagacctacagaacataggaaaagtgttatagatggtcttgagatgaattc

SEQ ID NO: 609 - DNA, 83029 bp, Arabidopsis thaliana
aagcttcgtgttagtgctgcgagttcatcttctaatttcaagaagaagcctatcattattatcgttgttggaatggcaggtaataatatcatttctcactaatgttttaagttttggtttcctgtgaagggatttcattagtttgatcatgtgagatgtttgtttgttatatgtgtaggtagtggaaaaactagctttcttcatcgcttggtctgtcatacttttgattcaaagagccatggttatgtggtgaaccttgaccctgctgttatgtctctaccatttggtgccaacatcgatataagagacactgtcaagtacaaggaagttatgaagcagtataatctgggtcctaatggtggaattctcacttcactcaacttgtttgctactaaattcgacgaggtaaacatacctctggaattagtccagatgattactgatttcttctcacattgtgttagttctctcggttttcattgattgatctgtctttgtttgctacttgttttaggttgtctctgtgattgagaaacgtgcagaccagcttgattatgttcttgtggacactcctggtcagattgagatctttacatggtctgcttctggggctataatcactgaagctttcgcttcaaccttccccactgttgtcacctatgtggttgatactccccgttcctcaagcccaatcacttttatgagcaacatgctttacgcttgtagtattctctacaagactcggttgcctcttgtcttggctttcaacaaaactgatgtcgcagatcacaagtttgctttagaggttaactttctttaattgcctactttattattattgtgttgtaatatcttctctttaatcctttggtactgatttggttttatgcagtggatggaagatttcgaggtctttcaagcagcgattcagtctgataactcgtacacggcgaccttagctaacagtctctccctttcactctacgagttctaccgtaacataagatccgttggtgtttctgcaatctctggtgctggaatggatggcttctttaaagccattgaagcaagtgctgaggaatacatggaaacttacaagtaatgatgcattcttctcttcaattcaccctcttttgtctgcaagttctacgctcatgatttgtgttttacttcagggctgatcttgacatgagaaaggcggacaaggagcggttggaagaagaaagaaagaaacatgaaatggaaaaactaagaaaggatatggagagttctcagggaggcactgtggttttaaacactggtttgaaagacagagatgcaacagagaagatgatgctagaggaggatgatgaggactttcaggttgaagatgaagaagacagtgatgatgccatagatgaggatgatgaagacgacgagacgaagcattactacctatgaattaaactcaaagaccaggcttatcaagacgcttgtactggttttgtttgcgtccttcccttgttgtcccagttgtgtagttaaaacataagaattgattctctttgtgagacattgtctaatgatctaatgacgaaactataaactagcacttttgaagactttgtacacaatttgagttcatatgcacaaggaggaaacacatttgtatcggacaagaaaagcagacagaaaactagggaaaaaaatcagagccaacactatctcacttccacattatccacaactataaaggtcaagagtcaataacattatctgagtacacttgaactgtgcgttgtggctggtgttttgtggaggatcaagattcagtcttggtggatttcatcaaaaggcgcatgagcaaatctcacatcttctggccttgcaatcacgactggctcatcagcaaatagggccttgaggaaagatggagttttcaagggacgtcgatccgtcattcggggatacacaaatgccaagaagtagtatgcgtggcccgctatcattccctataaatttggataaaggttacggataaggatgatgatgcacagaaagggaagaagatatatgtgaaagcgaattaggagagatagcgtaccagaaaatccccccatgcacttgcaccaacaaggatagagaatccaagaagtacctgtaatttcagaatttggtaaaagaggcgatttaaagcatcaaactagttagggaacttccgtgaagagaatgcaaaagtccaactaacccatggtaaataagctgctgtgaaagtgaagaggccaaggaaactcatgtggatgtaaggattttgtttactccatacatagacctacagaacataggaaaagtgttatagatggtcttgagatgaattcaaaatcatttgagtattcgtaaaaatagcggtattgagaaatagaatttaccatcatgaaagtcaatgaattgctgaggaagatgattttggagaatgaaacagacaaataaggtatcattccgccaatgagaacaataccagttagaacagttgccccgaataagagcatgtaaaggaaatccgtggtctttcccctgaaggagttttcttcgagcagtttgcagtatcgagctagaaaaaacatatggaacaaaaagtccaaatctgcaaaagattgataacaagaacaagtcagcttctaattaacaatcacaaagaaaataaatccttacagggagcatagtactagagatgtcaaggagcaatggagcatatcacaaaaaatgaatcttcaaaaacttaaaagcccatcaacaagttgtagctagaccttatccgtagctagaaacataactatgacacttctaagcactaaattattcagacaaaactaggaattattcatcacttatgtgagtttattagcaatcatgatcattcctagtaatctaaggaagactatatcatatgaaaaacagcacaacaatagtccaagatgagaaagatatgaacatttctcagaatactaataatatataaccaacacaaagagctgaagataattttacccatctttcggaaataaaggaaatttgtgacaagacgccagaactggtattgcttcaccacaagggtaggatttaggtagagattataaggagatataatctgcaaaacaaaaaaatgttccacaaaatgttacatcataagccataacaccacaacacttagctctaaacttaaccattcgttagccaccccaattccaataaagagttaccttttacatcaaaaaaacaaaaccatccacatacataacagaaacacaaagattcaatttttcaaggaaaaactaatcagatcaatcagagcaaagctaaaggctttcatgagtcagagaacttcaaacctcgagcgaacacccgacggtggtgactacagccgccgtgagatacgaccgggttataatcggcatctgcttgtaccactcttctacggcttgagccataattccctcacaatcacaatcacaatcacaatcacaatcacaatcgattcagtttcaatcaccgagcaagtgaccgagaagctttaccaaatccaaaaccaaaaacacccaaatcgaatctgtagaagcttctacgttgaaatgaatttgggatttaaatcagcttcttctacgttaaagctttgaattaacgaaagcgactggttaaaggttcgctcttttttttcgcatgtttatctgttgtgacagtagctcaacgaataagaaagcgcgtgttttacacgaaccaattataataagcatctgacgccagcgtttctttgcagtgaaaaaaaatcttaaaaacgtctcggcgttttcagcttactaaaacgtcacgatgttcatatcgaataaagtaaagcggcgagatttgcaaccttatttctggaaccgttagaatatcaataaactccttttagtgttcactccttttagtgtcactccttttagtgtttactgtctttcgaattttgaatttgaacaaacgactctttctctctaacaaatctccgatggatgaaaacgaaccgccgtgcgcttcaccggcgccgccacgtaatccggcgtcatcgttactcagtgacatatccaatttcaaaacgccgcggcgtacttccgttgtgaattcgaatattagtaaatctccgtatccgcatttcttcactgcatcaaagcaaaccccaaaatcttcgtcttctaatttccgtcgtccttcaatggttcattcttatgcatctcggtctaaggtatcaacatcgtcgaggcggctcaaagcatttgaacttcagcaatctcaatcttcacgcaaggctgagttgacgaaagagaagaatcttagatctcttgctaaatcacttactgtgtggctcaatttcttgtttgaaaacccggaaaattgcggttgcgatccgttcgagaacgagtctggtgttgggaatttaggtaaggggaagagagatagtggtgaggctttaggaaatagtaaatctgttggagttgatacaatgtggagaagccctaaaaggttgaggaatttaggttggtgtggtgagaaaaaacgttcagagattgactcttccttgactggttctaagtattctacgttgagagaatctttaagagatgtgtgtagtttagatgatttgaagcaaagaatgcaatttcacttgagtttgggaagttgcaaggagatttttgatgtgatgactcgtgtttcaaaggtaaacatatctccatgtgtatcaaaatagtgtcttttatactgtttgttggctaattttaagttttttttgtcaaattgttcttgtttcagaatatagatgaagggaggataaaaatgaaaccacaatgccctcttgtaactgattttggaatgaaggagaaggccatcaaggcactgatgagctataaccaagtttggcttcgtttagggttatatatcatctttggtggtgattcctttttgtctgatagtgaagttaactcagatcaagaaatggcgttcttgaagatggtaattagtaagcagttcttttcccacgatggccttgctagatcttatgtttataacaagatggttgagggtttatacagaccagggtactatgaagctcttggaaatgtgattttgaagaggattctgttgctggttcttgtaattgatagagccaaatctcaaagctgcctttcgctcaagtatgggattgatgggatagatggtggctcacccctcatgttctcagagaaatctagtataaagtctagccaccaacttatatgtggtactttcttagattttgctgtttagtttgtcgcttttttcatgtttactgcggctaattttccatttttttggctttgaacatagaattattgtcctctgatgtaatgcatggagaagggaatctcctagcgcatctagtgattataggatacaaaataccttatcagcaggtgatttttagttaagagtcaatgcaatgtcttatatgagatctcgattgctaagtgtatgatgtttcgctaacttcaataactggaatggctcttgcagtctcctttagttgaatacaactttagagtgagagagttgtttgctgacctccaagatggcgtgcggctctgcagagctattcaactactacttcatgatccgtccattctcacggtctgttttactctttatattgatttttaagcaagaacttccagtttgtcttattgagggagtgagtttgatcttatgagggttcttatcaaacagaaaatggtagttccatccgacaatcgaaagaagaacttggccaattgtagaattgcacttcaatatcttaaggatgctggtgtttcgttaaaagatgacgaaggaatgatgataactggggaagatgttgcagatggtgacagagagctcactatttcactactatggaacatttttgtacatttgcaggtgagtgtttcttctttttctttgtccattttttttggtggattgctgcaagtgtcgtcggattttcattggttatgtatactctttgaactgggcagctgcctcttctgattaatgggagactcttgacagaggaaatctacaaagtccagggagtggaacaggtaaggctaaggctcgcttaatttccttggttccaataattcattccaatttctagccattgttagttatttgaatctatatgtagtttctactaaaagactgtcaatcagatctttaatggtgacacttctctagttacactaatttttctctcaataagtcttttttttgggtttctttacagaataatcaaattaccatgtctactcctctggaaatgctcttgaactggatccaggtagcttcttaattcttatatcagcgtattcatattactttccttactatgagttgtgggtgctttctttgcctatgttatatatgtctaaccgtgtacaatacttgcaatcttcactaagtcaattaccaggaagaatgacttcaagttagaaagctttgcatcattggtggatggaaaggggatatggttcttgcttgactactattttcgtcaagaagtttgctgtcgatgtctacacagagaggtatgaaatgttcttaactcgaaatcaggttaaatgcattgaagtttacctaggccatttctcttcacgtatcttatgacacaggctggctatattttctgaataaatgtttatatccaggatcctggtggtcaagaaggccctcaatcagtaatgtccaataccgattaccatgatgcagttcaaaattttattctgtcgcaaaagttgacagcacttttgggaagctttcctgaggtactaatttcagccagtgaatgtctagttattcttaagtttagaaagaaaaagattactaaagatacgaagattgaattactgaggggccctttgtttctttacaatagatgattttcttcaataggctaacatattctgtatgtatggtcacgttagtgctatcagtttcctgacaaatcttgttgatttatataggtcctacagattggtgacttactggaacataatgcagtagttagcaaccaaagtgtgattatactgttggctttcctatcatcaaagctgatcgtcaaggagaatttggtattcctttcttaccaacaaaatatggcttccttgattagttttctggatggaagttagattttacattggcaggttatcttacaaattccgtcttttctcaggagcaactgaattttcataagttgctgtgctctagctgtcaagttcaggagaagagatattcgcgcatcagaatcagttgcagcagctctgaagcagttacaatcgaggaaccagacagagaaaatggagaaggttatctttcttaatttccctagagtatatgatcttagaaatgaggaactggatctttttatttagatgcctgatagtctataagtggtttctcaccctagtttcttatagagtctacagattcttacaattggttgaatgaagcaagcatgcttggtatactctaaatacatggtattgattgtcaaaagtaaattctacttgtagatgctactaaaaggttccaggcaatcaaagcctggtggcaggacatggccaaccaaaatcaaatttctgttggaaaagctaatagccatactctgcaaggctccttgtctagaaaatgcaccacggattcccaacgaggtaattcaagttccatatctacccttctcaagttttacatcataagcttgttttcgatacccatcaccttttcatgatctgactcttatagatgtcacttgattgtattactgtattttgattcggtgattatttatctactttttggtacttggtagatagagtattgaatatcaaactctatccattatttgatttcagcatacctcttacttgcagaaattgcagcagtgatcatacaatcgaatattaggggacttcatgcacgccgcaagtttagaaataagatgagagcaatctgcttcttacaagctgctgttcggacatggttatcagtgaaaaatatacaagttgttgagaaattcaatgttgaggaagttactttacatttatctggtaattatttgttcgtgcatattcattgccattgacagatcaaaaagttgctctctaatgaaagttttgttatttctgcagaaagatcggccaacttaaaacctgtagctagatatgtcaagttcattgttgatcgaagtcgtttcatcaagttgaggaaatctgtttccgtcattcagaaagctgtaaggagacatcagagcaaccttcatcatgagctgaaagcagcactcagaattcaactagcttggaggagttataaagaaaaagttatctcttctatcaccatccaatcttatgttcgtggatggatcacacgcagaatgaatcggacatacaagttttcttccatacttattcaagtaagtttattaaggtcgtccgatgttttgcttatggtactgtccattattcagtctctataaaaaaaaaggttgtagctcttttgttacctgctgtgcttgtcccaatttgttttaatttcctctttgtcacttctttttgtctcccattttcttgtctcattagcctttcttttcgattgaggtgtcccttggttttaaaatattcttacataaaaccagagcaagaatctgtatcgctcattgcttcatttgtgctctactcctgctttattaacttcctgcatctaactgtagagatactgccgtggttggttggcgagaaggaagttttgtcttcagagagaagcaacgataagcattcagagtgctatccgaaaatttaactgcatgatgtcatttcatcgttgcaagcatgcagccacacaggttcaacggcttgttaggggacaaattgttcgaagcaggcttcaaggtgattaagctatttcttcagtatcttgcttttagctgattgcatataattgtttctggctgggattatgctttcttcagcatactaatggttactcaaattgaaatatcgtaggagcttctactctctattcaaaacttgacgaaggcgtttcaagacttccacaacacagctttgggatgacaaaaatgctacattccgtcattaaagtgcagcgttggtggagagaatttctccattcaaagaatatgagaataaaatcagcagtcttaatacagagtcatattcgaggtttatttgccagacgaaaaacttctgtggaaagacataacattgtcatgattcaagtaagatatgaccaaagctacttttatcttttgtcctgcactttcagtaatattctttaactaacagtttcaagtttcattttacccttatatatctcagtcacactggagaggttatctcacacgcaaagcatcaaaggctcaagttctggatctgagagtacgaatgcaaacttctgcagcaaacatagatgacaagaaacggttgataaacaagcttctttctgcgctttcggaactactgagcatgaaaaacgtccacaacattcttcacatttgtgaaactttgggtgagtttctcagcttccgttatttacagaaccatgtgaacaacccataacatgtttcctctacagaatcggcaaccaaatactctgacaaatgctgtgaagagcttgtggcagctggagctatagaaaagttgctaacattgatccggtctgcaagcagaagcatccctgatcaacaagtttcaaaacatgcactatcaactttgggacatcttgctcgttatccacaaatggcagatgagctaatcaacacgaaaggttccattcagacaatcttctgggaactactcaggtcttcatttagttctcaagtcttctttttaagttttaagtttcataatttctcattcttgcgttgtttttctcgttttcaggaacaaagaagaagcatatttcattgcatcagatgttctgaagaaaatatgcagtagccataaaggcgtagaagcagttcgaaagcttcctgcactggtaaaacggttacacgtcttagttgaggagctaactcgtaaggcaaacatcgagaaacggttagtttttcttctttcccgttttcttgtctagaaactttgggtcagatccagataaggaaagtatgaatcaaacatgttctaatctaaagatattgtgtatgatttcaggaacgttaagggacagactggaaaagaaaagagtgagagaagattaaaagaagctattgagcttgttaagcttataaccagaagatgatttatgccctgtttgtttgatcatttgctaattcatctaaatgcatcatttggatggagctttgttagtttgatcatttcaatggatcattcacattctcatatatatataaatgactaaaatgccctctgttaagtaacaaataatcaatagctacattctcatattaatcaaagtagagtcttaaaaagagagttgttttaaatatgttaacaactagtctgttcacatggctctgtacagactataatcagtgtatgttacaaaacatcaactagaccttttaacttaaatagttacaaagataaggattcatgaggagcactatgaaccacaaaattcagtatttggctttctattcctcaagttaagcggataactcgtggccaaatagcaacaaaacgggaaggaaaatttatgtcataattttccgcctttcttagtttatgtctattgtcacgttagcttcgaattgacaaaaaagtatagtatatccaaagtttattaaaatatatattacagagagtacatcgaacgaagtggaatcaatatcatttattggaaagtagagaaaaacacacacataggaatcataatattacatgagtatgggaaagaaacctagcaagctcacacagatcatagaatagattcttgatttcatgagataaagtggtccgatcaatgatatgattattgggaggaaccagcagaagagaatttgagagagacactgttaacgcagtgacgttgatcggttggagtagagtaaccttcgcctttgaaaacatggcctaaatgtccatcacacactgcacatgttatctccattcttcttccacctgcttctggctatatacatttaaaaacatcaaattagttattgtaattacaatccttaaatgggtttgccggtttggctaaaatagtcaatgttatagtcaatgagtttcacgaatatggatgctcgaaatatgttatttgctagagagaaagagtgaacgaattacagtttgtttaatagcaccggggatggcgtcgaagaacgcaggccaaccgcaaccggagtcgaacttagtggtcgatttataaagagcagttccacaaccagcacaactataagtcccttcctcgaacttctttgtaaactctcctttgcctcgtttactaaatcaccaaattaaccattaacaacatgttcaggtaaacttcttgctgctcaagtaaacagaaaaataaaaataaaaaccctagaggacttcttactctgtgccttttagtctgagaaccctaaactgctcaggagacagaaccgcacgccactcctcgtcttgtttctggaaagatccagttgctggaactgctgccgcggtcattgctgccatgacgggaataggatttgtttatctaatgatgcttgagaggtcgaagaggaagaaattagtttttcttagcaaaaaaaagaaattagcttttgaccttttgtttgaagttttgtactaaagacctggtttaatggtgattcaaagtgaaaatgggtcggggtataaataggcttagagaagagtatttcttaaagaactgatgagaatcttccaaagaaactatactaaacaaataacaataatacaaataatttaggtaacagctcatttacgcaatagatctagatctaaaataattaacatgcagcaaggagagagagagagggagatattaaaatcgaggttgtgcatgtcagcatgtagacttttgactgtgtttaatattcatttgatcacgttgcgaatacattgttttccattttattgtattattggtcacgtttttttccctcttaaatatcgggctccttgatcaaaagcctttcgttgaacagattaaaaaactaagttaagtgcattacgtccttaccacacacagtttagactcagacaagttgaacaaagcgtagtcaaatactccacctgattcatacatgtttaaaagcttttgtacgtattaaaataatgaaaatgtgtaatacatactactatgtaaccaaaaccaaaaaaaaaaattgtacgtaagatatttagaagttcaactaggttatgtaatctagtgtgatagtacaattcaaattcgcatattgcattctattaaataaaaaaatatctaaaattagattaaaaatggtctattgtgattttatgatacatactcttaatggccagagttactatttatcttttgtccttgttttttagtaatttttagctttctttttagctaacattttcaagttctatttacccttgaaaatctctcagtcacactgttgaggttatctcacacgcaaaggctcaatttcagtacctgagagtaagtatggaaacttcggcagcaaacatagatgatctgttcagttgatcattcagttggttttgtttcatacttgtgtttgtgttgtttgaatttgctgatttcagaacttgacataacatgacagtttcttcttcagcatcatatcgtttgtcatatatttatatgaatgtcacatgaaccagattcatgtcttcagatcttgagataggatcctcaactacatggaaaaaaaaaagaaaccaaaagaaaaatgtgtacatataaatgtcttttgtctatgtcttttctatgaatattaatccgttacatttgcctttgttacctcctttacttttattacctccttcacctttacatttcacctttgttacctcatttacctttgttctttgtcctccttcttagggatgcatggatcgtctggtccagttaccatagtgagacaatagagtgagttcttcttctttagctcttagtcttggaagaggtacaaacgccaagggagatcggaatttttccaaggagaaagagatgatcagaatatcctcattatcatcagggactagaacaccgacatccaaaccactagctttgttgagcagagtgatgtcacaaacaatttcaatttcatttttattagcgaatctaccaaagctggtgagcggaagcaatttctctgtgattgacacatcaataggctgtgcaattaattgcgtacgtctattatcccagctttattttattgttacaaaatcttaaagtaaaagaagttgtaatatgttcttcaagtagaagaaagtaaggaacagataaatagaaattttctttatagtaaccaaaatttattataactatagagcattgatgattaaacgaagctttattacaataatattacatgagtaggaatgtaaactagcaagcatctcacgtatcgtagatcataattctttgataacatgaggtaaagtggtccgaccgatcagtgatgattatttggaagaatcagcagaagcgaatttgagagagacactgttaacgcagtgacgttgatcggttggagtagagtaaccttcgcctttgaaaacatggcctagatgtccatcacacactgcacatgttatctccattcttcttccacctgcttctggctatatacatttaaaaaaacatcaaattagttattgtaattacaatctttaaatggttttgccggttttgctaaaatagtcaatctttaaagttgttttggaattacttttctaacaccaaaaaactaattaactcttttttacatacgagaatcttgacgtggtggccaatcaaattggcgggttcttctataaaaagtcatacgataaaaaagaagaagccaaaagatgaattataaaaacaacaaaaagtactttaatttgcataattgcatgtgatgtctcatgttgttccgccaatatatcagttaggtccaaactaaaaaaacgtcaaaattaaatgcacatatataaatgagtttcacgaatatggatgctcgaaatatgttatttgctatagagaaagagagtcaacgaattacagtttgtttaatagcaccggggatggcgtcgaagaacgcaggccaaccgcaaccggagtcgaacttagtggtcgatttataaagagcagttccacaaccagcacaactataagtcccttcctcgaacttctttgtaaactctcctttgcctcgtttactaaatcaccaaattaaccattaacaacatgttcaggtaaacttctcaagtaaacagaaaaataagataaataaaaaaaccctagaggacttactctgttccttttagtctgagaaccctaaactgctcaggagacagaacagcacgccactcttcgtcttgtttctggaaagatccacttgatggaactgcagccgcggtcattgccatgtcgagaatatgatttggttatgtaatgatgctagagagatcaagaggaagaaattagcttatgtttgaagttttgtacgaaagactcggtttaagtttaattgtgattcaacatttataaatagacatagacaagaatatttttcaaagaagcagaagaattgtccaagaaaactatactaaacaaataataattaatttaggtaacagcaaacgcaatgaggtagtgcttgtggacttttgaatgtgtttataatatacatttccttgtatcacgatatgaatacatttttcccattttattatattaccggtcacgttgtttccctcttagaagtctttggtcgtcgaactttcgaagtctttcgttgacagaaaagaaaaataagttatgtctctatattttgttcatgagattatgaaaactttgatctttctctccatgattaaaatctttatagactttggaaatattccaaatcaacttcgttctattctgattcgatgaaatttacaagtcttttgttgaacatatttaaaaaattaaaacattagcttcttctaaaaacttcgtttaataagaaaacacaaataaataatgaaaacacaaattaaattttattgtttgtggttgcaaataaactgtaacatatatatagtccgatgataacacaaaacgatatacattttttagtagtagagaaaacagtatatgatatcataataatttaaaatgttattaatatagttataaaataaaatggtatgaaatataaaaaagattggttacgtttttaataccagttttgtgattagcatttgttgaagtagtacattctgtactttcaatcaaatggataagcatttagtattgtaagtttttctttgtcaacttaacgataaaactagaggagacgaccttggtcaatatattgtaagctttttactaacttgttaaatttaaatattatcgaattcgtttattttctctaaatatttataaaatttatagacaaaaaaatacatcacgttatacttggtccacgggctacaatggatgaccaatcacgtccccaccaaaataagactcagacaagttgagcaaagcgtattaaatactctcgacctgattaacacgtttaaaagcttttgtaatgaccaaaaaaaaaacaaatgtctaacactatgtgtgtgtatgtacatgttaatatgttatgcagttacaaatatacatacgaatctatagatttcaactaagccatgtaattatagtctagtggtagcaccacccaaattcaaattcacattttaattctttatttgatgaaaaattatttattattctgctcctaatatttgtttccatctgagtatctaagtcagtttaatgtttaaaattggactggtaaattgaactagaccggagttgtaagtctttgtgtgaggactatttcagcctttatgtgaagtttcacaattatttcacgcagaaaatgataaacaatgagtttagatacgacaagtgaatacacacaaatgagttggtgtaggaaatttttgaactgggtaggtgaaagaaaaactatacattaatattaaattacatttgcaagacatttcgcctaaatggccatgattccaaaaactctacctctacgccgtgaaatatccaagacatttcgcctacaagtatattgttaagaaagggaaattcccttactaaacaaatagcatatatcccctcaaacgcatttgcctagtaattattcccgaaacggtcgctatgtcgcaacatagagttctaggagagtagtcggtacataacgtgacttcctcagaggtatcgacggagagtacatagacgatcctttatagttcgatcaatcaagccggtgagatggagccgtgtgtatttcagtatatggtgtggaaggaatctcggcaacattttaccaataaacattttagttcgttgctaattaatatgttttttcttattggtatcccaaattttatttatctttttttgattagtttttttttctaattttgattaggttatattccaatgataattggaaatgtattgcttcaattcaaataaaattcattgaatgattggtatatagacccacaaattaatgtacatatcaattcttatcagttagattcacactagtttggccgatgttaagaagtgtaatctgttgacttcgaaaacacaaaaggaataacaataaataccaaatagggacatacattgaacaaatagttggacatttaattggaaatataaatagaaaaatttataaattgacatttgaaaccaatattcaatagcaactttgttaagaggaagaaaatgttcaatattaaactttcttgttggtagaggaaacgtaaacttctcttttggactttaagtgtaagcttttaacttctcattgatggaaatcaaaatgtagtccaaaccgctcgttactattgatccatcggcagcattgctaccaaacatatccttaccggagtaaagactcctacaagttgggcaaagcgtaacaaaacactctatccatatatgttttaaaagcttttgtacgtattattgtagaaaaaaaattgtttgaattttttagcgtaagtgggaaagtggctttttttaaaagcgtaatttcttgattctagtcatttacacctctctgagtttagtgtgtgtcgaatttaacttttttttgtagtagttgactgtatttttttgtgctattattttgatctgtatgtaaccaaattttttgtgacttcttattttctcaaaatttaaagggtttgaggataattttcttccctttttacttgtacgtttttttcatttttgtgaactcctaactcaaatgaaaacgtgcaacctaattggcaataaaagaaacccccttaaaaaaatgagaaaacaaatgccaatttttattatataggacttgcattgaacatatcaagggtcaatggaaagataacaataatataattattaaaaagatatccatacaagggacaaacaacaatcactggagcgagcatatcacacaagactaggaatggaacataacatgacaatctcaaacaatccgacttgattttcaaattttcttgaaggagaggacttggtccaacaatagtggtcatcaatgtggactatatagacttattgggaggaaatttcagagaacttgagagaaacactgttgacgcagtggcgctcatcggtcgctgtgggaaaaccttctcctttgacaacatgacctaaatgtccgtcacatgccgcgcacgtgatctccattcttctccctcctgcctcgggctgatagagatattttataaacataaaacttgtttaatacaacaatctttatcactaaaataattgtgtgtcataaaagaaaagaaaaagaatatgtcaattaccgtttgtttaatggcaccagggatagcatcgaagaaggaaggccagccacaaccagagtcgaacttagtggtggacttataaagaggagttgcacaaccagcacaactatagattccgtcgtcgaacagtttggtatactctcctttacctcggttcctataccaaaaccattaaaaaaatcaggatgaccgttttatagtaacttcatatatgcatgacatttgacatactatacaaaatttatctatcttgtagaattattgagccggtcatcttgctaagtatttgctaaatcttggactaataccaatatgtcgaagacattatgttaaccgtacttgttttcaagaaacatgcagtgagtttaaagagttttcttactctgtgcccttttccctgagaactctaaattgctcgggagacaaaatcgcacgccagtcttgatcttttttctggacagatccagttgatggagccaccgctgttgctgatgttggcatgattacggtagataagaagctaagaagacagcggaaagatggtcgtgtgttttgagctcttttaagaaaagaaaagagaagaagaattaattttgtgagtgagtagaagaactacaaaggggggtttaaatacgcatagacaatcatattttattctatttcgtctgaaatgtgacaatatgaatcttcctaacacctaagaaaccataataataaaaaaatgattgtatatggttacaattacaactcacacgtagatctagatctaattgacgcatgtatattatagaaaggtgacaaaaaaaaaaccttaccaaggctgtggcctgtgtggactttgatggttgtcaggttgtgtaatatttttataaatataggggcacgctttttctcttctcttatttcatatttgtctcgttacatgtagaagccttttgttgactaaagccttattttcctttcctttgacattatattctagtagaaaatataatgtgacattaaaactttagttcatacgttttgaatgaatgaatttgagtatagcagtatatataacttagacactaaacaaaaacatgtttttcaaattatatatgcaagtatgatgttttcttcttctgttatcatcatctgatccaaaaaaaaaaaaaaacatgtgtaagacatttttcaaacatttaactttaggtaatttgatccgaataataatctttggatgaaacaaaataatgaagttttgataaagaaatattttcttaagtgtaaaatcaaaatataattcggactaagttgagatgaaatattatgttctagctaacggttgacagaaaaaaaaaactaattgaacaaaccacttttaacattttattgccaaacaaaacaaaaatagttccacgaaagttgtagaagagagttcataaaaacacataagacttaatgaaaacatgatttcaacgaacatatacataattcacataacttcatggaataatgaaacatgaaaaataacatgcatttgtttacttataccacatgttgtttaaaaactataagtaatttagaaaaaaaaaaaaccaagtgaatgcataagaaactagctattttctaaaagaaataagatgagaacgcgagtatgaagactccatctccatgtggtacaattgcgttacatttataaaaatctatatattcttgaagaaaaccaaatattaactaacagaagtaataaaaataacattttgacacaacagttttttcataaccgcatataattacctatataaataatattttttcatattgatttgtataagctaatttaataaatctgttggaaaaacaaaatcattaaaaaatacctagtgctaatactactcatgtttttatttagttacttattgttaaataataataataaagggtaacacttacataaatgataatatatagatatttatataagattgtccatataaaatactattattgttatactatacagaaaaggtgagagtatacatgtaacaaaatgagaaatcaatttttgtaatatatatgcttctttagattgtcgccattcagaaatatatatatatatatatatatatatatatatatatttgtagcatatactatgagtttttgtaattttatccggcgtctcaaattacaatttattttttagctaaagctcaaattacaaattatgaattatgactttgatcgcctaaaaagtttttttgttgattctcaagagaatagaacaacctgatacgccgtgagattgcatctcattagtagaaaacgtgatcatagtgtttccgaacttgttagataatttggttttaactagtatttattttggtacactaactaagtaattattttaactaataaatttataatatatatatacatgtttttgtttttgtcaatcagatgttttgcaattctgatttaaatttattatgttccttatatttccctattttatgattcagcattttcattatttgttattcatctgacatactagttaaactcttaatacggtaaaacctatatttgaaaagaattttttcctaaacgaaaggaaaaaggaaacagttatttattgttatttgtatatgttcagaacaattgttgtgatattttgacaacatgttctaattgttaaaatcgaattttatattactaaaatatatttgaaactttggataacatgttgtgctgacatatctggaaatgacacattataaaactacatggtagttgtctatggagcgcaatttctagaatatcattattttcgagtaaatggatattctaatattttatttatgtatgaacatgtatatgtcatgatttcaatattaaattttaatttaaaaactatacaataaatactactagtcatcaaaagttctaaaacgtgttattatttgttatatcaaaatatgattgttctgaatttgaagtcataaattttgtcaataagtagcaagatgtttagcgttacaaacctaactaaattaacaatttttaaactataacaacatgttgtaaatactcagaagagagaacaaaataatgtatgagagaaatgtctcatagtacaatctcatttttttctcaacaacaattatttaggcgtaatactatcttttccgaaacagattaagtagatgctgacacaacaatgacactactaccagactaccagtctaccacaataacttttcgtatatgttatcctctccaaaacatgcaattgcaatatggtgtaattttctgtataattattgttctggatgggattgttaatgcatgagacatgtgaacacatgaaactccaatcagattaatttaccaaaaactacattaataatcctcaggatgaaagtccaatcatattagttaactaagaaaactgcaataatgatcttgacaggtagatagatcacatgaaaacaacagcaatattgattaaaaaaaatatgaatacgaggccgatataaataacatatactccatctctttcaaactataagatgttatagagattttttgttttaaaatataaaatattttacgaatttctatgcaattctaaagaaaatagtttataaccatttgtattctgcagtttttaaaattattggttgaattttttatattaaatattaaatgttagttcttaagaaaataaataaattccataaagtatgtgttttagctaaaacatcctatattttgaaacaaaagaagtaattaatgatatcgatattgattagtaatgtgaaaataatgtagaaatggattatgccacacggttttacaacttttattcatttattattgttcgctatctcatttcgtggagtaaaggtttattttcagtactcttgtttttaaatactattggctatatgagtttcgttttctttttccttttgttgttcattatttcgtaataaaatagttatcaaaaaacaaaatttcgaatttaaattacacttctctgttaactagctttatcattagattccatgtattattctctatttcatgattatttatttcatacttgacaacaaaaaagaagaaggcatttatgaatttcttagcaacttgcaaagtcgaaccaaactagtcaattaaaatatcctatcttcttctaataaatgtattctttattgtagaagaccgtatattagagagatgttgttgcctaaaaaacaaaatacaaaaacttaagagagatcttaatgagcaaattcagatgtggtccaagctagtaattattttagtgggggaagatctatgattatctatagactttttttttctatagatattcgcatcaatgcatcgtaacttacagcaaattcccgggtgttgctcgcagggtcatcaactcgtcatgtaaaatgtaatatcgtgtagtaaaattttttttctcaaaaaaaaaacaaagttatgaaaccggttaaacaagattatgaaaccggttaaacaaaattatgaaaacggttattaatgcagctatttatggcaaagttccacataccattctataatacagggttctacttgcacaaactgtttcctataacagactgaacaaactgatttatctatatcacgctataaatttccagtatatattacaaatattttcatattcttttaaattcaacaaacttatcaaattgatgtaaaacaatcttttatttactcgctcagttcagaggaatcatgagggagttaatgccgacagctgtggtttgatgtacatgtacataacttgttaaatagctcgatacataattattgggtgcccataacttgttaaatagattctcaaagacagcaaaatcttttcaacaaaatagatgtacaaacccaattatatatttatatgtagttataattctagagtgttgcaatttatcatcgttgaatcaatttctcttatggcagtatattattagtcactgcagtataaatattctgattatcttggaatatcataggttggtcttcttcttacatgactgctagtgtaaaactttttatatcaatgcacctaaagaaatcttaccttacgtatgtagcctagtcatatatcacaatagacgttagtgactaatatccaaatatattgtttcaacgaccatgtatagattaattatttcaaacataaatatatatggttaatacggagaaatatcaaatgcgcatcagaaattgaaaacaatctttgcatgtgggataatgcatgacatactgtattttaatggtgaatatttaaacgtaagccacatttatggaaacttgttaaattgcggttatgacaaaaaaaaattgtgaagttttatatatatatatatatatttgcaaatatcatatagaattaaatttggcagaaaattgttaactcatctttttaacgataaattacagaattacatttttagcataaaattacataaatatgtttttgatgaaaaatatggaatcatgttttcacagataatttgaagaaaaaatttatagtaagtttgaacaaaatagaaaaaaaaaaaagaccttatagtaagttagaaatattggtgcacgttggttttggtccgatatattttcaatgaagcttggaagaaatcgttttccatacatatcacagtacttataattaaaggaacaaaattaaaaaagtgactaaaatattggtcaaaattggtaaaatatcaaaatatgatcaaaaattttgcatttttttaaagatatttcatattattttatttttgtaccaatatattttttttaaacgttggttattacttatagatgatatgctacgctaattttgttttatttctgctatttgttaatattacatggaaaacaaaaaaatcttttatttacagtttgccgattctgctgactatctatctaattaaattaacttttatgtttaattaaagaaataataatgattctcttttcaaaatacaatcatttggattggatgacacacatgaaccagaaaagtaacatgctattatctcagacgaaatattattttatctgtaatgaacttaaaaaataacatgttatgtagataatatatgcaaagcaattggtcgtattatattatatgataatgcactaagtaataaaataacatgattatgggaaacgtaacaaaacataataaaagaaactttgccacttgatccttttattttagtactgcagcgttagtagcgtctttatttactaatactacaacgttagttgtcctaagtgttccaccattgtgtgaacctttttgtcgctatcttaatttctcacttttaaaaaaagaagaagatgacggtttatatataaagttttatgtttatcatataaaacaagtgtgtatagtatacatgtacatatcatataaaacaatataaattcattgacagtgtgtcttatgagagaattcggacaatgtgaactgtgaagtgtttctgtaagtcgttgcccattgccagtgtgtaataagtttttaatagttgtaatattaattgtctgccgagagcatgtgagttttcaaattttgaatgtttatttatatcatattcatcagtggttagaattcaccaccaaactaaatatttttgtagacgttaaataaaagaatcaaatcgaataagcgatcttagttgaccgtcatcaattgtcatagaataaatataaagattttaaattagtaatcagaccaggtaggcaaatttcacctcacaaaaaacgtgtgagaatcgacaaaagaaaaaaaaaaatccactacacttctacctactgttgtactcttgtttgtttccaaaacgttttaccaatttttaccaacagtaatggttaactacctaaatataattctgcagaaatgtaccctaaatattattgaaactgcactgcagtactgcaccaaacattattgttaacttaaggggcatggctttgtttcatcatccgtgttatgttttggcaatggttttcctagatggtacgaggcccgacaaaaacatcatcggcatgtgaatgaatcatcatttggtgttacaactttaattttggatcttcaatagataactttttttttctttgtaatgacattaggggtcaactttactaattgaaccatcaatacattttagtttaaaattgagtaaaactaaaaattctgatcgaggaactagaatttcaaaccgtatcataattatgctcgaagttacgaggctcccattagtaacgattttctaaagcttggtgagtggtgacgagtgatattttaaacccaaaagaaaagaaaaagccttcagttttttaatttcaagggtaaagtgatgaatgtgaggattttggttagttgagacgagtttgataaagtgctcatgcgtaagcagaatttaacttcagatccagcagccatcataggatcggatgaactagcgaaagaaaagcttcttagtgggccaagcaaaccaccagggacatgaattttttcctttcttttgcttgattataaattcgtttttaacataagagtgatagaggcattacaagttttaaaaggcttatctctttaaaagtttttcttctttaacttaacgtcttatatttaatgtccatttggatcctccctttttttttttttcttcttataacccacttgggaatattaactatttttaatggttttgtttttgtctcacatgtaaggtgagattacacgtccctcaacaatgtgtgtaaattggtgctacgaacactactgtgaacccccaaccggatgtttaactaacccaccctggaggacattgacctcaatctctataatgaagctagagctaaggttaagattgtatcacatttacgttacctgtcttcaacaaagaacctctagaaaacaatgtaaacaagtgtataaggttactggacctagcgctaaaaactgcttcgtcgattgttggtatgtatggcgaaatttgcatagtttatcggaacaagtagaatagcagcaggttatcttccacgacctaagggctctataaatgaagctttccatgtgacttcaaatgctatcttaagcacaagacgcattcgatgaccatggagaatatgttccacaacatgagagtttaagagaacatccaactggctttacaatagtatgatgcatccaaagccaaaagaatagagagatataaaaagcaagacaacccataattcgaatatttcggggtggtcttggacctcttggtgcatacccatgccaaaactctggttgacaccaggtgctttgagtcatttcttaaatcattttatttttctctgcaaactagtaacactattaactttaccagcctgagaaaaatctgccatgacgatacaaaaagtctggagactttattcaacgaccttattattaaccatcaaaagtaaacattagtctcacagaaaaaagacaaaaacacagtacgagagagagacagaagcatcacacaacacacctatattatcacgtctttttttctgtgatcatattattacagggtcggattctctggtgtgaacttgagagagatactgtttacacagtgtcgctcatcggtaggagtagggaaaccttctcctttaaaaacgtgaccaagatgtcctccacaagcagcacatgtgatctcgattcgtctcccatctggatcaggctgggtaaaaatgtaaaagctattagtttctcaaatcatataattcccagtgataatgatcttttgattgagaaatgttacggttcgggttatagctccggggagtccatcaaagaaagctggccagccacaaccagagtcgaatttggtggtggatttgtagagaggagttccacatcctgcacaacaatagatgccatcgtcgaatactttgttgtattctccagttcctggatatctacattacatatagtagaccgttagaataatgatatgttaacagatttacagagcttatgaccttgctttagctctacttcacactctaagatattcattgatcctttaaactcagagaagaagactctacttaaactgctttggcttctcggtggccattaaggtagactaagctaagacacaagactaactgagtattttcatgtcaccgagagaacaatcctaatagtaaggttcatagcaactgagacaaccatatacaacagcaagtcagcaacagagttttagtgtaagaagaaaaagtgataaactttgaaaaaatcactctaatctttcatagaatatatctcctaatcgttaatttaaggatcaggtaacaacatttattccacaaaactcaattttcaagttcaatgcatcaaatctctccaacaccaatcaccaagtaaacttgaaacccataaagcattctcttttataaatttatgatcatcaatttccaaatcaacacatgcaagaacactatctgaagcagaacactcaaaaccagatcaaaactgagtcacgaaatcacttactcagtgcctttctgtctgagaatcctaaattgttcaggagaaagaatcgcacgccactcttcttccggcttattgaccgattcaggagcagaagaacccattgccacaatacgaccaccgtggaaacctcgacggagcgacggaaatgacaaaggagatgatgagaaacgaaggaggttacgacgagacggagaggccaaaggaggtttaacgaaagcagctttaatggtggaaacgaaagtgagagacgtggctgaataaacacgaccaggtgttatgatattgaacgccatttgtttggctttttatctcctctcttccttcttctcttgacaacagctttttctgactctctctcaatcttttctcagatttttccttttctctggaacactcttctaatttgggccttacgtttgggccctttagcccaatatacatacactcgaaattgcattattctctgttcaagtttagctatgccatccttgtcggaatcattcgtgtacctggttcaaaccctaagggtggtttaatgaggccatgtgatgagcctctgacaaaagagaagttcgaagttaaagtcacatggaaaaaaagaagcaactaacggctggtgagagaagaagagtcgttcgtatttaaaacatgagcatgaatattttgacctcaataaagggactttgtttcattaacattcatattcttctttttccaacctaacgcaattgtgcagaccgatcaatcagacggttgtttctataccacacaaggaaaaatatatatattttggatcgaaattggaaccaaaactagtaagtgggtttcattatgcttggattttttttagtttttgttatttgaccatcgatttcttcgattcaattgtttgtttgtgacgaatcaaaaatcagctgtaccacgtttaagggtcagaatattttctctaaattttccttattttttgttcttggaatttttgtagtgtacccgaaagtgaaaattgacaatgaagctggtagatacaagcagaagggttcttgtctgaactcgaactatctccaaactcgtgtctctggtaatttctctctgcttcttttttttttttcctttgagtttgactctcatttagattttgagctagaattttagggttgactctgtttttttttttttggttttagcgttgactatgttttagctatatgtttaggaattaggaacattgacttggtttttgagagagatcatgtctgtgtggaagatatgggttctttgttgttgccaatttaaccgaatgcaaagtttcaaaagaatctattctgatgttctctctttctcgttgggacagagaataatcaagaagatgatttacaaatatacgtggctaagattcctaagatttacataccaagtgtcctcatgtctcagagtgaatccaaagaaatgaataagcctattagaggagctgacattgaagtaaaaccaataaccaaagccagtccaaccctacgtccacgcgctgttgtatcaagtcccggtatggtttatttttagctgatttccatctccaatgttttcatttgctggactgtttccatgtgctttagctatagtgtcacacaatgttgaactcaaatatgtcaaaaacaatgacttctgcttttgaattttctcttcttttagataatgatgcgatgatcggcaacatgaacatgattgaagaaaggaaagctaagaagggtttgaagagtaaagatcatattaagagtagggcttctcagcttaagaatgttaataccaatgtgaagatttctcatcgtatagtcgctaagctaccgggagtcaattcaagggatcacaaatgatcagcttctctattaatgatgccggtcagatggaagtcatggaaccacatagtcaccgttttacgttttgaaaacgtaattccactattttttacctttcccaacatttatattcacatttttgagtagtggtatcttatatatgatgcacatgttaaaagtataactgaaattaaataaaagtcattcatccataaaatagttagtttttctttggcattatttagcataaattttgttcagttcaaatgtttctatcttatttttgatgaggataagcgacgatgtagaagctgctctttatcacattaggaaggccattgaatatctcaaagagataaacaaatgcggatccagtataggaaaaggaacttatgtgcctcttcttaagttcttagctgatatgggaatggtagaggaattccaattttccatggatgttattttagaggcaaataatggttcgataccaagatggaaccactctcatataaccattttttttattaggatttaaacataaacattggatttggattaatatactaactacacataatagttcgataccaagaaaaaaaaaatacacattcttttttgttttcctttaaagacgtttagataaacaaagattgaactcgtgggggacaaggaagaacaatgtaacgcgttattaagcagctctagcaagaagttgaagactttcaggaacatcagaaggatcaatgagcctccttgtcataatcctcttgggtacaatcacagtcaacacaccatcttcgtagccagctgatattccgatcatatctatcgattccggcaaccgaaatttcctcttaaaagtcttcaaaggctgatccggaggcgacataggggttgcctccgttcgtatgattaagtatatcgaatcttcgatctcaacttttatttcttctttccttaaccctggttgggaagtgaacaaacaaaaaaaacagaacacatacaaaaaaatgaagattatccaagattatttattctttacaatatgtggtaatgaataaagtgagaaaataagtaattataattaccaggaagatcaacagagaaagtgtgagaatctggagactgagaccaacgaacatgattctcttgatagttattaagagattgagaagctagaacatattcccatggcatcacttgaattgtctgaaaatccatttttttttatagatttctttcttttccttttttcagttgttcttgtggattgattgatttttgggtttctatttatagttaaaaatgaccccacatgaaccatttgagcaagttgctgtctaaacttgaaaagttgatctttaaccctgaaaatataaaaaacttgaaagtcgataataaatgaaacattaagtacaaatcacttgaaaagacgataatagggtggggagaagattgatttatgagaaaaaatccaacaattgtgtcgactcactcacgagtggagaaattctttgtattctcgaaaaagaaatacttgctaaaattagtttaaagtgttttttctcttcccccgacaagcttaaagattgattggacgataaagtattttatactattattgtccactagataatactatggttcccttcaaataaatatatttttagtttctcatattaatgttctatcgattacaaatattttcaaccactcattttggttcgacatcgcaagttgcagataaatagccacttgtctgatattaatgtttgcaatttttagaaagaagaatataatattaactttatcgcggtttatttaccaaagaggaaaatttgcagtaccgtaagaaaaaaaaggagaaattttactcgacccatcttagtgaatatttagttactcaattaccctcaattacaaagattaattacataagtgccactaccacaaaatcttgcagggtttatcaaacacttgttccgaatgattcatcttcttcttcttcttcttctccgatctcatgttattgggggatttcgttctaggccttgattcgattttgttaactgttgtaaatgtgaaaaaacaatggctttaaaggcgaagaaaagcttaagcgcgatatttcgctttgcgatgagaaacgctgccaaaactgccgaagttgaagccaaagccgtagccggagattctctgatttcagacactggaccaggtaatgtctctgctatgcagatttctcccattgagccatttcaaaattgagactttccttgttattgtggaacagtgtcaatgtctttaataccggattttctctcatcgcttaagtctccggaagattcttccaacattggtcaaggtacctctttcgtctctgctagtggaataaaggaatcattttcggaattgcttgcttttttaggcctggataatgtttaaaagttgtctcttttcaatttggttcatcatgaatcttagtacctttgtgtagattttggtgaaccggcacttgcgggtcaggtctcgtctgcgttagatggtatgtacacctcgtgcttgttctttgtttatgagctctctctgttgtccatttggtagtttttctttggcactgagtgatgtaatgattgttccagttaaatctattggatataatcttcttcgagaaagaaatggcgagaaagtttttccgaagaacgtattggaaaccttagatttactgtctaggaaaggttgttcgtcgcaaaagccaaagcaggcttcacgtggtaggatgctgacagaaaattaccagaacaaacagtctgagattatggagaagcttgccaagggatgtgttcggaagttgggaactgagactatgtttgaggtgttgactaaaatggggaaagaagcgggtgagaaagaatacaatgcaatgactaaactttgcatacaacgtgcgaggagaagcaatgatgcagaatatgctcttgatcaaattgggaaggctattgaacatctcaaagaaatgagacagcttggattctctattggagaaggagcttatggccctttttttaagtacttagttgatatggaaatggtagcggagttccaaattctcaaggattttattaaggaggcatgtcctgagtcttgtgggagacttgtctactatgaaatgcttctttggatccaagtcaacgacgaagagaagatccacaaactttgcaataaagttgatgatagtgggctaagtttatcaatcctacaaggtatgccacagtacatgtatattatgttattttggaattctggtttttcatttgttctactctcaaagtaaccttttggtccttgaaaacagaatattatttggttgcactgtgcgagaaagacagtaaggaaaattttcagaagctgttagaaattgtcgacataacaacagtatcttcaccagacgcattgaagagcatatttggataccttggaaaatcgctgttggagtctgttgcaatgaagctactttgggaactaagagactgtcgtaaaggtgagatatcaatcaatcgaaataatctggtgctgttttaccaatcaatcgaaataatctggtgctgttttaccaatcaatcgaaataatctggtgctgttttaccgtattggtattatgaatttctaaggtggatgcatatctcaatatatagttggagtgaccagttcatatttgatgcaaactaaaaatgttcgttgatgactcattttattaggattgtaacattgtttcttgctatgtccagatggagtggagacagtttcaaatctcatattcagctatgcaacctgcatcccaaattcaacggtgaggactttctatatatattgcttgcaaaattattgatgcggttgttaactctggtttttccttgttttgtttttagaatatttgcatcaaattttaacattagcatggtgatttttgttcattgacaatgtttcttgcacccaactctcgtcctagatcttttttggtattgaagtagatataactagagtgtgttaaatcgctttgatcccaagctttctgtgagaaagtaacgtgaatccttgatccattaagaccttctagctaaataatatctctcttcttaacttttggtatttaatttctttagtgtcgaccacatttacattggcaattgtttctttctccccgagaatgagaaatgatatatccatgagttttaaaatgttgacatgatgtttaatatacaatcctataggtcttgagattgtgaggtcccaacttgcttttcatgttgggtataccacaaaaacttggtccatgtccttgaaccaaccaaatatttgttctgaatcctatgccatttttttaatgtacaaattatagtgagtagctaattaatttattcttattattgctcggaaatggtagcagactctatttacagaaaatgagattgaaatcactctcatcttttaagtagcgctaagctgtttaagcttctttttaagatagcctataacccctaaccgtccatgttcttacatattttggtgactaaaggtagaggatgccattttcaagtttaacaagttgcatgaagaactagatatcgtgccttcatctacatcttatgagaatcttgtcagttatctttgtggctcaaatgaggtatttgtacgcttctgtcattttcaactttcatttccaatactcttctggctccatagctgactaatgataattcctctgtgttgtaggtggtcactgctcttgatatagttgaaaatatgtgtgaagcaggtctggtaatatcagcaaacatcctgcactcattgttacaggccattgagcagattcttgagtttaatttggtacggcctccttttgctcgaagcatgttccttggatttcgtcccaatctttttgttgactgactttatcagttctaaatacaataacacagctaattttaggctggtcattgatatgctcttgattgatcattgacattgtctttctcatactcatgttaaacagagttgcgtttgatcatacattttctgtttcaggtgcaaagaatctattcaataatgagcaacaagagtgtgaagccaaatagtgagactttcaggaaatctataaatttgtgcataagaatcaaagatgtaagttatttctaattctatcagcttaagttccttccggttgtgaactttgttttatagactctagcaatgaagtatgaatatgctgtttctcacagaactttttgttatccaaccataacaatttgctatcaacctattggttccgtgcagtttgaaggtgcatataacatgcttggtaatttaaagaatttcaatttggcaccgaactctagcatgtacaattctataatggcaggatatttccgggaggtaatatcttaagctctcttttccatttttccttgtctcacctatcataggatccaccaactatcgtcttagtgttatccatatattcctttagtcattaatgttgaaatatgcatggaaatttgttgcaacatgcaaagaaccatgtctcgtgtaaatttctattgtagcattgatgtatatcggttaggcaggtagctgttgtcaaacaattgatatagttttagaccttatctgaaattattggcaaattctagaacgatggataggtcatatctgtttcttccgtattgtcgcttgagtcgttttttactgacatttttgtatggttttgaagaaaaaagtgaacagtgccttaaaggtcctcaaggaaatgaaagaagctgatgttaaacctgattcggtgacttttagctatctaataaactattgtggcgaggaggcgactattgcgaaggtaataatactgtatttcactgatattttacctggtccgagtcttttcttgttcttctaatcttgaagtcgagtaccttatgacactgtctctgttgttgttgtgttgtcagttgttacccattgatacatacataaataatgctaggttatgagagaaatattatgaggagatgatatacatacataacctgtgttttttttgcctattcaaagtattataaggagatgaagcaagcaggagttgaagttaataagcacgtttacatgtcccttgttaaagcatatgcatcatgcggacagtttgaaaaggcaaaacaggtaagcatgcgtattatatgttctttcaaaagttctcgaatgattatattcatgatttagtgtaagagctcaagcttctttgttactttaggtgctcatggacctggaagttccggctaaggatcacaatgagctgaaaagtgtacttatatctgctctggcatcaaatggaaatataacagaggctttaagtatttatgaagaaatgaagaaactccgctgccccgtagagccaaaagctatcttatctcttatagtaagtttgaagtttgtacttcagtcatatttttttctcgttaattagccgactagtagtgaattaataataacataacgtgttgcaatgacctcaaattatttttctgtaggagaactctgattcaaacgcagagctgggaacgttggttgaactcactcatgagctgcgtgattctaaattttggatagatggtttcttcaaaattatcgtgtttgctgttcgcaacaatagatcaaggtacggtgaattatgcgtgttctttgtttagtttacttgtacaccattgttagttatcctgtgctttattcaacctcttttgtgtagctctattctggatttgttagagcagaccaaaaaccacttgtccaaggatgacgtcggtgtggaatattggtttgaagaggtctgattttacttctctcatacgttttcaaaaacattacaagcttttcacaaactttacatgcttttcacttgttcgtattgtcaactgatatactataacctcaagatttctcatatgtagactcgacgaaatcttggaaaattctggtgtgtattattctcttaactcttggcatcttattgttgaaatcaggtgtttaagtcaatagcggaaacagagtctagtgatgtgaaggtagggctggacttggtgagttttatgaaagaagagcttgagttatgtccttcaagaaaatgtctggattttcttctacatgcttgtgtcaatgccaaagataagcagagcgctctactggtatgggaagagtaccaatgtgcagaacttccttacaatgtcatcaactatttaaggcaagagctcttttatctcctacatttaaaagtacgattttgtaattttcttagtagaaagttttcttctggtgagagagtgatgtataatgagttcttggtttatatgttttcacaggatgtatcaggttctagtagctgcaggagattcgaaaagtgcagaggcaatagtatcaaagattcctaatgatgataaagatgtcaaatgtataattaaagaaagccgtattgtatttactccaaaactgaagaagaaaaagaaaaagtctaaacagaaaggattatctcttcaagcaaagtaggatgattggttaaaaggcccacattgtatgagattttgtacagaagtgaacatgattgccaccataatggctaagttttctttaattctaatgcttatcacaacatttagacaagtcttcttatgtatacaaccccgaggatgaagctgttgctgtaacagggaaaattgctggactttccacaagaccttacaggtgaacggaaagggttaggagcaaccggatgagagaaattcagccctgcgttgcgcgaaactgtctttgcatttccacaagcttcttctctcttatcagtgaagaaacaggggatgcccgtattgttcaccgcctcaaccgctcctgcccagcttgagtacccatccaggtcacagttcaaggctacaatgatatccggtgaagtcaggtatgttacctcgtcttggtgcaaaccttacacaaagctcaccttaactctactgtttgttgttgaggtggttgctattgtaccagataagtcagatggaacttcaggtccgatcattatgatctgcacggttcctaaaccattaagcaagtgattgatctctgcaaatgctttgatccagtcgagttctcgttctggacctaagtaatggacagtcacttctttccctttcagcaacagattcttgggatggttgcttactgatgttaatatgtggtaaagtgttaaagggtaacagagaatgtcataaacaaggcttgaccgtggtagacacagtaaatcatagtagtctgaccaatctgacaagaggatcatacccggggaacgcccgttgttcagattctgtatcggtaaatcttgtggataatccccgtcctctagccctctccatgattcagattgtgcctctgtggaaaaacactgtaagagtccaaaaggttggtgggaatagcaactgcattgtcttctccacattcccttcttatggatgcctaaagatccaagccattaggttctcagcataacacgagaaagtgaagatctttatcttgagctcctcttctctactcatcatagcttcatagagactacaaacactccggtgcatctctcgccaatgccgtttctcgcagtctaaaccacagtatatggttgcacggcaatggctacaacaaacagactcatctttatgaatagctttctcacacattgtgcactgtcttaaacccgcttctccaccttgaccaactcgcagattgatcatgcggtcatgcctgaaactatttccaactcgtcatcttcgcgcttctgttcatatgattgacctggaggatgtgagaccgtaacagcaacaaaatcatgacctttacccatctctgatggccactgaacatcgacagtctcaataaaaggtgaaaactttatcatccttggcaatcccctgacttgcttctcctcttgaagcagcaaaggatgaaccaaagagagagctttcatcacagcaaacacaagcctaagctcttcaagtgtcgggcttctgaactggagctcaccagaggtcatacaccgcgcaacatccataatcggaaaccgatcagttccagaaacttctaaagacaaagacttaaccatcctcttgttagaaggaagcatcaatgactcaagctcataagtaactctaaagacctcaacattaggatctctagccatttcccatgaatcaccatcagtcattttcagtgcatagctcatggacctatacatatagattgctatatcaccaccatcacctcctatgaactgaacacattgaaaaggctgtctctttcccgaccaatctgagtctttgccaacccgaacaccgaataaatgacctggtctgagcctcttccatggctcactactgtataaagaagctgaagctctaaatatagattgaataatgttggaagatataccttcaactatcatcaagcaaacaccggatccaggtccaagacccggacctgacccgaattgttcctgaaacctaccaaataagttcttcaaatgcaaatccattcttgaaacttccccaccaatgagtcagatctgagtgaaaacaaagctaactttgaaatgatctaatcctacaagaacgcaggaaaaaagtattggtatcagacaataactggaaaatatcgaactttttgtaaaacccagaagagtttttgcatttgggtactgtgatttgaatttcagaagaagatatgcaatggtttcgcagttaaacggtcgtgaccgacaaaagtcaagagtagagagtagaacaactttttataaacgaaagattggacggtcataaatatttcgtttgtttttttgttaaaaaaattttcgtttgttattttagttcaagggattaatttgtagccgtaggcaagaaaaacaaatattggctactatggattcgataatagtttattaccacattttttcgtatttgtgagtgtttcgtattttctatcaatagtcttgaaaatgtttggcttccacggtgcaaattaatattgagtagtaacagttaatgtggctaaattaaactcttcaatcaatcaactcgattattatagccttaatagttgccagctctaggtttatttgatggagtcagtttagaagaagagattaaaaacaaatgtttgcaaaccagaagaacaaagggtatcataaaagacaacattgaggtctgtataataagcactgaaagagagacaacacaaaatataatggggtttgttacatatccccaaaacaaccgaatagagttctaactattgcactgatggagtagcttcttcttccatattggtatctaccttcttgtcttgtccttcaaaaaagttcactataaattaaagccagaggttttatagatcaggcgcctctgttgtagagatgttgttgtctacactcaatgttgtcttgtttccaagctctagatgtaatagctcctctggcaacttctctccttgacgaactggttcctcttccataagatcgaatccatgactcccaccagttgttttctgttgttctgtctctttcggtaccaagacaagatttggttgagcagtcatcatcattgtgcctggagttggaaaaaactccactaaccgagtgtcagcttgtccttcaatgactccatcttcatccttcgtagcttccttcgcttggccattggtcgcttgtggaactacgaccaaagctcgagaggattcagaaatatccatgtcagtagtagtgacagcagcatcttgcattggttgatcagtagggaaagaatgatcggtttggttgttcttgatatcttctcttccgtacattttaacaagaggagccacgtcgttttctggagtgatcggagtgactctgccccgtatgaacacgagacctctgagttgggtgtcactgtctttaaccttaacgttaaggagatagcctgcgtcgaaagatccttcgattacaccagtaaccaccttacctaccaaattcatgtccggttttggagttgagttttcatctttgcgcggtcgacctctttttcgcttcgccaagccatcattagaagaaggaggaggtgagttcatgatgtcttgattctgctgattcaaccttctacataaaaccaaaaccaagaaatgtgattttgttaagtttcaaactatcataatttatttgcattgaatagctcctaaataataaatgaacagacaaaatatttagttcaatacacaaacacaaatgtagattgttacattagtgcaaaaaaaatctaggatttcagactaatccaatctaataattgttttaatatgaatttgaaattatcaaagacagaaacgaagtttaaacagcgacaccaaacgaaaaaaatgaaattatgaaactgacttccatccaaataagaaaaatcgctgtagcaactataaagactaaagagattctcatggacaatctcgaggacacacatatttacactagaattatcaaaaacctagtgtctaaataacattaaagtgaagattcaaatccataaaacgagaaaaaaacggatcaaacctctatattaaacaagagaaagaaccagaataaaatcgagaaaacatcaaataaactgaatctaataaaattcaaaacgtggattcagaattatcatgacttagaaatgatcatacaaatgaaaattttcccgagagaaacactagcgagtctgatgttatcccaaaaaaaagcacggttagatattggtttacctctgaccacgcgacgcaaaaaccacacgaaatggttcttcgaaaactcagaaaattctcagacgcgtgaacatgtgagtgagagagagtgtgtatttataatgtttcttcggctacgttgttcaagtttttgctttcttgcggtttctctttggcgtctctctccttttcgtaccttctcaagttaattagtagcctaatatgggcttttaatggcctttttctcaagcattgaagatttttctttaattttatctttgtttgtatgtatccaaatttaaaaccaagtctctcatttttattaagtttgttcctaatattgatatttacttttgtatgatactatatgccaaaagtaattttacatattaacaggatggtaagattataattgaaaagaaaagctataaaaataatgctaaatatacgggacgagaaatattgattcaactgtcattttacgatattaccaaaaacaaaatgttagtcgtttggtcggagcatttacttaaatttggtgtatctattaatgttacaccattatttagtttcaatagtttaaatatattatattgcataatttgcattcattatttactgtcaatagtttcacttttgctacttttaacagtttcgttatacattctgtttattgatttaaccaaaaaaacaaaatttgtcactttggaaatgtcacaaattagtcgtttagtcagaaaatgttattttagcgtgtccattatttagttgcaatggctttaatatattacttgaatcattaattacattaaatagtttgaatttgttacttttaaccgtttcgttataattttttttaatgatttaataaaaaaaaaatagttactttggaaatatcataagttagtcgtttagtcgaaaattgacttaaaatctaaattttcccactaacacatcatcattatttaatttcataagttttcatatttcacttcaaccgttacgttacgaatgttattaatttttttgaaaaaggtttgatatagtattacttcatatcattttacttagtaaacatacttttaataaatactacatcatttaacttttttttttttttttgtgaaagaacgtgaaatttattgagaaatgtagaccaataattgactgacataaaagaatttaaaggaacaaatgagaagtaataaaattatgttagtaagtaaaatgacatgatttaacatctatttggaaggatcagtggataagttcgttggatacaagctcactcatgagaaacaccaaagccgaaacccatggccaaaaactagccgaacaacagaactgaactttgggacgagcaaattttcaccatttctcaggtcgattttaccacctgaaatgctactgttaagttttttacttttctatatttttctcttggctcgaattagaaactgaaactggaaacatctctatttcaattttaaaaaaaaaaagggacaagtgaggattctttttcatttgctttaactctaccaaaagggagatagaaaaaaaaaagactaatcaatggtgaaaaactgattcgagttctaacatctgacggtggaaaattggctctttgaacataatcgtcaaagactgctcaaatgatacttaagacaaatagagtgaatctatgaactctgccttgtaatgcacatccaacttcttaaagattcctccttgtcttgactcgtgattggaacgtgccatgatcctttctccgattcctgagtaataccggaaacaaaaataagatacagactcgggcaacaaaacaaaaaaacagaagcacagatttgatataagatttgtgaaaaacctggatcacaactgaaaaaggaggtggcatttcaagcttgagacagcctttcacaaaggtaaaccgaacttgatgtctttctttccatttttggaagaaactgttacttaatagttcaaaaatgtgatctctcatctcatcattagtcacaagtaaacacttgagtttagcagcagcgtagagccaatacctgaaaccaaaaatttaaaaaaaccaagatttgagtataaccaaaccaaaccatgtttgtgggagtataaaataagcttaagtcagagtcagtccataccaatcatcattggaacctggtggagtcgcatacaggacattgttattaatccattcttccacaagattccggtgattcgggttttctaaaagcgcattgacccgtttcttgtgcaagagaattagcggctgttttttgctaccacttttattgtaaagttccttcactacagcttcaagctgctctttttcacaatgtttcactgtgtcagtatttgcaggaatatgtattcagaaatgcaaaggaagaaaaatctatgagaacctgtggtagactgaaaccaccatctgcaaaattttgttggtagagcccaatatttgctccatctagtatagcttcgtaatctccatgcttttcaagccactcctgtcaaatagttaagaaaaccgtttttcaagcatcaaacttaatagaactccaccatgaacaataaaaaatacctacattgcatccaagacaatcttaaaaacagaaactacattatagcattttcttttctttcttgatagtgtctgttatatagctaatgatttcacattcagaactatacagaacgcagagaatggttaccgattgatggtcacatttgctaaaaccgattaataatctatgcagagtttaaacgaccaatgcaaaacaaatacagctattgaagtctcctttgcccaaagaactaagcataacaatattagacgcaaaatataaaaaaggcattattctttctaacctgaaactcactgaaatccgccataggctcgcatgaattcatctttgccttcctctccatagccaaagtcaccaaagaattcacaaaatcttcagtctctacctcattggtatcaacacaagccaaatgctcatcacagctcaaacatttcccggctgagctaacattacctttcttcacaatccatttgccttctccaacccacccaagaccatgccacccacccccatttttcaaaacagctgctctaagcagctcaatatcagaaccaatcccattatcactaacttcgctagctttcactccataaaaccattcctcgattgcttttgaagtttcttcactaacgcagccaacacattctcttaacttctgcagatatctataaaccttgttttctcggcctgtggcagcgcttacctttagcaaagccgagatctctgcctcctccaacacaatacctgaagcatccatgtgatcttccacttcataacccttttcagcctccaaagtatcacagaaacagagcaaagccggagcataagttctcagacgagggaccgatacaccaccaacagcaacaaggtctttaacaagcttgaaagcatagtctccatcacccttggcagcagctagtcgtgcaactgcagtgacagatgattcattaggacttatcccagaactaaccatacggtcaaaaatttgaaagccacggtcaatggcaacggtttgaagagatgggtcactaatgaacgcggagcagaggtaaagaagggattggaagtgttgctggttgaggcgaatgtcactggaagtgatagctgcatcataaagagccaatgcagctgagagatcctttctcttggaacatgaatgaagattgataaggagactcttttctggattacggtttcctttcttcttcttgttgggatttttagggctttcgtcgtcgtggcgagagcggcggttatcagtaccagccatggaacagtaatatatgtgcaaattaacagtgtggtttctcaaagttacaagctttgcattggcgaaagttgatgatgaaacccttaccctgacattaagtgagcagaaagaaaccatttaacaacaacattcagaaatatcaatcttttcacagagattgaaaccaggaaattgatttagatcagtgactaaactcagtatctaaaggggataaagaacaagtatatacacaagattttcatcagaacatagcgtttaaggaacatgcatgaatcctaaaaactctggacccgattcttaggctgtgtaaactaagctagtgactaattccgtagaagagctgagtaatctaggttaaatgattcgacattgaaagataacaactagagtttatcaatctctgtactttaagatcgacaataactttagaataggcggaaacttttaggtatagaaacgaacccagaaggaatgcgaaagcaataatggtagaagaagctaacctgcgagggatgagtaagcgaatttgagagagacaaggcgggacggcgcagagcaatgaagaaggcaatgaaggttttttcaatttcattgcttaattcattttgctgttgttccaaaacaaaatagaaataatttttaacacaaataaaaataaataaactaattttttattccaaaaatcaaatttaaatttatagagaaaattaattgcatttttttataataaactattcccatttttaaagaatttacattcaataaatttacacgattcattatagtagtttttcattgttaattagtttacctaattacatgtagtgtagtgtatgatatgtctaatacatgtgcgtgaaccacctggaataatggatagtccacatgttatgctcatataattaaacaatataaaatccccacatatgcctagttgcctgccgcctatatatgtatactatgattctaatggcattaccttaatctagtcacacaaaggacgaaaactttagctccagcaaacaaaaatggcaatgatgaagaatccaaaccaatacacaaagatagagaaagaagatcttaatgagatcatccataggagagctcagtttctgatccacaagattctccaacgagccgacatagagacattaagacagcaacagaagagaaataccacgatcaaattgttttcgtttagagtggttgggataagaatgaagatagggaagaagctgaggaagctaaggaagagttgtgtaatggtggacaaaaatggtgatcttattccacgtgttctcaaatctcttagacgttatttcttctgttcctctcctcgaaatgactccaatcttcctcctctcttcgctcttcatgtttgaacatttcttagaaaaggagttattttgtttttcttatcataccatatcatatattgaataaatactcgatcctcaatctaacaatggtgtaatatcatttttttcttaagagtctcaactaaggatctggattcacatctcatcagtcacacattaactaaaaaatggatctttttgttcatatttttttttttttttgaagttctcctaaaagatagggaggacctttttgctcgttttgagacatgtgttcttttgtttatgttcggcacatttacatttgatgtacttttaatgtggttatacataagtttgggacttatgagaaaggcaaaatggtagtgtgaaatagtgaataaggtgtacgattatgttaaccccccaaaacaaaaattgtgcgattgtgaacatggcctcagtccatcagtccattgaacatttctacaaaattaatcaaggtcggtggatgctttagtactactttacgaagcattttaattccaccggttgactaatttcatctttgtttgcgtagggatcgttgactattatagcttctttacaagttttacattgtaaacttatttagtttgtccgatcattaattaggtttctgacgttcactcttattatattcttaaatctttaatagaagcactcacaacttgtctttaactccaagtaaccaagctaaattttagtgaactgaatttgaatcaaaccaaaccaaaccaaaattattcattaaacttcgttaaagaaactgcagaaccaagccacattgatttgctagttaattgttacattaacatgcatgataaattattaaatgcttacttcgaaaacaagaatagatccatttgaaaacaggttttactagattgagactaatccatcagatttagcctaaaatattttctcccaaggaatctagtgaatagttggttctgtgaactaactattacaaaaaaaaaaacttttgaaaaaggatctttctttcaaaaacaaatttacttcataacaaaattactaattctggagaggctctttgtcgtcccacatatccaatcgctttctcgctttttcaacctgaatcatcatatggtaatcatcttaataattttgaaactatttttaacttttgatagaggattgtaaaaattttaatatgatgtgacttaatttcatgtaacattacctctttatcccaatctgcttgatacgtgacgtaaagtaagattagtgtttgcatgagggtgcctccaatcatcccggtccatatcccctgtaaccaaattcacatacaagtcttcttattaaatactgtagatagtaataaagcatatatcatacagaaaatatttggaagcgaacctttgcttgaaaattgaaagtgaagccgagaatacatccaattggaataccaactatatagtaacaaccaatattcacatatgccacgtatgtctgccatccacatcccactgccactcctacaaacaaaaacataccgaaatttgtcacatccggttccgttaatatactccggtttatccggttttagctaaattatttgcatgtataccggacaagacaggttggattccgttaagaataatggtgacggcgagaaaaggacataggtcagagacggccttagccacgtcagcatccgacgtgaaaatgtagctgacgttgtcacgtgacgcaatcacgacaagtgcctctacgacggagatcacgaaggatacaaaagtcgctgtccatgtagagaataacgccgatttcggatttcctgctccaagctcattacttgtacgtacactgtcacgttttattttattttattttccaattttcagtaaacgtacgtttaattaataatctggtattgattaagaaataaatactaaccttacagcagcattaaagccaacggagaccatgaatgataatgctgaaattgacatactgccaaacaaaataaacaaatgatacatcgaagaacaatacttgtttcaatctttgtttaaatacaagtgtatccaaacactgaaaaagtatatgaaaatgtaattagttaatgaacttaccagatagatagagaatctagagagagtgcaggatctttaagcaaaccagcgagaagaaccagaatctgtgtataccacagttccaaacagatcatgaccgcagagccagcagacagtttaaagaagctccaaagaccatgtaacgatttccagctaaaaccagtccaagtgtctttaaaccttacgctagttataacgtaaaacgtttgggctccaactatgaaccaccaagagatagtaagaacataagctatacccatgaggccttggcccattgcgtaaacggtgatccacgtcagcgatatctggaggacgagggcggcggctgagatgtacgcactcggggccactacgctttgggcctggaggaacttttgggccgtgaagtagacggcgtaagcgaagatttgagggatgagtccggcgatgtataaagatcccatgtatgataccgttttaggctcgcctaagaggagaagaatcgggtacgaaaaagtgtatagtattgtcatgggaaagccaactagagcaaggacaatggttgctctttggagatagatcccaagcatctcgtaccggtgggcaccatacgcttgtccacatagtgtctcgaccgcactacccatgcccaactaaaaaaggaagaaataaacattataaaaagctaattttttgttttctttgacttattctgagaaagagaataataagtttttgactatacgtacttttccgaagcagacaagaattttcagaagacaagaaaagtaaatgatgctataatttctgggacactatggttgcatatactatataaatatatttatttgttgaaattgtttttacattattatttttttaaaacttctcggacactaaaaaagaattatagtttattaaaaaaaaaatttacaagctatgtatgaatggaaatgaaagattatatgtatatactcttacgcactccaaattgtgaattttctttttatgcaaatctaattaccatgcatagatttcacttggtgagaacaaaaaaaagagaggaaaaaaaacgtttttccaccaaattcatttactatagttaattgggttaaccaatcacagtcttagtttaaaaacttttatgaattattttggtgatcccatagtaccccaagtctccatacatatgtaaggtaaacgtaccatgagggcataaacgaggctgaagctgctgtttccgatggatgccgcggctagttgtgtactgcctagatgtccggcgaagatacgagcggaaatacccattccaccgttgattaaatagacaagtatagccggaagtgctaaccggagaagtagttttaactctatgcacatgcctaagtacacgcgcctccggtaaggcaagctactctccgttaacacgctctcgagcccgacttctaacggaagtttcttctccgtgtccaccaacggtcgtcggagttcgattcttctctccaccgtctcatttgacccattcataggttattattttggttattaacgtctatgcttgtttggttatgataagttttaagaggaaactaaactgttgttttagtttatataaagagtgaggagtaaattgggtggagaatgacgatcggttgggttttaattaatataatctaaatgatcataagaaatacaaaccgttttcggcgttttgtgttttaaaatactacatgtgtaaaaaagtcttcttgatttggtctttgatattttctttttctaatggaacgagaaaattagagtgtgatcggagacaaaataaaatattgtaagctgttatataaaacaatataatgtagattttctttgcaagaatattttaatctaaagcaaaataaacaccctaatattaatacaaaaaaaaaaaaaaattgcatagaacaaaacgtacggtgttgatgctcagtgtacactgctgcaaacagaggagcaaacctcatcgcccaaagtgttacggatgcgtctcggtctcaatcctatatatgtagctgtgggggcatctttcttggttgaatggtgtttttgttgaagaaagaggtttgtcttctgtttgctagtgagaagtctttttggtgttgatgctcagtgtttgagatcaacttttgtacatggggggtttggtttgtgaggtactcaatgtttcagagctcattcttttttgtatagaccactcttgaatatgttggagttgggccttgtggtaagctaactcttgttcgcttcatctttgatttagtctagccttgtaatcggtggtttcatgtgttgaagttttaattttctaatataattccagatgacagaaaaaaaagagaaaaaaacgtacgtatatagctgtcttatttttatttatttttgacaaaatataggctatgtcttatatgttttaaaacctggacgccaatttaggccaagagacagaaaaagtcggtcaacaaaatcaacttttgtgtttgttttttaagtgtcgattactatataatccgtttacccgcgtaatttatatatggctgtgcccaacagactttatcagctcaatgacttaatgaaaagatgattttgaaagatgaattgcatcgttaatcaaaaatttccttttagcttctttttcggtcttcaaaaatcaacaaatctatttcattccatatttatagcatataataattaatatgtcgagtaatatattcaatattttgctaataaatctttaaaaaacaatctagtgacatttgttaattatattggtgaagactgaagacaatgtatcgatttaaattttacgtaatatttttttgtcactttccccgtttgactaattttatttttgtttgcttaagaaatttacctattaactatacatttatatttgtttgaatcatgtatcattggttagattactgacccgtcactatagttattaatagcgtggccctcacaatttgtcaagagatgcccatgtaactcgtgtttggattttaggtatgacaggaaactgcgatccacgattctcgttacaatactgtgcattgtttctaattttcgagtagagaagcttttattcttatatgtcaataatatgcattaaacgactttaatttgaataatggcatttcgacaaataaacatccattaaattacaatgtatcagtaaaagaaaactggatagctatgtcacattgatgtgctactttacttactacacccaattacatcaaaattccataataaataattaataactgtctatagagtgaagacataataaatcattctgagaaaggaaagaaacatcaatttaagaacaacttttcgtaaataaagaataatccatcagacaaaaatatattttaattgttctatttccatagaacaagcataataaccatgaaaagctacgtacattgaaatcacctgcacacacgacacttatttccttttctttattgtctatcactccaccaaacttgttataacctgaatattaaatatcagattgtaaagtttaatgttaattatttttaaaaatatacttttattctgtaaaatccattactagttttggagaggctccttcttgtcgtcccacagatccaaacgtttcctcgctttttccacctgtatcattattatacaataataataaaccttaataatttggacaaactctttgaatcaaattcagcttacactatgatataacttaatttcatgtaacattacctctttatcccaatctgttcggtacgtgacgtaaagtaaaatgagtgtttgcatgagggtacctccaatcatcccggtccatattccctataaccaaaattcacgtaaaattatttttattaaactgatagtaacaaagcatatactaatactatacataatatatttgaaagcgaaccttggcttgaaaatcgaaagtgaagccgagaatacacccaaccggaataccaacaacgtagtaacaaccaacattcacatatgccacgtatgtttgccatccacatcccactgccactcctacaaacaacaacaccaaaccgagatttatttggtcatgttcggttaaggtgcaccagttaagttttctagtttaaatctaaatgaacttataccggacaagacaggttgaattccgttgagaatgatggtgatggcaagaaaaggacagaggtcagagacggctttagccacgtcagcatcctccgtgaaaatgtagctaacgtaatcacgaaaccaaatcacggcgagggcttccgtcacggagatcacgaaggatacaaaagtcgccgtccatgtagagaaccatgctgatttcggatttcctgctccaagctcattacttgtccgtacactgtccatgcatagtaattgtatagaaaattatgatttaacctgagcaatgtttggatgataatctgaaattgattgagaaacaaatactaaccttacagcagcattaaagccgacagagaccatgaatgataatgctgaaattgacatactgcacaaaaataacaagaaaaaaatagttagataaaagagaagtataagtgattccttcacattaaaaccaaaaaaaaaaagtataagtgattaagaaaatgatatagaatcaagaatcaagttactaactaattaatggacttaccagatggaaagagaatctagagagcgagcaggattttcgagcaaaccagcaagaagaacaagaatctgcgaataccacatttccagacaaatcataacagctgagccagcagagagtttaaagaagctccaaagaccttggagcgatctccagctaagaccagtccacgtgtgtctaaacttgggactaaccgcaatgtaaaaacactgggatccaacaatgacccaccaagaaattgtaagaacataagctatgcccataaagcccatgtccattacataaacggtgatccacgtcaacaatatctggaggatgagggcggcggctgagatgaaggcgctcggggcaaccacgctttgggcctggaggaacttttgggccgtgaagttgacggcgtaagcgaagatttgagggatgagcccggcgatgtatttggatcccatgtacgacaccgttttgggttcccctagtaggattagaatagggtacgagaaggtgtatagtaatgtcatgggcaagccaactagagcgaggactattgttgctctttggagatagatcccaagcatctcgtaacgatgggctccataggcttgtccacatagtgtttcgactgcactgcccatacctaactacaaaaaacacatgaaaaagcaaaaaaagtagttacatataaagttttttgttgaaaatataatgtgggcaccagttttgttggacatcaacaatatctttgtttgtatactctaaattacgggaataacttattggctagttatacttatcaatgaaactataaaatgttttgaatagtagttttcctcttaaatcaaatctattaaaaaatattataaacacattaacgtttataaacacatgcatgagtggttgagcataaataactaatgacaactgacaagacacgatgagcacatttcatgaggaaaaagtaagcagagacatcattgtgccatccttatcatgtgtatatttcatatttgactggcatgcaacgaatgattagtctgctaaacctacttcaaaagctctatatgtggacaaaatttccactagatactttagatactcgatatgtgaacattagtgaggtaattttaagaaatacgagacttaagcattatttatcaaagatagaaccaatttttggaagaacttatctaactttttataaacaatctacctagttgactacattctttaaatgtttttggccaccttagatgtcaatacaaaattttcttttaattatctatatatatatatatattaaaagctataatcattctcaaacctatatgatttacacattaacgattgtaatttgactttctcttttcatttgatataatactataaggcaattggaaactgtttcgtcaaaacaagcttagcattttatattaaacaaataattgttcactactatgaccaaatcgtaaccatcaaccacaaaataaaaatcccacatcgttttcattagttagaatagtattcaaaatttaaggcataaataaatattacattgcaaaaatatactccccagtatattaaagatggaaattttaatcttatttaagaaaattattgtttcgatccccggccccggttgaagacaatttaaaaagaagaaaggctgcagagtcattaaatgatcaaactaataaatggatttttaaaacttactatatatctatatttggtgggaaatgaagaaaatttcaaaagaataaatcgtacaagctgtatgtagtgcgtaagcaaataatcgtgaccatcttaattagctctaataagttaatgttaacacacgaaacaaggactattgttactacgaacctttcacattaaagcaatttttttttttttttgactccactagttatcgtgctacgaacctttcacattaaatactgaatgcaaaaatcaagaaataatatttaataatatcaccgcgtctgataactcgttgacattaaaacgtaccatgaggccatagacgagactgaagcagctgtttccgatggacgcggcggcgagctcatttttaccgagatgtccggcgaagatccgagcggaaatacccattccgctgttgactaaatagacaagtatcgccggaagtgccaaccggaaaagtagcttcatctctatgcatgcccctaagtacacgcgcctccggtacggaaggctacgctccgttaaaacactctctagtccgagtccgacgtctgccggaggtttacgctccgagacaaccggaaccaccaatggtcgccggagatcggctaaattcgtggtttcactaggcacttccatagattgggaaaaaatttacaaagaaaagggttttgtctataatgataagactgaggaggaaatttggagatttaaggatctgtgtggttttttttgagataatcaaaatgaagctctttagtgtgttataaatagagattgtacacataattaaaaaagaaaaagttttattgaaaatgggtatctatttttttatatcttttttcctttcttaaatgaacaataaaacaaagaacgatatgatgatccaagaaaaaagtacatattgtagattattcatattaaacaatagaacgtgttgcacacaaaagaaaacaaatctaacgtagaagatctttacaaattctagtataaagtaagagaaaacagtagaaagtcctaatattaggtaaacaaacaaattgctcacatgggcaaaaattagaaagctcagttttacactataatccaaagagaaaatcataaatatttaattgactactcatcataagcatacaataatattcaaaagaatgacttgcaaaacaaacgatactacaaaaaattatttattttggtcgacaaaaaatgcaattatatcatttattaagcaaaacgacagttacaattaatcgttaagttatactagctgacaagaaaaaggaatcgtttcacggaattctaaggaagtgaaagattattctcttacaaaatccaaaagttgaactttttcacacaaaaactcaccatagtgatttcgtctagtaaaaactcttatcgtgatcgtgtgttaatgcaattagttgcattacgtaagtttctatccctaagaatatcgagtagttaacttcattcatagttaccatggcggtaatagtttatatatcaatacgagtaaattcaacgcctgaagaaatcgtgcctagtaggaaaattaaaattaaaatcgtgcctagtagttgaccccaaaataaaaattaaaaaattgaaggaaaatggtaaagattcataagacaaaagaaccgaataaatggtatgtaatcattaaattgtaagaacaaattaggatataggaatataagatagaaaaatacagcatcgtttacaggctgttatccttagcaaaataaacgtggtttgctaagcttttagccatttaggttaggttaataatatatgagtacttttatatgttatgtcaacacacaaaacgagaaaatcaaaatctttaatccttaatttccaactaaattataatgcttataatttactccaccatttacttcactaaatatacgataacgcttataacaaatgaaaataataattagtataaatcttcatatataataccaacatgtctcctcatatcatattcatatgggtacggtaacgtaaatcataccataagtccatagacgagattgaagcagctatttccgatggacgcggccgcaagttcttgactaccaacatgaccggcgaagacacgagcggatatacccattccggagttgactaaatagataagtatcgccggtagtgccaaccggaaaagtactttcaactctatacaggctcctaagtacacacgcctccggtatgacaagctactctccgttaatacgctctcgagcccgacctctggtagaggtttcacctccgtgtctgccggatctactaaaggtgtccggagatcggttctttccactgtctcatttgacacatccataagtttaatttagtttgttttttttggtttggtttttaaggttaaagttttgcgagcaaaagcaagaaaatggtttgtttataaaaagactgaggaggaattatgggtggacatgtggggtttttgacatgatcaaaatggagataagaaaactgaaccctttttgtgttgttagattgggatcgtacacgtaagaagaagagaaaaagaaaactcttattggaaaatgggttttatgctttttaactctctttttttttccttctttcggtctgatgagtgaagactgaagagggccacacgaaactgcgggtgggatccagggattaagtaaaacacgattgtgaattactatatatttatataaataaaatctatataggtaatagaggcaataaaatataatatttagacacattgcatagaacataactgaaatgattctaataaagaaatactattaaatatatattcaatacaaaatctataaattaatatttaggaccataatattttcttgatatatagacattaattgacaaatatattaatatttattagtttaaacataactatgtcacttattaaacttagattttgactaattaagtgtggtctagaggattttattatagtggattgatgattttcatgtaggtcaagattagatacttcactcttttccatctccgcaaatttacaaacgccataattaaggtgaacactaacggacaaaagtaatcaaactataaagacaaggactattgggttataaagtgtcacaagcgtgaagaaaagaaacaattgaatcttcttgctttagttttgttttaccacgtgtaaaatgtacgtatagttaattggttagagtttaactaatttcaaattccatcacgtgactgttagttacagtactatcttattatacgttgcgatcgtggtaccaaaaactctatatcgtataaaatcttgatgtcgtgcgaaagactgagcttactttatcaataaaacagtaatgatttatacgtaaaagatttgagattcagtgactgcgccccatacagcatcatatactttataaaaataaatgagatgatcaaattataagattttatttgattaaaattttatagctatgatcgcgaaatattacagaaactatggaaagaactaaaaaaattaaacaaaagatatgagtggatactttatagtatatcgacatgtcaattataaccgatgtatgccatttggctaaaaacatcacatgcgtctttagaatggttttgcaccaaataaaaaacaaaacaaaaaaaagtctctagaatggctgcaacaaagaagtcaccaaattttggaattaaattcatgaatgaacccaaaatctgaaaccgtaaacaaacgattcaaactcaaagtttaacctaaatatacttttaggagcattaaaaagtggatataaccgatgttgaaatgtttatgtcacataaaaatgagttacaaaaatattaattagagttacggtcgccaaatataaaaaatagaaaaataaataaataggatttggagaagctagagaaaaataataataagaacaagacgagctttttattttgtaaaaaataaaaattttgctaaaaattaacatttttatataattaagcatttaagcttaataataacatatgggtaatatgagattatcttaaaaattagacaactcaagcaaaagtctccaattttatatcattctaaacagtttcttctttagtttattgctaaattcaaatagaaaaagacaaagagtattgaaagttaaaaactaatcactatatcatttttcttatattcgtagtcaaagtacatgtacattttctatacccttttttagcctttattacttactcaaactctcggtagtttcctctggttccgttattccgtctaaaataccgaagtaccgaacatatgtaaatgtctaatattgcacataaatagatatgcaaaagcgatgagatgaataaatgatcgtaagtaatatttgcttgatatcaatgatatgatagtgacccaacaattgtctacttgcgagcgacgtttgcaccacgaaaataggcatggacttgtctatttatttttatttttttgtttgctaaagtggtcttgtctatttattttaagttcttcatctaatctacagctgaattacacaaacaaacaaaagcgttatgaaatcacaaactcaacttgtaagtgaaatcttacctacaccaaccttattgggtccgtaccattcaatgatttatgcataacactgaaatctagaaaattgtaaaattaatcaacgtttcgatatgtttactaaatttaaatcaactttcttacaactaaaaataaataaattatgtggtattttggatcactaattatttctggagtaattagttagtgatccaaaaatatggatgagtacactaagatgtctcaaatctttgtcttttatcctaaatattggacctatgtgatgtctacaattttatcggattgggaaccgtacaagaacaatttagtattctctttgtctccgatgttcaagctcaagagctttctgagtctccttacagatacagatacatagaaacttaaccattaattatttaattgttctcactccatacagaaatcgtacggtttaacctttgtacaattttgaataaagcaaacaaagacctaaaagctaaccgagctctcccacctagacttagcagctcattgactcgaccgagctctcccacggttaggaataaaatagagtctagtggacgtgaagaaaacaaaaagaagattattaatcaatatttctcagctcataagtaggtcaagttttgacatcataacttaaatttaaaattgttgatgttggtcgttggataagcggtaattaagatatttaaatttagtatagtaaacattataatagtggacttacttaaaataagtagacataatttgtgaacgtaagataagaacaggcctcttacgcaggcccactttgtgaccagcgataagaagtgagcactgagtagcagcgagttattttctactctcagatcatcactaaccaacacaaaataacatctaaaatcctttcggaagaatctctcagaagaaactaataaagaaaaacctgacacaaattttgaaccctgtctaactctaaacatggtttcgagaaattgagtttttgttttcttaaaaattaatttagtttcttattcttttaattgtgtcttttatttaaccgttagcttatcggctgagaaagatttcggctatgaataatggggcagacacatattgacgtaaatgaacgcttttatgtcatcatccttattaaatttagaaaacacgtggttaataaatactacgaaatacaaaaaaaaaaaatgaaatgaaagcatgccgcatgcggtacacatacacatcttctgccattaataacgttcgcaatgcatgataggttattacttactccttttattcctaaaaaaaaaatgacgttttcacataaattaagaaaaataaatttaatattatttttattatttttctgttaatttaataatataagtttttatattagttactaataaaaataataataatattaacctacaacatcaatcttcatgaaacaaaaaataaaatccaaaacatcaaacttcacggagaatattaaattttgaaatctttgaaaaatggtatgcgataaattataattcaaaatgcgtctttacttgccaacattccaattaataatgaaaaattataatttaattataatttcttcttgctttaaggtattttatctgtcaacaaaaataaataaaggtattctatcctaacgtgttattctatccgtttcgtattagttgtcgttgtaaaatttaagttttgttttaaattagttattgtttttagtttttaatgcaaatgttttacagattttctaattttattcctatttttaaacttattattaataatatcaaataaaataatatattaattaagaataaaataaaaaaataaatgtttttttaatggctataaaatccttaaataacaactaatttaaaataaaagaatataacagaatattttatatgatataacgttttcaaattagttttttcttttttgtaggatttgaatgtgaaacgttgacaatttgatgccaacatgtgaaaccattaaccatacgtatacatcctttccttaattagtcactaaaactagtttcaaaattatgattgaatgacatcctcgaaccgattgaatgacatgcatgcagaaggcatgggtttacaaaatacaaaattatgtgcatatggtttaaatcggtacgttagatacaccgttttggtttcaatttgaatagtgtaacattttaattttgaagaatttggtccccattcgtttattttcagaaaaaaaaatcatttagccaaattgttttttttgtttaacttaaccaaattgttagttttatttctttgtaatttatccaaatgagcattccttatttaagaaaaaaaaacgtaagattaagtacacaatccacaatggcttatgaaagcaaaaaaaaaaaaaaaaaaaatcatgttaacaaaaaagtttgtatgacatttatgtctataattggaactgattgataatttatggtgaccgcaagaaatttaattatcatgtcgtggacctatatgcagttatgcactaccatcatttttagatgcgactatacgtcatttaacatttcgcaaaacaatgtttatgtatatttatacataataattttaattgatgtttacgaatttcacatttatttcacatttcttttttctttcttttttttctaaacatcaatcaacatctagcttttaggtctgataaatggcgaagacaataaaacaaacaatttcaataaaaaaattaattacaaaaccaaacatgtacatacttttttaaagctaaaatcacctgtcgagagggtcaagtttagacacacgcatcactcagatttttttatctatttttttataagaaaaataaaaaaataacactaatccatctccggtatgctttgcaacaccggtttccatggttggtggtgattcgtcacatcgaccgcagagaatccgatttggtctccaccttcgaaaattaacttagaaagaatctcttccgccgttaaactcttcaaaccaatgtttctcatgagatcttcaagttcctttttcgttatccttatcttaatctctcttctctcagaagacgatgacgaacttgttgacgtaacgttgcttgtttctccgagcagcttctctccgtcgtcgttgtcgtcgtgaaccacggtggatcttcttcttctccttctcttgttatatgatccattatcgtctcctgaccacgacgtcgtcgttttttccgttacgcatatgcagtttcccattttgttgtgtttatttgatgattgagtttgttgagataagtatttatagcttaaatgtttgattgttaatattaaaaaatggatataaggctcgagggaaaaagattagatttgtacggccatgttgggagagaatacaaaggttgattagtctttacgtagaaggtcttgtttttcaaagttacgttgtaattagttgaccaaagctgtttcatcctcatccacttcttgtaactgatttacttccaaaacagaacacaaaaaaaaaaaattgtcgacatgaattacttcaagtaaattgcatcttacgtacaacttctatattaagatattggataacattttatttttcgtttgataatcttatccgaactcatttttgagattacgtgaaaaagtgataagatacgaaaattgaactctaaagttagataatacagtataaattcgtcttgaaaaaatgatgtaaaaagtaaaaacaaattagatttttttttgttgtcaacgagcaacctatcctatgaccaaaaaaaaaaaccttcaaactttatccctaatatttgacttagtgaattaatgaggaccgtataagagtatattcagagatgtaccacaaaaatttagtgtccactagctttttggtaatatataatttaataattaattataactttggaaagaaaaaaaatataaggggaaaatatcagttaactgatggaagttgatgggagtggacttaaaagttgcttagttcaaataattgtctattatgtcggccgtgcccttccaaagacttgcaacttacaacaatgattttagttgttttatattctaattaacaaaatattagttgttggaaatattagtattttttttgataaccattttggtaatttagtaactttattcactaacgttatattacgaggttgggacatgatggcatcgtcaaaagatagtgacttcgaatctcttacaagatagttaaataatatatttctgcgtggttcaacaccatggtaacaaaattgtgtatcaatacctgaatcaattttttcatggagggttacgccaaaaatagtctaattattttgtatggaaaatatgtagtactttttcacgtgataaaagaaataaaagtatgaaatggcgtctaatctatgggtaaaaattttggttaaaaaaggaataattatttttgtttctttttttgactcgaaatatatttttgattataaaagaaggaacgtgtgaagtgtcacactgtcagcttatctatttgcatgggaagggcatcgctttttgactttttcttgtcttactgattcctttttcacttatataatctctttctcttcttcctccaaattcacgtgtacaatattgtacagtatattgaaattttggtcatcgtacttagttgctctgcgtatgaacagaaccaggtcaaaactacgtattgcaaatttccaccaagaaaaaaatagaatacggtcaagtattttcatttttctcgtccattattttcatccattagatatacattcaaataccaatagcaagaattacgtacagtataactaattctatatggcattatgtcatttcttttataggcattatgtcatttcttttataggcccatattgagtaactgaaataggcctgattcacagttaaagtagtgtatcgttggggagcccgtttcccccaaagagaaaaaatcgttatataccaaacattgaactaaacaaatacgaatcgaccaggaaaaaaatgaactaaacaaataagaataagtcaataaactgttcaggacttcatgcttacaaaaggaattgagtatttttaaattctaatactagataaactatccgtgtatacatgcagattttgctcataatattttctatctcactaatagacaatcaaaatttgactaatttttatactttctttacatcttataggattagaactagatttaccgaaatttatttatcttctcatgacaagttagttgacacatggttttcttaaaatttgaaatattttttttgagaaagttcgtcttaatatatgagagatttgacacacatgaactgataaaatccaatcaatcatatttcatttgttaatggcttaataaattattacatatcaatcacttggacaatggagtatgggacatgcatgtcacgtgtttatggtataagattatgtaatgaattcgaatatgaatagtggaaaaacgataagagtttgagtaatcaattgattaataaaaacactaataattgaggcaaagttaaaaagaaggaaaggacagaacaatcatggaccacatgtagactttgctagtttagttcgtcggtctccatcgttagccattcactctccaatccaacaacaccctcgtcgagtccggtctcaatctgcctattgatgggttcagattagaccacgtgtcaacgttaatagacaaaattagttggacctgcttgcaatgagtgaacacgtgtcgaacagctgaactgcgacatatcttgtgtgctttcccatgcggagatatatatagaccccaccttcagctacagagaatgaaataagccaattatatgtttatgtaattttgtcgaatctgcaccatctctttcggatacatacaaaaataccaaaaactaaattcgggggaataaactatagtttctcatttcaaatctttttttcatgtaaactcaaagcatttgccattcatatatttcacgtatgcttggctaagcttaacgactattgtacatactaggacgtgcacaaatctctaaatggtaccatgattttagttatacttcaatactgtgaatgagggttttaaatgacaagaatatcagaagtttcacggactatatggattaatatagatttgatataaaattccttacttatcaaaattaatcatcgtgtgtctcacaaatctatattgaagctactgtagaaatgttgttagaatgcatgatggtacgtcggcaagtaagacatcacattgtatatgattgaaattacttttagaatgggaaaaaataagtctgaagttactagctctcgtctaaaatgctgaaagaaatacaaaatagtagtgcgtcgttatctaaatggttcttttacgtggactatgacatcttcttctgatcttaccgaacataactgagtaaaaccacacacaaaaagcaatacctattcacctttagtgtatatatattcacacacacacatgctcatcctcatcccccaccttcacttccaaatatattttgaaaaacccaacgaaaaagtattaattttgataactaggtgaataaacgtaatttacgatttaaatcacagcgggtatacaattttcttaggtaaccaagagagatatgggcaaaggtcggagcttaccgattagtcgaagcgagaggtttcttgggagccatcagcagtccgatgaccatcatgtggacggagaaactacctttgagctggagctcatggaagaggatgtctggtcggtggtcgagcctgacgaaccaaaggaactaggtgcgtggaacgcacgctctctcgaggccagtggcagtgaatggagacggaagggaggacgcgtgagtgacctgaccgttccgagtgatggacagaggaagagacacgtggcgacttctgcgccggtgaaagttcctgactggagcaagatcctaaaggtggagtccgtcaagtcaatgcataataataataacgataatgataatgctgacgtggcggattgtgattgggagagtgcgatggtaccgcctcatgaatacgtggccgcgcgtagccgtaacggtgacggtggttcgtccgtgtttttgggcgtgggaagaacgttaaaaggacgtgacatgagacgggtcagagacgccgtgtggagccaaaccgggttttatggttaattttacgtaattaatttgatcattaatatttgattgtagtatatgatttgtccatagagttgaagtaattaattaagcactatacaataactagtgtaatcatcatttatttaaaatcactcgtctattctacatgtaatttaacattgatcaaccaaattcaatatcaaaaaaattaattcaacggtctttctcttaaactctagctttgattagaataatcaagaatttaagatagctgaaaatggaatatttccgtgtaaaaattaaattaaaaccgttaatgtcggcgggacataaatggtaataaaaaaaaactcgtgagaaaacataaatttcccaatcggacttacttctcctctaaccgagaacacaagaaattctattaaaaaaaacctaaaaatgggttgctttagcagcaaacaccgaaacacagagagtgatatcatcaatggcagcgtacagagctcaattccgacaaatcaacctgaaaaccatgtctctcgtgatgttctcaagcctcagaaacctccttctcctcaaattccgacaacaacccaatcaaatcatcatcaccaacaagaatccaaacccgttaatcagcaaatcgaaaagaagcacgttctaacacaaccattgaaaccaatcgtttttagagaaacagagacaattctaggcaaaccctttgaagaaataaggaaactttacacgttaggtaaagaattaggtcgaggccaatttggtataacctacacttgcaaagagaattcaacaggcaacacatacgcttgcaaatcaatactcaagaggaaactaacgagaaagcaagacatagatgatgtgaagagagagattcagataatgcagtatttgtctggacaagagaacattgttgagatcaaaggtgcttatgaagatagacaatcgatacatttggtgatggagttgtgtggtggtagtgaattgttcgataggattatagctcaaggacattactctgagaaagcagctgctggtgttattagatcggttttgaatgttgttcagatttgtcatttcatgggagtgattcatcgtgatctcaagcctgagaattttctgctcgctagtactgatgagaatgctatgcttaaagctactgattttggattgtctgtgttcattgaagaaggtgagtttgtgtgatcatatctcttgttctgctttttagtatatatatgcgaatgttttagatatcttaagattctgatgaatgttggagttatattgtggatatagattttgttaagaatagtctgtatcttaagaatcttgtttcatttagtgatttagtagatagtggtaagcttgaaatcagaggttttgctagttttgtgtgaacttgagaatgtgtgtcaatggattattatagaacttgtgtgttcttttcctttccttattgtcaaattatgtcagtttagttagttagttgatgatcttgtgttcatatgcttaatgtgttttgtttctaaaccgtaaaacaaaaattgcagggaaagtttatagggatatagtaggaagtgcttactatgttgctcctgaagtattaagaagaagttatggaaaagaaatcgatatttggagtgcagggattattctatacatcttgctttgtggtgtgcctcctttttggtctggtaataaaatctgaccaattctttgatttggtttatccttttaattatgttgtttatttgtgttgttgttgtggttacattgtagaaactgagaaggggatatttaatgagattataaagggagaaattgattttgatagccaaccatggccttctatatctgagagtgctaaagatcttgtgaggaagttgcttactaaggaccctaagcaacgaatctcagcggcacaagctcttggtaaagtcacattggtctctctaagtgcggttttgtagttgacgtacttttcagtgctttactaatctgtagtgatccttgtggtgttgttttttcagaacatccttggatcagaggaggagaagcaccggacaagcctattgatagtgctgttttatctcggatgaagcaattccgagcaatgaataagcttaaaaagctagctctaaaggtaaaaacaaatttctatctagaagtagcattttcttctatattccctgatcattggttctgtttctgatctgttttgcaggttattgcagagagtctctcggaagaggaaattaaaggtcttaaaaccatgtttgcgaatatggatactgacaaaagcggcacaatcacttatgaagaactgaaaaacgggctagctaaacttggctctaaactcactgaagctgaagtgaagcaactcatggaagccgtaagtattgccatcctatttgctctgcttcttatgttacttattattctaacaaaagacttttattttatatatgtttcaggctgatgtagatggtaatggaacaattgactacatcgaatttatctcagcaacgatgcatagatacagatttgatcgagatgaacacgtattcaaagccttccaatacttcgacaaagacaacagcgggtaagtttagtcccttgaggaacaaggtaaatatagacttgacgctactttaagaaacaaatttggatttttcttaacacaggtttatcacaatggatgagttggagtcagccatgaaagagtatggtatgggagatgaagctagcatcaaagaagtcatagcggaagtcgatacagataacgtaagttttgttttccctctacacagcatcaaaaaggttatgaacaagtcttaagccaagattgagattaatgggtctcttttgcaggatggaagaataaactatgaagaattttgtgcgatgatgagaagtggtatcacactgccacaacaagggaaaattcttccagtccaatgactgatagataaatcgagaagccttgatagaggaacttaaaaattaattagatatccaacattttttacagccgtgcaaaagagttgctgacttaaactagatactagttgtgttgtccaataaaaacaagtggcctttaatttctttctcttatctgatatgtcttgtccaaagttttggttactttagagtaccagcaaattactttcggagttatacatgtgtgcccaataaagaagttgtagtatagtagtaacatcatgttatatctcatactttcatcacttggaaaatatttcagagatgtagattatatacatatataaatgtatgtataaagagaaaagtgggttttaagaaaaagaattcaccttctggatccaaatgaattgtgataccgtgatccccataagcctcccaaaaaaaattctttcggcaatttattaacaacgtaaccgtcgattctcacattcccaaggtgtccctctttggggaaaactaaagagatttcgtcatgtttcaaccaaaactcgctaactgcatgaagttttttggtcggttggaattttggctccatgtttatatgatctaagtgggcaaaagaccaaactactcatgtgtgatcatattttcctagtctatttataactttttgaaccatactttacgttatacaaaaccctagtacttatggaaagttataaaaaaaaaaatctattgaaaataagaaaatgctcatatacacataaggttaactgttcgatttacataaaatttatagatactaaaccctaaattcacaaagtatctcatccgctgcggacgaaaccatgtcctatgatccggtcgaagaatattcaagtaagatctttctctctttgtcgaaattgtttgtctatgatctcgattagctttcatctgatcgatccgtcattagttaaccagcgtatatctaaccgtcgatctgccttagtaaatcccttaattataatggatctgcttttttttcaattccgtctcgtaattataatgaaacctggcagatgctgacgcatgcatcttttgggacatggggagttacccatccctaatggtctggatccttgtttagttaaagagaagatcaactcagagctcatggatctaggttgtaggggggatgtgtcaatgcacgcttacggtaataaggatacattctcggatgacacaaaacgttgactctatatattgactgagaacgttgatcctagcaagagagcttcgtggaagttttgtctcattgaaaatagatcactgtaactatcagtgtttgtcatgtagttgaaaagtcatttatggctccaccactctttatgatcatgagactgggaacaatcgctatatcaattttcttctaaagaaataaacaaggaagataaatcactttcatggaagtggtgatcaaagtaaatgtcgcaacatcaaaattaatgagttcatacatgcaattttacagcaaggagatcaaagttttatcttcgatcggcttcattccgttggcaaagacacattaaatctcatggacaaagtcaaaatattgaacccaaatgtagtaacgtatgacctaggtacgccttactggcttggtccatcattaaaagtttgtattaaatcataaaaacataatttgttttttgtcaacgataaaacaattatcatataaacatcattaccattataaatattatggaattaatttagtttagtttcgtttgattttatacaatttccgctttaattagcatgaagatgatcatcaagaaaaaatgagttctttttttccgtctctaactaaagatggagtgacattattcctttcttttttcttgaatgttccagggaactctaaaatttcagtgttgatgcatttccgtgtaacatagatcaaattaattaaagttgttgaagctttttcactgattgaacattaaacgaaacaaggattaaagtaaaagatgagcattttgctttgcttggtgtataagtcataaaagctattagggttgttgtcatgggcctgaactatgttacctatcatttaaaactaaatgtagcccgtttggtaagttataaaataaatagactccaaaagaaccgatccgtttagtccttttgaaacatatgctgaaaaataaaatggattcaaaatcgacagctagaaatagaatctaatacacaaggccacaagctaacaaatgtcgacaaaatgaataaatacagaagctaacaagttgatgcaacttataattttctatcccaattattttgtagaaaacaaatgaaactcgctgacactctacataatacgttaatgctgctccaagtgtatctgtggatgtttaaataaattttcggatttgaaactgcaaatatcttaaaccatagatcactgcatttgttgtctacacgccaccaccattattgtctctcacgtctagttttaagaaaagttaaagtctacctaacgttttctatgtattttctaattgaagtgtttaagtacagactatagtctatataccctcgaagagaatctcatccgttagatattttttttctctatatataacatgtctctgtcctttacaattcaatgcgggtcatgtgattaaatattactacgcctttgtttctttttgcttgcgacttttggctttactctttagcttgtggcccgtttctcttattttgaattattatttttggaatctttttcatgagtcatatcatattcaattattcatgtcatttactacaaatttttaaaatctttggtgagatcagtaaaatagatcgatatcacccatacacagtacttatgtataccatgcatgttgaacaaattatcaaaagattcggacatgtttacttatcattacatcgtcatacatgatacccaacaccatccatcatatcatacatcctttccattatcattatatcacccccaccacaaacccaaaatcaacgaagagccaacatttagattaaataactcaaagccactaacatcataattaaagcattaaggctgaacacacaaaagaaggaggtggtcactaccatgatgtattcatcatcaccctttctttgatttaacttaaaagatttttttattcatcttggttcgtaccaagcagagaactcaacacaccagagcccctgtctttctcactttttccaacttcaatggttcttgtttgcgagattacattgcttcctgatctcacccttagagccagtcaaggggttgttctcggataagatctggattgccctagtgaactccttgaagaagtaggcctggtccttagccatcttcttaacgattggtctggttcgtttgtcgtgtgcgagctgatggtccacaaggagcaaacccttgttgtctaggatgttacggtagtaattgttgtctagcaccatgggggtgccacggtcgttacgcacgtactggaccgcctttgggtcagggatcgagtcaggacacttgtgtagcatgtgagggacgtggtccgggtttaaggacgggtccacctcagggtacaaacgatggaccagcttgacacagtgagttcttcccacgctgtgtgaccctgcacgtgtcataaaaaaaaaaagtcaaaatctttcagtatcgaacttaaaaatctaacaagaaacttaaattccaatcgcctaaattcagatcccataagagtaaagtcaattagtttgattagtatgtttaagcatgcatgagtttattgaccaaaataaccttgtgctaggctattgtaccggggcataaacaaggattatcctgtcttatttgttagtactagtgatagatcggataaggataactttcaaagttcaactcagatcgcatacactccttttgtgattcaataaagttagctttagtagtggttcattagtcataagagtgtttcatgcatgagtaaattgactgaaatacccttaatctaaggcagcagcaacaaaatatctcggttggtcaagagtttttaatttcaagcgttacgttttttccggagcctagtgacaaataatcaaggatgagaaagataaaaggtacctaggagggcgacgaggccgggagtgtcgataccgatggatttgaacttttcaagaacgacggagatactctcgttgtggtcgggaagatatgactcgagcatatccgtcctgcttttaagtccatctctccttcctgtcttcaaaggaatataaggtcctcctacctacaccaaccccacacagttttgtcaaaaaaggaaaaaaacagcatgcagttttgtcaccagacagagaaaacggcacgattattatcctttaaacttactgcttcgatgccttctcttgcggacaagacgagaatgtcagaacatgagacaacaccaggacactccctctcgagagcttccttgatctcctcgatgtacctaaagtttctaagtccgaagctcctgtcgtgttctttctctcctagctctcttcttgtcgaatccagcaaaagcgacgcatcacatgactgtttaacccaaaaaaacagagcaaaacagagtaaaatctttagatctgttttaggtaaaatatcaaaacccatcatgcaaacatatgaaagatcattgtaagagagagagttttcggacctcaacggcgcagtcatggaagatgttacggagccaagagaaagcggtgttcttgtggcgtttgtagaggagtttgacttgttcacggacgatgtcttcggcctgaggacacgtgtccttgtagaagttcatcatcaaacctggctcagcctctgttactgcttcagatgttgcagagagtgcccaaaggcaaagtatcgccaccatcatcacacctttgcctcccattttttttctctatctttcttctctcactacaccactcttgagttgagtcagtgagcaagcaatgcagcctccttaaataaagggaaatggagttttctttatttatttttcataaaataaaagaagcttaatttgaaggttatagtaaattaaaggcaagttggtgaatttgctactgtttctatatgtttaagtacgtgacagatcatatatcattaagctttattcattttcactttgagaaaccaacaatattattataagactacaataattgtatgttccgttcagtcgtgattaagaatctatattcaatgaaaattgaaaagcgtagacttattataagaaacttatgtaattttttttattatttatcaaattgcagacacattataagctttaaacagaaaaaaaaatcatacttaattgatgcgacagctaaattagtgtaagtttgaatttgagaaaaaataacaaagtttttctacgttttttttttttaatgtatgaactttcatatggactgttgccaaaacatatattttccaaactgataaaaattaatttgtggagtttcattgaaattactcaaatgtatgctagacgttctactggaaatttaatttcggtaagaaatctaaaacccaactttgttactatttcgaaggacgggtgagtgaccatagatcatgctagttagagtcctacacagtgctatgagaaaataaataagtttaggttggagatattaatgtggatggcttgttagatagtttacctcatttagaagagtattttggttaactaaacaattcacatttttttgtcaaacaaaaaaccaatcactaagttttggattttggtctcattgagtggcatcagtggcccctatgactaaaaagaatcttacaaaaaaaacttatgcttcttttgttaataatacacacaaagggggcggctataacaaataatatttatggggtggaatagctaaagtcaaaatatattcatgggtcgatttgcaattacctgaaacatttgttattgttaaatttttaatacaacggataaaccgctccttttaggttatggaatctttcttttcgatgaactcaaggtggattcttattttttcaagtacatttcgattatttagttcaagatataattccatttgtacatattcaattactttttgttctgtagttatttatatatccaactattttacttattgtagtaattgtcagtagattcgtatcgtaaagtcttctcaaatattgaatgaatcttgatccatgtgatgtaataaaacacgttcaccactcttcactcttgagtgttccctatactttatctgtttgtgggttgaagttaaatattgaatttagtttagagtacattttgaacttttcctatgttttaacataaacgttgttttgatatttttcacataaactaagaaggtaaataggtatactaatatgtccctgcaaaattaagaaaaatctgaaattatgttatctttcatattcttaactaattttcatagaggtaaactagatatctaattaaaagctaaaggctccactattatttgttgcggaactattatgtttctcgtttcagtaacaaaggactaattttgtttagaatgattaaaactaaataaatatgtaacagagctataaaatgagaggacattactactaattcgattcttcttcttttcttaatcctagaattttttttatttttttttttcatctgggggaagtatcggtgcttttaccaagatcacattgaatctgcagattcaaattcacttcaaatttggatatttggattttccaattttttttttaaatgaacaaatttgattttttcaattaaaaatgaatgaactgtgaccaccgacactttgtttccttatccaagtgtcgccaaatgagtctctggggaccttctagtgatgtcactctctagctcagtggctccacgagtgctaaacactaaatactgattagcaagttctaactaaaaattgacgtgtaacatgtaaaactgttgtgttcatggtgatgataaccggttaagttccagtgtataggaaaccaaacaaacccggttatcaaaattgaattaagacaagttagtagttaatcatggatctttcatctgacaaatggacactgtactcatccgtgtcctcaacgttgcattcacaatggggcctgcaagattcaataccaagacaaaaaaaacgttaactaatatatttctctcaccagacttttaaagcaatctaggctcaaattcttagtttccagatatactgatatagtgaagaatatgaactctgaagtagttgccatgtcttctagttcccttctttaaaagtagcaaccgctatatatagcaaagaaggttccaaggaccgtataaattccatgtgatatgagctagttgaaggatttaagcattataagaacaagatttgatcggataacacatttctctttagttatagatgtgacagctttatttcatctctttgtaaagttaatttagcaaccattttttttactttcagtagatttaaagccatcatttaatcaatagatactgtgtggattgtctgaggaggttagtaggttacacttccctcttaagagagatatgagacaaaaccacccaaacacacaaatctcaacattaaccaacaaaatcatacccaatttgagtaataactatgggcctgaaaggcccaatgaagcccatcacaaatatccagtgagccaatgttctggatgtaagttacatatcatgtaacagaaaccgattaaagacaaagtggggcttttcttttgtggtacaaggtttgtgtcttttgtggttaattcggatcccgtggctcacacgttatctcctcactcactctaaaggagagagatctgtgacatcgatggaaattccaggggaccaattgcttaggttaacgactaaagaagggaaattaaaacttgcaagaaaaagcggctcggacacaaacaactgatctctcaccgattttgcagtttgtcaggaccatgtactgagattctcgataactatgatctgaacagagttttatatgacgacgtaaagttaattaagaacacatgagagattcttgaaatgcatgagattatcttgttgccctgatagattcagagttacttgttgttacaaggtctacgaaaaagtgaataattgagactcttttaaaataatttcgtgcatacaatgaatcagtcaaattttcattatttttcgtaagaaactgtaattaattaggaagaagtgaagttgcacatatcgtggtatccactattactagatatatctttcgaaataaagatatatagcgattaacgcacacaaagtccataacatttgggatttggcaacctcatgtctcaaatatttgtattaaaatattaaggcatttgacagactacactcaatcataataactcaacactaagacaatcataatgactcaacactaagacaatgcttagttccacactgacttacttttaagttttaactacataaagtcttagaagttacaaccaactccacagtagtacactatacctgtgttataattaatgaacttggttagcttgttcgcttaaagagaccaaactataaaatcattttctttgtatctatattttttttttttcataggctctttttatatttcagttacccctaacacatactttcctcgtacccatagctatgaaatgtaccttcctatctttaacgagttacaaaaaaaaaaaaaaaaatcgtttccaaaacatctctccatctccaatttttatgattgaatcttttgtaaatatctaatttatatttaatccgcctatcttacaccatatcatctcttatcccaacatcttatgcactttgatcctctcattttcaactgatttttaaagatatcaatatcatactgcaaaagtcaccccttggtcatatatcgaacgattaattccattccgcttatagacatcgttcttgttccaacaattgttgtactttcagcatgttgaagaagctgtgtaggttttttaataattaaacaagataataattaagatctttttttctaagctggactgacaattttgaggctctttacaattattacaacaattaattctttacatttcagggtatgtatgtatttgtattttataaacttcgaggggtcaaataagaaaatctgaaaattagaggtcttgtataaatgttacagatcttaatgcatcgtgctttggaataacgtccctggacccttgcgacgagacccatgaaacgttggattggatatatagcctaacaaattacaaaatcgatttgattcttaccccaccacaaagtctcatgtatttatgtgtgtacggacactggattcagattttttttgcgtgataaatacatatttattactatacttattctcgcagaagatcaataattattcatatagcaatagaaaaagaaaaaccctataactacatattatatatatatatatatatatatcgttggttttcaaaaaaaaaaaaaaatttgatcaagcaagattcgtaatttcttatgaaggacaataatatcacaagccttttcgagtaaattaacattgtcctcttcaaactttaacaatatctataactatagccaaaaaagattagaaagtgtaatttgaaaatggcttaggcaaaagcataatttaagataaagcaagtcttttcatatagtacatagttttttgtcttctagcatgaatcagactctatcaataattttggcaggtcttagtagaaatagtaccaaaggctaccactcctctatctaacccttttaattattatttatttttcacaaaatttaattcatagttatggcaccccaaaaaaaagtacgaaattattacagttttggaggtttctgaaacctctgcctattgtggaggcttttgattcctttgaagcaatcaatgacctctctgtctctcatttgccagcaaagagagattgtttaatgttgtttatggttcacatttttatacaatatcacattttcactgaatcttcctctgcgtctctcaggtaatttaattctctcttttctctcccatcactctgtctcttctctttattgggttttagataaaatgatggaataataatttcatggattcaggaggaagaagatcattcagttgaagcacacatttaaagggttttgttgagaggcaatggaagggggagaagagtttcaagaagaagaagtgtggtcagttttgagagaaagtgaaactcaaggtcctgaaatgaaaatgtccaaaagtaacaatctcttctcagcctcttcctcatcttctgcgaggtacattcctaaaggcaacgaggtctctggaggggcaaaacagtcatctgctccaatgaatattcctgactggtccaaggtttatgggtattcaaagaagaacacaagcagccacttgcattcatgggccattgacgatgatgatgaaggctcaatggttcctccacatgagttagtagcaaaaagacttgcaagaacgcagatctcatcattctctatgtgcgaaggaatcggaagaacgctcaaaggaagagatctcagcaaaacaagaaacgctgtcttaacaagaactggtttcttggaatcgaatatcacatcttcatcaacaacatcaccaccatagttttggcatggcatggagcatggctggatgatcaatatcacattcacacaaaaccctttttagcaccataccatatcattatcatgaaaaaaaaacctaaaaccttatggtatccacatgatttttattaaatatcaatgttattgtcgttatcaccatgtagggaatcatgacactaccaatatggttgagttctctttttttttttttgttgttgttgttgttgttgttgttaggtttttggatttttttagataagtatgatgacgatgaggatgacttgtcaatcccatgcatgggcccataccatttttctcatgttatgtttgtagttctcaatggtcttttaactctttagcagtgcttagtgagcttaaattatagtttagcaaaacaaaatggcatatactttggaacctttgaatgtgagaaatttgaaagcactctcgatctcttcaccattttggcctcgaccaagagagaaaaatgtagcgaataatgttaacatttttggtccgacacaaggttaaggggctcgttccatattgctcactacctttcacttttcaatgttatatagcaactagacatggtgttactaggggaatggggtatatgtatctgttatctatttcggtgtgttgatttaattttttacttcgtgtattcttgaaccaatctgcaactgaaaaagttgtatttgaatttggattaattcgtttcgttgctaaatatccatttcaagatatacataataaatatattagttaatttactatggtaagatatattttcaagaatgaagttgtataaataaaaatacttgtttcgataattttcagttttattcacgtcggtactatctcacccgtactaaatttgaattgccgacaaacaaaaaaaatgtcaagttcggttggattttttattttgtttggatctactcaatatataaatagtaccaatcacactataaacgaaatttactcatctttccttggccctagcaacggttcatgataatcattctttctttttacaatttactttttcgaaataaaaaattgtagtaaaattacagtttcaactaaaaaaaaatcttgtacagaggtgccacaaaaatgcaattcaattttatataaaaatacaacgacaacaaatttgttactttgtcaaagcggattatttggcacgaaaaattcgtgcggaaccgctacatatcatttttgtaaataattttcttcaaaattggctcgtttgagtcataaataacacctgatgacaaaaaaaaaaaaaaaatttttttgttactttgtaaacttttgctaaccaaagcctatataaaggcccaattagcccaaaacgacacaaaaatgtgtgaagaaataaacagatggtggtgacgtaagacaagtgtaagagatttcttgtaatccaatcaacaaataataataaacgaattccaagtggtttacttattccagaaacagttccgtgtaggcaaccattaggaaaaccctaactaaattccattattaatttcttttataatccctttctcttgacattgacttctctctctcgattcttcttctccagtttcaatcaaactcaatttcttctcaacgaaccctaatttccaacaaatcggattcagtttcttcttcgggtatgtttcttctcaccaataaattcgagatcttttagggttttctgggtttgtttctcccccgatctagcagacgatcgagtttattaattatgatctttgcttgcttgaaattcgcagagactaatcgaatcgcaatggctaagagttccttcaagatctctaaccctctcggtttgtttcttcaaatccctttctcatcgaattttcaattacttgattttttgttgagtttctgaattctgttaaaacttgctttagatcgtgtatggttttgattttggaactcaattttgattggttttgggatcagatttaatctctgcatacgcttttgattcttcctttgttgttcgtttctctgtttttgtttctaagccaagctgtgagattttatagatatctctgtttaatgatgtacttgtcattaatcttgtggttatgttttgttaatcagaggcaaggatgagtgaatcttctcgaatcagagagaagtaccctgacagaattcccgtaagcttacaaattcatgagttgattaacttcttttcactaaatttagtctaatttagaatcttggattgtatgtaggtgattgtggagaaggctggacaaagtgatgttcctgacattgacaagaagaagtgagtaatgggtttgctttatttactctttttctatatcataatcttgataacttatgtttcttccactttcttttaggtatcttgtaccagctgatctaacagtgggacaatttgtatacgtggttcgtaaaagaatcaagctt

SEQ ID NO: 610 - DNA, 103270 bp, Arabidopsis thaliana
aaatgaacttataccggacaagacaggttgaattccgttgagaatgatggtgatggcaagaaaaggacagaggtcagagacggctttagccacgtcagcatcctccgtgaaaatgtagctaacgtaatcacgaaaccaaatcacggcgagggcttccgtcacggagatcacgaaggatacaaaagtcgccgtccatgtagagaaccatgctgatttcggatttcctgctccaagctcattacttgtccgtacactgtccatgcatagtaattgtatagaaaattatgatttaacctgagcaatgtttggatgataatctgaaattgattgagaaacaaatactaaccttacagcagcattaaagccgacagagaccatgaatgataatgctgaaattgacatactgcacaaaaataacaagaaaaaaatagttagataaaagagaagtataagtgattccttcacattaaaaccaaaaaaaaaaagtataagtgattaagaaaatgatatagaatcaagaatcaagttactaactaattaatggacttaccagatggaaagagaatctagagagcgagcaggattttcgagcaaaccagcaagaagaacaagaatctgcgaataccacatttccagacaaatcataacagctgagccagcagagagtttaaagaagctccaaagaccttggagcgatctccagctaagaccagtccacgtgtgtctaaacttgggactaaccgcaatgtaaaaacactgggatccaacaatgacccaccaagaaattgtaagaacataagctatgcccataaagcccatgtccattacataaacggtgatccacgtcaacaatatctggaggatgagggcggcggctgagatgaaggcgctcggggcaaccacgctttgggcctggaggaacttttgggccgtgaagttgacggcgtaagcgaagatttgagggatgagcccggcgatgtatttggatcccatgtacgacaccgttttgggttcccctagtaggattagaatagggtacgagaaggtgtatagtaatgtcatgggcaagccaactagagcgaggactattgttgctctttggagatagatcccaagcatctcgtaacgatgggctccataggcttgtccacatagtgtttcgactgcactgcccatacctaactacaaaaaacacatgaaaaagcaaaaaaagtagttacatataaagttttttgttgaaaatataatgtgggcaccagttttgttggacatcaacaatatctttgtttgtatactctaaattacgggaataacttattggctagttatacttatcaatgaaactataaaatgttttgaatagtagttttcctcttaaatcaaatctattaaaaaatattataaacacattaacgtttataaacacatgcatgagtggttgagcataaataactaatgacaactgacaagacacgatgagcacatttcatgaggaaaaagtaagcagagacatcattgtgccatccttatcatgtgtatatttcatatttgactggcatgcaacgaatgattagtctgctaaacctacttcaaaagctctatatgtggacaaaatttccactagatactttagatactcgatatgtgaacattagtgaggtaattttaagaaatacgagacttaagcattatttatcaaagatagaaccaatttttggaagaacttatctaactttttataaacaatctacctagttgactacattctttaaatgtttttggccaccttagatgtcaatacaaaattttcttttaattatctatatatatatatatattaaaagctataatcattctcaaacctatatgatttacacattaacgattgtaatttgactttctcttttcatttgatataatactataaggcaattggaaactgtttcgtcaaaacaagcttagcattttatattaaacaaataattgttcactactatgaccaaatcgtaaccatcaaccacaaaataaaaatcccacatcgttttcattagttagaatagtattcaaaatttaaggcataaataaatattacattgcaaaaatatactccccagtatattaaagatggaaattttaatcttatttaagaaaattattgtttcgatccccggccccggttgaagacaatttaaaaagaagaaaggctgcagagtcattaaatgatcaaactaataaatggatttttaaaacttactatatatctatatttggtgggaaatgaagaaaatttcaaaagaataaatcgtacaagctgtatgtagtgcgtaagcaaataatcgtgaccatcttaattagctctaataagttaatgttaacacacgaaacaaggactattgttactacgaacctttcacattaaagcaatttttttttttttttgactccactagttatcgtgctacgaacctttcacattaaatactgaatgcaaaaatcaagaaataatatttaataatatcaccgcgtctgataactcgttgacattaaaacgtaccatgaggccatagacgagactgaagcagctgtttccgatggacgcggcggcgagctcatttttaccgagatgtccggcgaagatccgagcggaaatacccattccgctgttgactaaatagacaagtatcgccggaagtgccaaccggaaaagtagcttcatctctatgcatgcccctaagtacacgcgcctccggtacggaaggctacgctccgttaaaacactctctagtccgagtccgacgtctgccggaggtttacgctccgagacaaccggaaccaccaatggtcgccggagatcggctaaattcgtggtttcactaggcacttccatagattgggaaaaaatttacaaagaaaagggttttgtctataatgataagactgaggaggaaatttggagatttaaggatctgtgtggttttttttgagataatcaaaatgaagctctttagtgtgttataaatagagattgtacacataattaaaaaagaaaaagttttattgaaaatgggtatctatttttttatatcttttttcctttcttaaatgaacaataaaacaaagaacgatatgatgatccaagaaaaaagtacatattgtagattattcatattaaacaatagaacgtgttgcacacaaaagaaaacaaatctaacgtagaagatctttacaaattctagtataaagtaagagaaaacagtagaaagtcctaatattaggtaaacaaacaaattgctcacatgggcaaaaattagaaagctcagttttacactataatccaaagagaaaatcataaatatttaattgactactcatcataagcatacaataatattcaaaagaatgacttgcaaaacaaacgatactacaaaaaattatttattttggtcgacaaaaaatgcaattatatcatttattaagcaaaacgacagttacaattaatcgttaagttatactagctgacaagaaaaaggaatcgtttcacggaattctaaggaagtgaaagattattctcttacaaaatccaaaagttgaactttttcacacaaaaactcaccatagtgatttcgtctagtaaaaactcttatcgtgatcgtgtgttaatgcaattagttgcattacgtaagtttctatccctaagaatatcgagtagttaacttcattcatagttaccatggcggtaatagtttatatatcaatacgagtaaattcaacgcctgaagaaatcgtgcctagtaggaaaattaaaattaaaatcgtgcctagtagttgaccccaaaataaaaattaaaaaattgaaggaaaatggtaaagattcataagacaaaagaaccgaataaatggtatgtaatcattaaattgtaagaacaaattaggatataggaatataagatagaaaaatacagcatcgtttacaggctgttatccttagcaaaataaacgtggtttgctaagcttttagccatttaggttaggttaataatatatgagtacttttatatgttatgtcaacacacaaaacgagaaaatcaaaatctttaatccttaatttccaactaaattataatgcttataatttactccaccatttacttcactaaatatacgataacgcttataacaaatgaaaataataattagtataaatcttcatatataataccaacatgtctcctcatatcatattcatatgggtacggtaacgtaaatcataccataagtccatagacgagattgaagcagctatttccgatggacgcggccgcaagttcttgactaccaacatgaccggcgaagacacgagcggatatacccattccggagttgactaaatagataagtatcgccggtagtgccaaccggaaaagtactttcaactctatacaggctcctaagtacacacgcctccggtatgacaagctactctccgttaatacgctctcgagcccgacctctggtagaggtttcacctccgtgtctgccggatctactaaaggtgtccggagatcggttctttccactgtctcatttgacacatccataagtttaatttagtttgttttttttggtttggtttttaaggttaaagttttgcgagcaaaagcaagaaaatggtttgtttataaaaagactgaggaggaattatgggtggacatgtggggtttttgacatgatcaaaatggagataagaaaactgaaccctttttgtgttgttagattgggatcgtacacgtaagaagaagagaaaaagaaaactcttattggaaaatgggttttatgctttttaactctctttttttttccttctttcggtctgatgagtgaagactgaagagggccacacgaaactgcgggtgggatccagggattaagtaaaacacgattgtgaattactatatatttatataaataaaatctatataggtaatagaggcaataaaatataatatttagacacattgcatagaacataactgaaatgattctaataaagaaatactattaaatatatattcaatacaaaatctataaattaatatttaggaccataatattttcttgatatatagacattaattgacaaatatattaatatttattagtttaaacataactatgtcacttattaaacttagattttgactaattaagtgtggtctagaggattttattatagtggattgatgattttcatgtaggtcaagattagatacttcactcttttccatctccgcaaatttacaaacgccataattaaggtgaacactaacggacaaaagtaatcaaactataaagacaaggactattgggttataaagtgtcacaagcgtgaagaaaagaaacaattgaatcttcttgctttagttttgttttaccacgtgtaaaatgtacgtatagttaattggttagagtttaactaatttcaaattccatcacgtgactgttagttacagtactatcttattatacgttgcgatcgtggtaccaaaaactctatatcgtataaaatcttgatgtcgtgcgaaagactgagcttactttatcaataaaacagtaatgatttatacgtaaaagatttgagattcagtgactgcgccccatacagcatcatatactttataaaaataaatgagatgatcaaattataagattttatttgattaaaattttatagctatgatcgcgaaatattacagaaactatggaaagaactaaaaaaattaaacaaaagatatgagtggatactttatagtatatcgacatgtcaattataaccgatgtatgccatttggctaaaaacatcacatgcgtctttagaatggttttgcaccaaataaaaaacaaaacaaaaaaaagtctctagaatggctgcaacaaagaagtcaccaaattttggaattaaattcatgaatgaacccaaaatctgaaaccgtaaacaaacgattcaaactcaaagtttaacctaaatatacttttaggagcattaaaaagtggatataaccgatgttgaaatgtttatgtcacataaaaatgagttacaaaaatattaattagagttacggtcgccaaatataaaaaatagaaaaataaataaataggatttggagaagctagagaaaaataataataagaacaagacgagctttttattttgtaaaaaataaaaattttgctaaaaattaacatttttatataattaagcatttaagcttaataataacatatgggtaatatgagattatcttaaaaattagacaactcaagcaaaagtctccaattttatatcattctaaacagtttcttctttagtttattgctaaattcaaatagaaaaagacaaagagtattgaaagttaaaaactaatcactatatcatttttcttatattcgtagtcaaagtacatgtacattttctatacccttttttagcctttattacttactcaaactctcggtagtttcctctggttccgttattccgtctaaaataccgaagtaccgaacatatgtaaatgtctaatattgcacataaatagatatgcaaaagcgatgagatgaataaatgatcgtaagtaatatttgcttgatatcaatgatatgatagtgacccaacaattgtctacttgcgagcgacgtttgcaccacgaaaataggcatggacttgtctatttatttttatttttttgtttgctaaagtggtcttgtctatttattttaagttcttcatctaatctacagctgaattacacaaacaaacaaaagcgttatgaaatcacaaactcaacttgtaagtgaaatcttacctacaccaaccttattgggtccgtaccattcaatgatttatgcataacactgaaatctagaaaattgtaaaattaatcaacgtttcgatatgtttactaaatttaaatcaactttcttacaactaaaaataaataaattatgtggtattttggatcactaattatttctggagtaattagttagtgatccaaaaatatggatgagtacactaagatgtctcaaatctttgtcttttatcctaaatattggacctatgtgatgtctacaattttatcggattgggaaccgtacaagaacaatttagtattctctttgtctccgatgttcaagctcaagagctttctgagtctccttacagatacagatacatagaaacttaaccattaattatttaattgttctcactccatacagaaatcgtacggtttaacctttgtacaattttgaataaagcaaacaaagacctaaaagctaaccgagctctcccacctagacttagcagctcattgactcgaccgagctctcccacggttaggaataaaatagagtctagtggacgtgaagaaaacaaaaagaagattattaatcaatatttctcagctcataagtaggtcaagttttgacatcataacttaaatttaaaattgttgatgttggtcgttggataagcggtaattaagatatttaaatttagtatagtaaacattataatagtggacttacttaaaataagtagacataatttgtgaacgtaagataagaacaggcctcttacgcaggcccactttgtgaccagcgataagaagtgagcactgagtagcagcgagttattttctactctcagatcatcactaaccaacacaaaataacatctaaaatcctttcggaagaatctctcagaagaaactaataaagaaaaacctgacacaaattttgaaccctgtctaactctaaacatggtttcgagaaattgagtttttgttttcttaaaaattaatttagtttcttattcttttaattgtgtcttttatttaaccgttagcttatcggctgagaaagatttcggctatgaataatggggcagacacatattgacgtaaatgaacgcttttatgtcatcatccttattaaatttagaaaacacgtggttaataaatactacgaaatacaaaaaaaaaaaatgaaatgaaagcatgccgcatgcggtacacatacacatcttctgccattaataacgttcgcaatgcatgataggttattacttactccttttattcctaaaaaaaaaatgacgttttcacataaattaagaaaaataaatttaatattatttttattatttttctgttaatttaataatataagtttttatattagttactaataaaaataataataatattaacctacaacatcaatcttcatgaaacaaaaaataaaatccaaaacatcaaacttcacggagaatattaaattttgaaatctttgaaaaatggtatgcgataaattataattcaaaatgcgtctttacttgccaacattccaattaataatgaaaaattataatttaattataatttcttcttgctttaaggtattttatctgtcaacaaaaataaataaaggtattctatcctaacgtgttattctatccgtttcgtattagttgtcgttgtaaaatttaagttttgttttaaattagttattgtttttagtttttaatgcaaatgttttacagattttctaattttattcctatttttaaacttattattaataatatcaaataaaataatatattaattaagaataaaataaaaaaataaatgtttttttaatggctataaaatccttaaataacaactaatttaaaataaaagaatataacagaatattttatatgatataacgttttcaaattagttttttcttttttgtaggatttgaatgtgaaacgttgacaatttgatgccaacatgtgaaaccattaaccatacgtatacatcctttccttaattagtcactaaaactagtttcaaaattatgattgaatgacatcctcgaaccgattgaatgacatgcatgcagaaggcatgggtttacaaaatacaaaattatgtgcatatggtttaaatcggtacgttagatacaccgttttggtttcaatttgaatagtgtaacattttaattttgaagaatttggtccccattcgtttattttcagaaaaaaaaatcatttagccaaattgttttttttgtttaacttaaccaaattgttagttttatttctttgtaatttatccaaatgagcattccttatttaagaaaaaaaaacgtaagattaagtacacaatccacaatggcttatgaaagcaaaaaaaaaaaaaaaaaaaatcatgttaacaaaaaagtttgtatgacatttatgtctataattggaactgattgataatttatggtgaccgcaagaaatttaattatcatgtcgtggacctatatgcagttatgcactaccatcatttttagatgcgactatacgtcatttaacatttcgcaaaacaatgtttatgtatatttatacataataattttaattgatgtttacgaatttcacatttatttcacatttcttttttctttcttttttttctaaacatcaatcaacatctagcttttaggtctgataaatggcgaagacaataaaacaaacaatttcaataaaaaaattaattacaaaaccaaacatgtacatacttttttaaagctaaaatcacctgtcgagagggtcaagtttagacacacgcatcactcagatttttttatctatttttttataagaaaaataaaaaaataacactaatccatctccggtatgctttgcaacaccggtttccatggttggtggtgattcgtcacatcgaccgcagagaatccgatttggtctccaccttcgaaaattaacttagaaagaatctcttccgccgttaaactcttcaaaccaatgtttctcatgagatcttcaagttcctttttcgttatccttatcttaatctctcttctctcagaagacgatgacgaacttgttgacgtaacgttgcttgtttctccgagcagcttctctccgtcgtcgttgtcgtcgtgaaccacggtggatcttcttcttctccttctcttgttatatgatccattatcgtctcctgaccacgacgtcgtcgttttttccgttacgcatatgcagtttcccattttgttgtgtttatttgatgattgagtttgttgagataagtatttatagcttaaatgtttgattgttaatattaaaaaatggatataaggctcgagggaaaaagattagatttgtacggccatgttgggagagaatacaaaggttgattagtctttacgtagaaggtcttgtttttcaaagttacgttgtaattagttgaccaaagctgtttcatcctcatccacttcttgtaactgatttacttccaaaacagaacacaaaaaaaaaaaattgtcgacatgaattacttcaagtaaattgcatcttacgtacaacttctatattaagatattggataacattttatttttcgtttgataatcttatccgaactcatttttgagattacgtgaaaaagtgataagatacgaaaattgaactctaaagttagataatacagtataaattcgtcttgaaaaaatgatgtaaaaagtaaaaacaaattagatttttttttgttgtcaacgagcaacctatcctatgaccaaaaaaaaaaaccttcaaactttatccctaatatttgacttagtgaattaatgaggaccgtataagagtatattcagagatgtaccacaaaaatttagtgtccactagctttttggtaatatataatttaataattaattataactttggaaagaaaaaaaatataaggggaaaatatcagttaactgatggaagttgatgggagtggacttaaaagttgcttagttcaaataattgtctattatgtcggccgtgcccttccaaagacttgcaacttacaacaatgattttagttgttttatattctaattaacaaaatattagttgttggaaatattagtattttttttgataaccattttggtaatttagtaactttattcactaacgttatattacgaggttgggacatgatggcatcgtcaaaagatagtgacttcgaatctcttacaagatagttaaataatatatttctgcgtggttcaacaccatggtaacaaaattgtgtatcaatacctgaatcaattttttcatggagggttacgccaaaaatagtctaattattttgtatggaaaatatgtagtactttttcacgtgataaaagaaataaaagtatgaaatggcgtctaatctatgggtaaaaattttggttaaaaaaggaataattatttttgtttctttttttgactcgaaatatatttttgattataaaagaaggaacgtgtgaagtgtcacactgtcagcttatctatttgcatgggaagggcatcgctttttgactttttcttgtcttactgattcctttttcacttatataatctctttctcttcttcctccaaattcacgtgtacaatattgtacagtatattgaaattttggtcatcgtacttagttgctctgcgtatgaacagaaccaggtcaaaactacgtattgcaaatttccaccaagaaaaaaatagaatacggtcaagtattttcatttttctcgtccattattttcatccattagatatacattcaaataccaatagcaagaattacgtacagtataactaattctatatggcattatgtcatttcttttataggcattatgtcatttcttttataggcccatattgagtaactgaaataggcctgattcacagttaaagtagtgtatcgttggggagcccgtttcccccaaagagaaaaaatcgttatataccaaacattgaactaaacaaatacgaatcgaccaggaaaaaaatgaactaaacaaataagaataagtcaataaactgttcaggacttcatgcttacaaaaggaattgagtatttttaaattctaatactagataaactatccgtgtatacatgcagattttgctcataatattttctatctcactaatagacaatcaaaatttgactaatttttatactttctttacatcttataggattagaactagatttaccgaaatttatttatcttctcatgacaagttagttgacacatggttttcttaaaatttgaaatattttttttgagaaagttcgtcttaatatatgagagatttgacacacatgaactgataaaatccaatcaatcatatttcatttgttaatggcttaataaattattacatatcaatcacttggacaatggagtatgggacatgcatgtcacgtgtttatggtataagattatgtaatgaattcgaatatgaatagtggaaaaacgataagagtttgagtaatcaattgattaataaaaacactaataattgaggcaaagttaaaaagaaggaaaggacagaacaatcatggaccacatgtagactttgctagtttagttcgtcggtctccatcgttagccattcactctccaatccaacaacaccctcgtcgagtccggtctcaatctgcctattgatgggttcagattagaccacgtgtcaacgttaatagacaaaattagttggacctgcttgcaatgagtgaacacgtgtcgaacagctgaactgcgacatatcttgtgtgctttcccatgcggagatatatatagaccccaccttcagctacagagaatgaaataagccaattatatgtttatgtaattttgtcgaatctgcaccatctctttcggatacatacaaaaataccaaaaactaaattcgggggaataaactatagtttctcatttcaaatctttttttcatgtaaactcaaagcatttgccattcatatatttcacgtatgcttggctaagcttaacgactattgtacatactaggacgtgcacaaatctctaaatggtaccatgattttagttatacttcaatactgtgaatgagggttttaaatgacaagaatatcagaagtttcacggactatatggattaatatagatttgatataaaattccttacttatcaaaattaatcatcgtgtgtctcacaaatctatattgaagctactgtagaaatgttgttagaatgcatgatggtacgtcggcaagtaagacatcacattgtatatgattgaaattacttttagaatgggaaaaaataagtctgaagttactagctctcgtctaaaatgctgaaagaaatacaaaatagtagtgcgtcgttatctaaatggttcttttacgtggactatgacatcttcttctgatcttaccgaacataactgagtaaaaccacacacaaaaagcaatacctattcacctttagtgtatatatattcacacacacacatgctcatcctcatcccccaccttcacttccaaatatattttgaaaaacccaacgaaaaagtattaattttgataactaggtgaataaacgtaatttacgatttaaatcacagcgggtatacaattttcttaggtaaccaagagagatatgggcaaaggtcggagcttaccgattagtcgaagcgagaggtttcttgggagccatcagcagtccgatgaccatcatgtggacggagaaactacctttgagctggagctcatggaagaggatgtctggtcggtggtcgagcctgacgaaccaaaggaactaggtgcgtggaacgcacgctctctcgaggccagtggcagtgaatggagacggaagggaggacgcgtgagtgacctgaccgttccgagtgatggacagaggaagagacacgtggcgacttctgcgccggtgaaagttcctgactggagcaagatcctaaaggtggagtccgtcaagtcaatgcataataataataacgataatgataatgctgacgtggcggattgtgattgggagagtgcgatggtaccgcctcatgaatacgtggccgcgcgtagccgtaacggtgacggtggttcgtccgtgtttttgggcgtgggaagaacgttaaaaggacgtgacatgagacgggtcagagacgccgtgtggagccaaaccgggttttatggttaattttacgtaattaatttgatcattaatatttgattgtagtatatgatttgtccatagagttgaagtaattaattaagcactatacaataactagtgtaatcatcatttatttaaaatcactcgtctattctacatgtaatttaacattgatcaaccaaattcaatatcaaaaaaattaattcaacggtctttctcttaaactctagctttgattagaataatcaagaatttaagatagctgaaaatggaatatttccgtgtaaaaattaaattaaaaccgttaatgtcggcgggacataaatggtaataaaaaaaaactcgtgagaaaacataaatttcccaatcggacttacttctcctctaaccgagaacacaagaaattctattaaaaaaaacctaaaaatgggttgctttagcagcaaacaccgaaacacagagagtgatatcatcaatggcagcgtacagagctcaattccgacaaatcaacctgaaaaccatgtctctcgtgatgttctcaagcctcagaaacctccttctcctcaaattccgacaacaacccaatcaaatcatcatcaccaacaagaatccaaacccgttaatcagcaaatcgaaaagaagcacgttctaacacaaccattgaaaccaatcgtttttagagaaacagagacaattctaggcaaaccctttgaagaaataaggaaactttacacgttaggtaaagaattaggtcgaggccaatttggtataacctacacttgcaaagagaattcaacaggcaacacatacgcttgcaaatcaatactcaagaggaaactaacgagaaagcaagacatagatgatgtgaagagagagattcagataatgcagtatttgtctggacaagagaacattgttgagatcaaaggtgcttatgaagatagacaatcgatacatttggtgatggagttgtgtggtggtagtgaattgttcgataggattatagctcaaggacattactctgagaaagcagctgctggtgttattagatcggttttgaatgttgttcagatttgtcatttcatgggagtgattcatcgtgatctcaagcctgagaattttctgctcgctagtactgatgagaatgctatgcttaaagctactgattttggattgtctgtgttcattgaagaaggtgagtttgtgtgatcatatctcttgttctgctttttagtatatatatgcgaatgttttagatatcttaagattctgatgaatgttggagttatattgtggatatagattttgttaagaatagtctgtatcttaagaatcttgtttcatttagtgatttagtagatagtggtaagcttgaaatcagaggttttgctagttttgtgtgaacttgagaatgtgtgtcaatggattattatagaacttgtgtgttcttttcctttccttattgtcaaattatgtcagtttagttagttagttgatgatcttgtgttcatatgcttaatgtgttttgtttctaaaccgtaaaacaaaaattgcagggaaagtttatagggatatagtaggaagtgcttactatgttgctcctgaagtattaagaagaagttatggaaaagaaatcgatatttggagtgcagggattattctatacatcttgctttgtggtgtgcctcctttttggtctggtaataaaatctgaccaattctttgatttggtttatccttttaattatgttgtttatttgtgttgttgttgtggttacattgtagaaactgagaaggggatatttaatgagattataaagggagaaattgattttgatagccaaccatggccttctatatctgagagtgctaaagatcttgtgaggaagttgcttactaaggaccctaagcaacgaatctcagcggcacaagctcttggtaaagtcacattggtctctctaagtgcggttttgtagttgacgtacttttcagtgctttactaatctgtagtgatccttgtggtgttgttttttcagaacatccttggatcagaggaggagaagcaccggacaagcctattgatagtgctgttttatctcggatgaagcaattccgagcaatgaataagcttaaaaagctagctctaaaggtaaaaacaaatttctatctagaagtagcattttcttctatattccctgatcattggttctgtttctgatctgttttgcaggttattgcagagagtctctcggaagaggaaattaaaggtcttaaaaccatgtttgcgaatatggatactgacaaaagcggcacaatcacttatgaagaactgaaaaacgggctagctaaacttggctctaaactcactgaagctgaagtgaagcaactcatggaagccgtaagtattgccatcctatttgctctgcttcttatgttacttattattctaacaaaagacttttattttatatatgtttcaggctgatgtagatggtaatggaacaattgactacatcgaatttatctcagcaacgatgcatagatacagatttgatcgagatgaacacgtattcaaagccttccaatacttcgacaaagacaacagcgggtaagtttagtcccttgaggaacaaggtaaatatagacttgacgctactttaagaaacaaatttggatttttcttaacacaggtttatcacaatggatgagttggagtcagccatgaaagagtatggtatgggagatgaagctagcatcaaagaagtcatagcggaagtcgatacagataacgtaagttttgttttccctctacacagcatcaaaaaggttatgaacaagtcttaagccaagattgagattaatgggtctcttttgcaggatggaagaataaactatgaagaattttgtgcgatgatgagaagtggtatcacactgccacaacaagggaaaattcttccagtccaatgactgatagataaatcgagaagccttgatagaggaacttaaaaattaattagatatccaacattttttacagccgtgcaaaagagttgctgacttaaactagatactagttgtgttgtccaataaaaacaagtggcctttaatttctttctcttatctgatatgtcttgtccaaagttttggttactttagagtaccagcaaattactttcggagttatacatgtgtgcccaataaagaagttgtagtatagtagtaacatcatgttatatctcatactttcatcacttggaaaatatttcagagatgtagattatatacatatataaatgtatgtataaagagaaaagtgggttttaagaaaaagaattcaccttctggatccaaatgaattgtgataccgtgatccccataagcctcccaaaaaaaattctttcggcaatttattaacaacgtaaccgtcgattctcacattcccaaggtgtccctctttggggaaaactaaagagatttcgtcatgtttcaaccaaaactcgctaactgcatgaagttttttggtcggttggaattttggctccatgtttatatgatctaagtgggcaaaagaccaaactactcatgtgtgatcatattttcctagtctatttataactttttgaaccatactttacgttatacaaaaccctagtacttatggaaagttataaaaaaaaaaatctattgaaaataagaaaatgctcatatacacataaggttaactgttcgatttacataaaatttatagatactaaaccctaaattcacaaagtatctcatccgctgcggacgaaaccatgtcctatgatccggtcgaagaatattcaagtaagatctttctctctttgtcgaaattgtttgtctatgatctcgattagctttcatctgatcgatccgtcattagttaaccagcgtatatctaaccgtcgatctgccttagtaaatcccttaattataatggatctgcttttttttcaattccgtctcgtaattataatgaaacctggcagatgctgacgcatgcatcttttgggacatggggagttacccatccctaatggtctggatccttgtttagttaaagagaagatcaactcagagctcatggatctaggttgtaggggggatgtgtcaatgcacgcttacggtaataaggatacattctcggatgacacaaaacgttgactctatatattgactgagaacgttgatcctagcaagagagcttcgtggaagttttgtctcattgaaaatagatcactgtaactatcagtgtttgtcatgtagttgaaaagtcatttatggctccaccactctttatgatcatgagactgggaacaatcgctatatcaattttcttctaaagaaataaacaaggaagataaatcactttcatggaagtggtgatcaaagtaaatgtcgcaacatcaaaattaatgagttcatacatgcaattttacagcaaggagatcaaagttttatcttcgatcggcttcattccgttggcaaagacacattaaatctcatggacaaagtcaaaatattgaacccaaatgtagtaacgtatgacctaggtacgccttactggcttggtccatcattaaaagtttgtattaaatcataaaaacataatttgttttttgtcaacgataaaacaattatcatataaacatcattaccattataaatattatggaattaatttagtttagtttcgtttgattttatacaatttccgctttaattagcatgaagatgatcatcaagaaaaaatgagttctttttttccgtctctaactaaagatggagtgacattattcctttcttttttcttgaatgttccagggaactctaaaatttcagtgttgatgcatttccgtgtaacatagatcaaattaattaaagttgttgaagctttttcactgattgaacattaaacgaaacaaggattaaagtaaaagatgagcattttgctttgcttggtgtataagtcataaaagctattagggttgttgtcatgggcctgaactatgttacctatcatttaaaactaaatgtagcccgtttggtaagttataaaataaatagactccaaaagaaccgatccgtttagtccttttgaaacatatgctgaaaaataaaatggattcaaaatcgacagctagaaatagaatctaatacacaaggccacaagctaacaaatgtcgacaaaatgaataaatacagaagctaacaagttgatgcaacttataattttctatcccaattattttgtagaaaacaaatgaaactcgctgacactctacataatacgttaatgctgctccaagtgtatctgtggatgtttaaataaattttcggatttgaaactgcaaatatcttaaaccatagatcactgcatttgttgtctacacgccaccaccattattgtctctcacgtctagttttaagaaaagttaaagtctacctaacgttttctatgtattttctaattgaagtgtttaagtacagactatagtctatataccctcgaagagaatctcatccgttagatattttttttctctatatataacatgtctctgtcctttacaattcaatgcgggtcatgtgattaaatattactacgcctttgtttctttttgcttgcgacttttggctttactctttagcttgtggcccgtttctcttattttgaattattatttttggaatctttttcatgagtcatatcatattcaattattcatgtcatttactacaaatttttaaaatctttggtgagatcagtaaaatagatcgatatcacccatacacagtacttatgtataccatgcatgttgaacaaattatcaaaagattcggacatgtttacttatcattacatcgtcatacatgatacccaacaccatccatcatatcatacatcctttccattatcattatatcacccccaccacaaacccaaaatcaacgaagagccaacatttagattaaataactcaaagccactaacatcataattaaagcattaaggctgaacacacaaaagaaggaggtggtcactaccatgatgtattcatcatcaccctttctttgatttaacttaaaagatttttttattcatcttggttcgtaccaagcagagaactcaacacaccagagcccctgtctttctcactttttccaacttcaatggttcttgtttgcgagattacattgcttcctgatctcacccttagagccagtcaaggggttgttctcggataagatctggattgccctagtgaactccttgaagaagtaggcctggtccttagccatcttcttaacgattggtctggttcgtttgtcgtgtgcgagctgatggtccacaaggagcaaacccttgttgtctaggatgttacggtagtaattgttgtctagcaccatgggggtgccacggtcgttacgcacgtactggaccgcctttgggtcagggatcgagtcaggacacttgtgtagcatgtgagggacgtggtccgggtttaaggacgggtccacctcagggtacaaacgatggaccagcttgacacagtgagttcttcccacgctgtgtgaccctgcacgtgtcataaaaaaaaaaagtcaaaatctttcagtatcgaacttaaaaatctaacaagaaacttaaattccaatcgcctaaattcagatcccataagagtaaagtcaattagtttgattagtatgtttaagcatgcatgagtttattgaccaaaataaccttgtgctaggctattgtaccggggcataaacaaggattatcctgtcttatttgttagtactagtgatagatcggataaggataactttcaaagttcaactcagatcgcatacactccttttgtgattcaataaagttagctttagtagtggttcattagtcataagagtgtttcatgcatgagtaaattgactgaaatacccttaatctaaggcagcagcaacaaaatatctcggttggtcaagagtttttaatttcaagcgttacgttttttccggagcctagtgacaaataatcaaggatgagaaagataaaaggtacctaggagggcgacgaggccgggagtgtcgataccgatggatttgaacttttcaagaacgacggagatactctcgttgtggtcgggaagatatgactcgagcatatccgtcctgcttttaagtccatctctccttcctgtcttcaaaggaatataaggtcctcctacctacaccaaccccacacagttttgtcaaaaaaggaaaaaaacagcatgcagttttgtcaccagacagagaaaacggcacgattattatcctttaaacttactgcttcgatgccttctcttgcggacaagacgagaatgtcagaacatgagacaacaccaggacactccctctcgagagcttccttgatctcctcgatgtacctaaagtttctaagtccgaagctcctgtcgtgttctttctctcctagctctcttcttgtcgaatccagcaaaagcgacgcatcacatgactgtttaacccaaaaaaacagagcaaaacagagtaaaatctttagatctgttttaggtaaaatatcaaaacccatcatgcaaacatatgaaagatcattgtaagagagagagttttcggacctcaacggcgcagtcatggaagatgttacggagccaagagaaagcggtgttcttgtggcgtttgtagaggagtttgacttgttcacggacgatgtcttcggcctgaggacacgtgtccttgtagaagttcatcatcaaacctggctcagcctctgttactgcttcagatgttgcagagagtgcccaaaggcaaagtatcgccaccatcatcacacctttgcctcccattttttttctctatctttcttctctcactacaccactcttgagttgagtcagtgagcaagcaatgcagcctccttaaataaagggaaatggagttttctttatttatttttcataaaataaaagaagcttaatttgaaggttatagtaaattaaaggcaagttggtgaatttgctactgtttctatatgtttaagtacgtgacagatcatatatcattaagctttattcattttcactttgagaaaccaacaatattattataagactacaataattgtatgttccgttcagtcgtgattaagaatctatattcaatgaaaattgaaaagcgtagacttattataagaaacttatgtaattttttttattatttatcaaattgcagacacattataagctttaaacagaaaaaaaaatcatacttaattgatgcgacagctaaattagtgtaagtttgaatttgagaaaaaataacaaagtttttctacgttttttttttttaatgtatgaactttcatatggactgttgccaaaacatatattttccaaactgataaaaattaatttgtggagtttcattgaaattactcaaatgtatgctagacgttctactggaaatttaatttcggtaagaaatctaaaacccaactttgttactatttcgaaggacgggtgagtgaccatagatcatgctagttagagtcctacacagtgctatgagaaaataaataagtttaggttggagatattaatgtggatggcttgttagatagtttacctcatttagaagagtattttggttaactaaacaattcacatttttttgtcaaacaaaaaaccaatcactaagttttggattttggtctcattgagtggcatcagtggcccctatgactaaaaagaatcttacaaaaaaaacttatgcttcttttgttaataatacacacaaagggggcggctataacaaataatatttatggggtggaatagctaaagtcaaaatatattcatgggtcgatttgcaattacctgaaacatttgttattgttaaatttttaatacaacggataaaccgctccttttaggttatggaatctttcttttcgatgaactcaaggtggattcttattttttcaagtacatttcgattatttagttcaagatataattccatttgtacatattcaattactttttgttctgtagttatttatatatccaactattttacttattgtagtaattgtcagtagattcgtatcgtaaagtcttctcaaatattgaatgaatcttgatccatgtgatgtaataaaacacgttcaccactcttcactcttgagtgttccctatactttatctgtttgtgggttgaagttaaatattgaatttagtttagagtacattttgaacttttcctatgttttaacataaacgttgttttgatatttttcacataaactaagaaggtaaataggtatactaatatgtccctgcaaaattaagaaaaatctgaaattatgttatctttcatattcttaactaattttcatagaggtaaactagatatctaattaaaagctaaaggctccactattatttgttgcggaactattatgtttctcgtttcagtaacaaaggactaattttgtttagaatgattaaaactaaataaatatgtaacagagctataaaatgagaggacattactactaattcgattcttcttcttttcttaatcctagaattttttttatttttttttttcatctgggggaagtatcggtgcttttaccaagatcacattgaatctgcagattcaaattcacttcaaatttggatatttggattttccaattttttttttaaatgaacaaatttgattttttcaattaaaaatgaatgaactgtgaccaccgacactttgtttccttatccaagtgtcgccaaatgagtctctggggaccttctagtgatgtcactctctagctcagtggctccacgagtgctaaacactaaatactgattagcaagttctaactaaaaattgacgtgtaacatgtaaaactgttgtgttcatggtgatgataaccggttaagttccagtgtataggaaaccaaacaaacccggttatcaaaattgaattaagacaagttagtagttaatcatggatctttcatctgacaaatggacactgtactcatccgtgtcctcaacgttgcattcacaatggggcctgcaagattcaataccaagacaaaaaaaacgttaactaatatatttctctcaccagacttttaaagcaatctaggctcaaattcttagtttccagatatactgatatagtgaagaatatgaactctgaagtagttgccatgtcttctagttcccttctttaaaagtagcaaccgctatatatagcaaagaaggttccaaggaccgtataaattccatgtgatatgagctagttgaaggatttaagcattataagaacaagatttgatcggataacacatttctctttagttatagatgtgacagctttatttcatctctttgtaaagttaatttagcaaccattttttttactttcagtagatttaaagccatcatttaatcaatagatactgtgtggattgtctgaggaggttagtaggttacacttccctcttaagagagatatgagacaaaaccacccaaacacacaaatctcaacattaaccaacaaaatcatacccaatttgagtaataactatgggcctgaaaggcccaatgaagcccatcacaaatatccagtgagccaatgttctggatgtaagttacatatcatgtaacagaaaccgattaaagacaaagtggggcttttcttttgtggtacaaggtttgtgtcttttgtggttaattcggatcccgtggctcacacgttatctcctcactcactctaaaggagagagatctgtgacatcgatggaaattccaggggaccaattgcttaggttaacgactaaagaagggaaattaaaacttgcaagaaaaagcggctcggacacaaacaactgatctctcaccgattttgcagtttgtcaggaccatgtactgagattctcgataactatgatctgaacagagttttatatgacgacgtaaagttaattaagaacacatgagagattcttgaaatgcatgagattatcttgttgccctgatagattcagagttacttgttgttacaaggtctacgaaaaagtgaataattgagactcttttaaaataatttcgtgcatacaatgaatcagtcaaattttcattatttttcgtaagaaactgtaattaattaggaagaagtgaagttgcacatatcgtggtatccactattactagatatatctttcgaaataaagatatatagcgattaacgcacacaaagtccataacatttgggatttggcaacctcatgtctcaaatatttgtattaaaatattaaggcatttgacagactacactcaatcataataactcaacactaagacaatcataatgactcaacactaagacaatgcttagttccacactgacttacttttaagttttaactacataaagtcttagaagttacaaccaactccacagtagtacactatacctgtgttataattaatgaacttggttagcttgttcgcttaaagagaccaaactataaaatcattttctttgtatctatattttttttttttcataggctctttttatatttcagttacccctaacacatactttcctcgtacccatagctatgaaatgtaccttcctatctttaacgagttacaaaaaaaaaaaaaaaaatcgtttccaaaacatctctccatctccaatttttatgattgaatcttttgtaaatatctaatttatatttaatccgcctatcttacaccatatcatctcttatcccaacatcttatgcactttgatcctctcattttcaactgatttttaaagatatcaatatcatactgcaaaagtcaccccttggtcatatatcgaacgattaattccattccgcttatagacatcgttcttgttccaacaattgttgtactttcagcatgttgaagaagctgtgtaggttttttaataattaaacaagataataattaagatctttttttctaagctggactgacaattttgaggctctttacaattattacaacaattaattctttacatttcagggtatgtatgtatttgtattttataaacttcgaggggtcaaataagaaaatctgaaaattagaggtcttgtataaatgttacagatcttaatgcatcgtgctttggaataacgtccctggacccttgcgacgagacccatgaaacgttggattggatatatagcctaacaaattacaaaatcgatttgattcttaccccaccacaaagtctcatgtatttatgtgtgtacggacactggattcagattttttttgcgtgataaatacatatttattactatacttattctcgcagaagatcaataattattcatatagcaatagaaaaagaaaaaccctataactacatattatatatatatatatatatatatcgttggttttcaaaaaaaaaaaaaaatttgatcaagcaagattcgtaatttcttatgaaggacaataatatcacaagccttttcgagtaaattaacattgtcctcttcaaactttaacaatatctataactatagccaaaaaagattagaaagtgtaatttgaaaatggcttaggcaaaagcataatttaagataaagcaagtcttttcatatagtacatagttttttgtcttctagcatgaatcagactctatcaataattttggcaggtcttagtagaaatagtaccaaaggctaccactcctctatctaacccttttaattattatttatttttcacaaaatttaattcatagttatggcaccccaaaaaaaagtacgaaattattacagttttggaggtttctgaaacctctgcctattgtggaggcttttgattcctttgaagcaatcaatgacctctctgtctctcatttgccagcaaagagagattgtttaatgttgtttatggttcacatttttatacaatatcacattttcactgaatcttcctctgcgtctctcaggtaatttaattctctcttttctctcccatcactctgtctcttctctttattgggttttagataaaatgatggaataataatttcatggattcaggaggaagaagatcattcagttgaagcacacatttaaagggttttgttgagaggcaatggaagggggagaagagtttcaagaagaagaagtgtggtcagttttgagagaaagtgaaactcaaggtcctgaaatgaaaatgtccaaaagtaacaatctcttctcagcctcttcctcatcttctgcgaggtacattcctaaaggcaacgaggtctctggaggggcaaaacagtcatctgctccaatgaatattcctgactggtccaaggtttatgggtattcaaagaagaacacaagcagccacttgcattcatgggccattgacgatgatgatgaaggctcaatggttcctccacatgagttagtagcaaaaagacttgcaagaacgcagatctcatcattctctatgtgcgaaggaatcggaagaacgctcaaaggaagagatctcagcaaaacaagaaacgctgtcttaacaagaactggtttcttggaatcgaatatcacatcttcatcaacaacatcaccaccatagttttggcatggcatggagcatggctggatgatcaatatcacattcacacaaaaccctttttagcaccataccatatcattatcatgaaaaaaaaacctaaaaccttatggtatccacatgatttttattaaatatcaatgttattgtcgttatcaccatgtagggaatcatgacactaccaatatggttgagttctctttttttttttttgttgttgttgttgttgttgttgttaggtttttggatttttttagataagtatgatgacgatgaggatgacttgtcaatcccatgcatgggcccataccatttttctcatgttatgtttgtagttctcaatggtcttttaactctttagcagtgcttagtgagcttaaattatagtttagcaaaacaaaatggcatatactttggaacctttgaatgtgagaaatttgaaagcactctcgatctcttcaccattttggcctcgaccaagagagaaaaatgtagcgaataatgttaacatttttggtccgacacaaggttaaggggctcgttccatattgctcactacctttcacttttcaatgttatatagcaactagacatggtgttactaggggaatggggtatatgtatctgttatctatttcggtgtgttgatttaattttttacttcgtgtattcttgaaccaatctgcaactgaaaaagttgtatttgaatttggattaattcgtttcgttgctaaatatccatttcaagatatacataataaatatattagttaatttactatggtaagatatattttcaagaatgaagttgtataaataaaaatacttgtttcgataattttcagttttattcacgtcggtactatctcacccgtactaaatttgaattgccgacaaacaaaaaaaatgtcaagttcggttggattttttattttgtttggatctactcaatatataaatagtaccaatcacactataaacgaaatttactcatctttccttggccctagcaacggttcatgataatcattctttctttttacaatttactttttcgaaataaaaaattgtagtaaaattacagtttcaactaaaaaaaaatcttgtacagaggtgccacaaaaatgcaattcaattttatataaaaatacaacgacaacaaatttgttactttgtcaaagcggattatttggcacgaaaaattcgtgcggaaccgctacatatcatttttgtaaataattttcttcaaaattggctcgtttgagtcataaataacacctgatgacaaaaaaaaaaaaaaaatttttttgttactttgtaaacttttgctaaccaaagcctatataaaggcccaattagcccaaaacgacacaaaaatgtgtgaagaaataaacagatggtggtgacgtaagacaagtgtaagagatttcttgtaatccaatcaacaaataataataaacgaattccaagtggtttacttattccagaaacagttccgtgtaggcaaccattaggaaaaccctaactaaattccattattaatttcttttataatccctttctcttgacattgacttctctctctcgattcttcttctccagtttcaatcaaactcaatttcttctcaacgaaccctaatttccaacaaatcggattcagtttcttcttcgggtatgtttcttctcaccaataaattcgagatcttttagggttttctgggtttgtttctcccccgatctagcagacgatcgagtttattaattatgatctttgcttgcttgaaattcgcagagactaatcgaatcgcaatggctaagagttccttcaagatctctaaccctctcggtttgtttcttcaaatccctttctcatcgaattttcaattacttgattttttgttgagtttctgaattctgttaaaacttgctttagatcgtgtatggttttgattttggaactcaattttgattggttttgggatcagatttaatctctgcatacgcttttgattcttcctttgttgttcgtttctctgtttttgtttctaagccaagctgtgagattttatagatatctctgtttaatgatgtacttgtcattaatcttgtggttatgttttgttaatcagaggcaaggatgagtgaatcttctcgaatcagagagaagtaccctgacagaattcccgtaagcttacaaattcatgagttgattaacttcttttcactaaatttagtctaatttagaatcttggattgtatgtaggtgattgtggagaaggctggacaaagtgatgttcctgacattgacaagaagaagtgagtaatgggtttgctttatttactctttttctatatcataatcttgataacttatgtttcttccactttcttttaggtatcttgtaccagctgatctaacagtgggacaatttgtatacgtggttcgtaaaagaatcaagcttggagctgagaaagctatttttgtctttgttaagaacacattgcctccaactggtaagagttcttaaactctttaacaccattcaggatcaaagtttctttctttaccactaactttggtttcacttttgtttcttaacagctgcattgatgtctgcgatctatgaagaacacaaagatgaggatgggttcctctacatgacttacagtggagagaacacttttggatctcttaccgttgcttgaataaaaatcgatctttggatgactttgatgtacatacataaatcaggaagataaagatgtacattgcttccttcttttctctggcttttaactttgctttggatgtttggatatctttccctttgggtttattaatcgtcagaaacttctccttttcttactttcctcttttgcttttacttaaataacattgattttggggctaatgagtaatgagtcactttcatatcaaacttgttcatatccatcacaaaggcaaaaaaggagtaatacactgaaaattggtaaaaataaactcacaaaaggcaaaaccttggcgtaattatttttaaccacagctatacaaaaggctaaagctccaaatagagattctcatcttcaccttcttcatctgttctagcaatctggaacgagactggatggtctattattgatctcttcgtcatcgtagagtcggcggattttattgcggatttaccgaacaagattcaagaaagatgtcaaagaatcaacatctctcttctctgatggatacttgattggtcttgaagagttctttgggaacacaagtattgttggaaagcttccaagctgcaactcctttttggcaaagtccttctggtcaccatcagctctaaacttagcaaccttcacaccacttcctcccagcttatccgccaattcatcgaatgaagcttccattgcctgacaaaacgggcaccacggtgcataaagcacaacgatccaagcctctttccggttctctaacttcatcaaattctcaatcccttgcctgctcaagttcacaacattctcgctattgaagatatccgcgactgaggctgtcccgttgacattagcggttgcgtttccattggtattctccttgatattccctttgtgaaggccacactctttagccttagcatcttcccaccaccatctcccttctctctcatgctgacccggcaaaaccgctctcgtgcatggctcacatccgattgaaacataacccgcagcgtgaagcgtgttgacaggaacatccatcgtcctcaagaaattccaaacatcattcccttcaacattagcaaccggattccacttcaccaaactaccaactccaccatctaatccttcaaacactggatcaacctgaacaacaggaatctccgatcttgtcccgggtgattgatctttcctctgaccagtgatccaagcacgtaaacccttcaacgcacgcctcaaaggtctcacctttctaatacggcaacactcctggtgaccatcttcatagaaagagaacaaacccttgttcctaactaaagcttgaacctcaacagcatcaggaaacatatactcaatccgaataccgtaatgtttctccacggtatcgaagagtctatatgtttctggattcaatctccctgtatccaaactgaataccctataaggtcttccagttaaatgagcatactcaatcagagcaacatcttcagctccactgaaaccaaacaaaacaacaaatcagcaaactaaaggaaaacaaaaacattcctttattgtattctcatgattcaattcattacctaaaggcaatagcaatgtcattcccaaacttctcaagagctttatccatgatctcaagaggagaagcattctctaatctctttgctagttcctcaaagtcttcaacttccaccacatctagcttctctgtaacctctgttttgtaatgaagcacaagatcattagcataaaccttaatcaaattaaccaatgatcaattgaaaaatcaaaccagaacttaccagaagcaacaatggattcctttgtaattgattgcacattaagagctttcacggaggatctcttcccggacaaactcagagaagccgcagagacattggtacgattcaataacctcaatgatccgatttttgttactgtattgaagaatcaaacaaacaaattgaataagattcgacattgatcgaatttgaacgaatttaaaaccaaaacacaatgaccaatcaaggcatttctaagattctccacgaatttggtattgaaaatgaaataaattacctttgagatctgaagaagggaagctagagcttgagatcgcagaagaagaagatgaagaaacgttgattgctagtgccattttcactccaaaccaaatctctcgaaacaatgttcttaagttttttttatttttgtgttgtgttttttctaattttgtgttctcttaagatttgttgagagaaatgggattataaaagaagcagctgaaatttaggttcattgaacctagacgtctttttttaggtggcggcatttgcttttctatatatcattgcttgcgtcactttggtcgtgtggcagagaaaactagtcaactttggtccaagaattctttttttttctattaatgtaacatacacttatctcaaaaacattttacacgcttaattttattttagagctaacaaaaataatctaataataaattaatctaatttgtaaaatataaacatggtgatatgtttgattattaattttagataaatactttctcgtgtattctttccttaaaaatccgaaaaaacgatcatatttatagaattaactaaataaaaacagttgagattttctttcactgagattatttttcgtttgttacgattctatcatttagtttaacttatcaatttatctacaaaacctatcgatctcttcatttcttctagaaattgcacgaaccgatatttcataaaccatattttacagtcaaaattagtcttggttgaaaaacaaattccgatcctaaccacaaacacttttgggttctgttaaaaacaaacataaaaaaacatcatacaaaagtatatcagaagcaaacttgtgatcttaaaccttccaagatttcataagatcaacaaactaaattattcttattcatcaaccaagtctatagtaatcatgatctcaacaaatcaattacttgtcttctttagctttctcttcttccttcatcttcttttcccaccttctcttcttataatcaagcaacatctgaggcatcttcaacataagcttcgcagtgttctctcttttctcagctgaaattctatcacatttatgccctttcctctttgtcctcatagctttcctctctggatcataaggccaatcttctccattagtcaacacttctttcctcagcatagccctccttcgtgcacttatccctaacggtttccatgctcccatctcccaataaccccacacacctttcgtcaactcggttctgtacttatcgagtttcgccctccatggatgttgaaaccctgtcactgtctttgccacagcttctgcagcttttccagccataacttctgcatatgcccaaaaccacaattctttaaagatgataatatctcattgtaatccaattagctcacaataagttaagaaacctataaacttgctagctaaaagcagaggagatcaattgaaggaaggtattatatgatagtgatgcatagaagcaaaaagatacaaactttgaatccaaagagagatttggtgatgcatagaagcaaaaagatacaaactttgaatccaaagagagatcatagtgagagtgaacttgacacaacatttcttacaaatcaaacgcagattggttgaaatgttgttaaaagaagagtctttggagactaattcttgatttactacgcagaaatgtgatgcaaatggatctaaatcctctaaaattagggtttgataagctcaacgcaaggatttagtgactgggtttcgttaactaaacatcatcacaatcgatttcgattccaaatctaagcctctcgagtacgggagcaactaggttcatcaatctcttatagcttaatacgaatctacttagagatcgatacgaaacttggaatcggaatgagagaaagaacttacataaaattggagatcggagactgtgagagcaactttgagaacgcggcgctgatgaagaacgcagacaagggttgggttttttggcgttagtaaacccttttcctatttcttttttgttttctcacccaaattatttgtaattacttagtataaatattttaaaaatcatgtatatttccaaataaaattcagaagacaaaaaaagtataaatagtacaggttactctcacattctcactatacaattctaaactagtgtagtatttatatttaatttatacaattccatcttcaaaattttttttgcttaattttgattttgattttttaatatacaaatgcaatgtatttaccacgccttaaacttttactgaaataacttatatatactatgctagatatagcgtaaaatcattaaattacatatttgagtttttgaaaaaatgtaaatatatataaattaataagcttaattacaaataggaccgtccattgtgtatatagtattgtgattgcatagtctaaagtattatcttaaacgaaattgaaaaataaccaactttcttttttctagacgggtcacgataaatggttaatttttaatagatcactaatacagtaaatcactgtaaatctgataacttatttcatccataagtaagtttgtattgcatttgggctactacagaaccaaaggatacattattaggaataggtggagagagacaaaaaaagagtattactggccttcatggcctctttgtgaattgtggccttatatattaggtaatcaattggcccattccaaagaatgtttcgttcattcttatacattactactacattgctaagtgctaagccccccaaatagcaaattctagaataacttttacatgttttgccacttttttattccgacaaatcacgatttatccataggaaaagttgccaactcacccaaacaaacgctaacatccttagaaattaagcagttgatgatcattacatgtgtttttggtgtcatatgacggattcatcaaatcatgttagaatgatgatgttggaaaagaaacacgtaagtagatagcattgattgagatctaaaattgcatttagtaacgaagatcccgtcgattccgtcgtaataactaaagcggtgcatggcaatatgtatattattaatattcattgaggaatgaggaactttcctacacgtaacgaatatacaataatattcctagttagtccaaaatgttggataaatgttcattcatgagttgtgaaaaaaagaaactaaaataatttcaaaaattgttagtattattataattattttttaacaaaatgtttcggttggtgtcatattcttaaagaaaaaaccaataatcaccattacaactaattaagcttaaaacccataaatcacaaacttttcaaaggactgacttccttctaccgaaattatcggaactcattgatgacataaccagacttgcttttgtcgaatgtacctatgattacaaaacatgacacattatacattcacacatacatgagttttggttatttccattatgatatataatatcacacttcaaataacagactttttcttgtttgtctttttcttcaatctttgctaatggtgcagaatggtactcaagcacgtgaaaacgcagaaactcgtatcatccgcttcatttccacggtacaccctcaccttcataactccgatctgtgatctccaccgtccaatagcattgacttcagctcaatatttaatccggcggtccaactattcaattcaagatttaacagaagcatgtgattcttacctcctgacagctcacacgccgcgtttcaaaacaccttcacttgcggacaatacggagcaatggtcgatgtactcttgacccaaagaaggcccaaacatctttaaataaaattaattgtaaactttttgatgagtgagatctaaaaagagtaaaaagacagagaatcttatgataaatttaatatttgttttgctattgtatataaccaactattatgacatagtttgcaatccaaggtgttacaccgaatcggtaaataactaaatactagcttgctcaatctaatagctagagctaataagaaaaatgtatttcgttaggataaataaaaatatcattatgtttacttgaatatttgaaaaaaaatttggtacatgtaaacgaaatttcccaaacaatattctaaagtgtgaaaggatttaaaaatgacgttgactttaggaaaaagtctcttcagttttagttaaaacatattgttaataatgcaaatcaagctcgaaattcaaccaaaagtttataagtgtaaattacttgaaaataatataaccaaataaatttgatgattttgataacattcgaggatatatgttactacatttacgtattttcttaaaattatttcttcaatacaaaaaaaaaaacatattaattacgtcggtgccactgccactaatatttaagagggcatcattaatagattctccattccaaaatcctctgtatatggatctacacctctcctcagtctcatactcaaatcaataatccaaaccccaaaaaaaagaaaaccagagaagagagtttaaaaaatgagaggttcttgcaaagtctctatagttcttcttctggttttaatcaatggtgtgcttggagataacccttatagattcttcacctggaaaattacttatggcgacatttatccccttggtgttaaacaacaggtatttcaactgtttcttcttctttctttctaggtttgtcacattttctctgtttgttctctcgagaaatcttgtgataacattatcttgggttgggttttgagtactgcagggaatattgataaatgggcagtttcctggacctcacattgacgcaatcacaaatgataatatcattatcagtgttttcaattacttgaaagagccttttctcatttcttggtaagttctttcacatatctttactttttttgccgtattatgtgttgccgagaagttgaatattcttggatagaaagcaataaagattgaagattaggataagatcttaacttttaatttttgtgaattttgtttttgttttttgttgtccaaaagaatgcagctttcggacaaatgtgctttgagtaaatctcatctcacacattatcaatacttgcatatttatgtattagtctacaagagaaagaaatgatacatctcttccaaagaacaatactttttcatgaataaaacaaaaattgagatcgttaacttttctcgttgattgtaatgctattcaaaacgtaatatttgcttgtttaatagaagatttaaagcaactaaagtacttcattaattaacaacaattttattttgtttgtagttagctaataaaaagtatagtaaacttataacaatgaaaaggtctcaactcaaacgaacaaaaatagtttttactctgtagggattaagtaacttttattttgtcatttgggacttaaaatcagaaaatctagcattctagtgtttcaagtaaaatagattttgttacaaaaaaatgaaaaataattttcttgttttatttcatttgagaatgtcaatttctttttctcattgagagccataaaagctttttcttacacccgacatgattggctgtcaaacatacaatacataatatcataatatagatatgccataagaaaattaaaatattccacttgatccatccaaactagtcacatgcgatgacacatgtgagctttaagtgtcagtgggaaacaaaaggcagtcattcaaattaacttttacgtcccggatctatttgaatatccgtagttaaccccatactcttaattcgatcaaacatacccctaatctttaaagactttttcttcttaggaacggagtgcaacagaggaagaactcatggcaagatggagtcgtagggacaacatgtccgattccaccaggcaaaaacttcacttatgtaattcaagtcaaagatcaaattggtagcttctactatttcccttctcttgccttccacaaagccgctggtgcatttggagccatccgtgtctggagtcgtcctcgcatccctgtcccgttctctccccctgacggtgatttctggcttctcgccggagattggtacaaaaccaatcactatgtaagtacactccttattgccctaatgccactgacttgaactgcaagaaaaggaacgaaagttttggggttttggcaaaatctcattgttttgttattttaaggttttgagacgtctactagaagccggaaggaatctaccgaatcctgatggagttctcatcaatggtcgcggctggggaggcaataccttcaccgttcaacccggtaagacctatagattcagaatatcaaacgttggggtcgcgacttcattaaacttcagaatccaaggacacacgatgaagctcgttgaagtagaaggctctcacactgttcaaaacatctacacttcacttgacattcatttaggacagtcttactctgttcttgtgacggctaaccaagctcctcaagactattacatcgtcatctcctcgaggttcacgcggaaagtccttacaacgacttcgattctccattacagtaactcgagaaaaggcgtatctggccctgttccaaatggtcctactttggacatcgcatcttcactctaccaagctcgaactatccggtaaaaacatgtttcttgacttacaagttaccgccaaaaaaacaggggattttcgttgagatttgattttttatgatgtttgtgtattcatgtgataatatataggagaaatcttacagcgagtggtccgagaccgaatccgcaaggctcgtatcattacggtttgatcaaaccaggccgtacgatcatactcgccaactcagctccttggatcaacggcaagcaaaggtacgccgtgaacggtgcctcgtttgttgcgcctgacacaccattgaagctcgccgattacttcaagattcccggagtttttaacctcggaagcatcccaacgagtccctctggtggaaacggagggtatcttcaaagctctgttatggccgctaactttagagaattcatcgaggttgttttccaaaactgggaaaattcagtccagtcttggcacgtctccggttactctttcttcgtcgtcgggtaagaagacaattctctataaacaaatcatttcaactaatactaatgatgttacttatatgattttaatttataaagtttagatccattaatgaactttgatattagaattatgtttgatgtatttcatattttcttggataacagtatggatggaggacaatggactcccggaagccgagcaaagtacaacctgcgggacgcggtttcacggtccaccgttcaagtatatccgagggcatggacagcgatctacatagcgttggataatgttgggatgtggaacataaggtcggagaattgggcaagacagtatttggggcaacaattctatcttcgagtttacacttcctctacttcgtaccgagatgaatatccaccaccaaagaacgctcttatgtgcggacgagctaaaggccgccacactaggccattctaaaagggatattggacgcaacggctcaactgttttttttttctttgtttttttagattgaatgatttgaaatgtttagtattgtcacgagagggtggcaaagagatgtgagcttcgtggatttattcactacggcacaaaaattaggaacaagaaaaatttggagcttgacttgagctttcaacttagtttttatgacgaaatcaaatgttgtgttcttattttaaataatcaaattattttgttttactagccatcagtggatctataattttcattcactatattacctgcaaagtttgagattagctagttaaaaataaataatattcttgaaactcgtcaaaaatggagaaaaatgaagtaaaaggtaattgggacttctaattaggaaattttgttgtataccatttatttatcattcaactgtttacaaacgaataatttgttatcttatatgttatcataatgttgacgtataaataatcttttttttgttgttgttaaacttgacgtataaattatcaaataaactttataccttgaattagaattccaaactcgcaattttttaaaaataaatttgacagtacacaaagcaataacattttaccgtcagtttcttaggggtcgtcaagattggtccgccttgtttttaggggtcaagattggtcgcgattataagccagatacatttactaaatgaaaaatttggaatgcccccaaaatgtaagaccaagaatacttgcattgaaaaattgacgtagctaaagtcgctagacgatctaaaacgcagtaaaacaaaatgttgcatatttagtcgtgcgttcacacatagtattaactttattccatagttctgaagctgcttccactgaaactattgagtaccaatctaagactagacttctcccatctactactttcttcaacgctaaaccccaaaatccttatacgtatcttcgaagatcgtacaatgtcctccatacagaccatactcatccaaagctacatgtgcatatatatttagaaatgttaatttgttttgcagtgttccttccactaattgttagcatattaatgtcaaggttttgacctggactgtttagatacttattgaacattggtatcaccatatttctaacatgttttttttttaattggaagcttatcaaattttagagtcatttaatttgtttgagtttcaaaccaatttccacaagcgacctatcaataaaaatattttaaacgggtcgtataagtatgagtaagtggagttgttaattttcctcgagaatatgatatttactgatgaatcagaatgacgacgagaggaatggaatcaacatgaactaatgactagtcgttgaattgaagtaagaaatgattagaagaagaaaaagaacaggaaaaactaatagttgataaaatgctgtcaaaacaaaaaaaatatatatacgaggataagattttgctaagtcattggcactcagctgtatctttgaattttctttaggagaccacatacgaagttatgaactacacctatctacaaaatatcgaacaccaaatccatttgtgatttgtcccatggtttctctaagaataaattatttcttatgagatatatatacgaatgtaaatgtataggtcagagatcttcatatcatgttaatatgttatcacaccaaatcaaagatgttgctatagcttatctatttattatccaaactgtgtctccaacctaaaaggcaaaaactagactaataaaactttaactaacagttgaaaaaaacacaccttaaactaatatatttttggtcgaatctataagttagtaatggtcttcataattaaacaaaactctcttgtttcgtgttgtttttttgttttttttttttgttcatgggatatgttgctttccgtttcctttatgtggaaagtaacatttttttctttcttcctcgtgtttgaaaaattcatactatcttataactttcttaaaaaaatatgtgcagccactcaaacgctacaatgtgtaatatttacagctaaaataatctaatcgatcggctataccaaacaaatagttatatatcatacaacgggattatctttccggaggaggctagaaatttcaatgctttatctgaaaacagtggcagatccaataccgtgaaataatataataattagacgttttgattagtgataacttaccgagccaggttgacaatttcttaattatatatacgtatatgagcattagtactagttttgatgactaattcaaaggtatcattaaccggaaaattctatcgttaataagcgattgataaattgataacacaaaaatattctacaatttcaaatttttagcgatagaaacatatggtataacgtaaagataatttgaaattaccaaattgtcacgtacacaattatcgttaccaaattttattttattttgtcttttagtgtggttgtctacccaatcagttgactttgtagaacttttgcattgacttaaattagaactcttttctcaattctcaaaaaatatttttaaatacaaaatttcgcgcctaataataataggtcacgtacctaagtaccttggaaactcaagtctacatgtatgtatggaccacactggtctgactattgaactaataactttttttttagtcaaaataatcgatattccacttcgattggtgctataaatagagagcagaaccaagcagaaaaggaatcaaaccaaagcagttttctagttctttgaaaaccaaaaagagtacttcaatggctactcattcaaggtttatatacgtgcttcttcttctttcatgcattgtttttgcattgcttgggggtagttgtggagatagtgtggagaataacaatgacgatgatgattgttcttcccggagttggcgtggttgtggtagtttctacggaaaaggtgctaaaagatatggcggtggaggcggaggaggaggtggcggtggaggaggtggtggtgaaggaggtgatgggtatggccatggagaaggatatggtgctggagctggtatgagtggctatggtggtgttggaggaggtggaggaagaggcggcggagaaggtggtggcagtagtgcaaatggaggttctgggcatggaagtggatccggtgctggtgctggtgttggtggaacaactggtggagtaggaggaggtggaggaggcggtggcggtggcggagaaggaggtggttcaagtggaggatcaggtcatgggagtggttctggagctggagctggtgctggagttggtggatcatctgggggagctgggggaggtggaggaggtggtggcggagaaggcggtggtgcgaatggaggttcaggtcatggaagtggggctggtgctggtgctggagttggaggagcagctggtggagtaggaggagggggaggaggcggtggtggagaaggcggtggtgccaatggaggatcaggtcatggaagcggatccggtgctggtggtggagttagtggagcagcaggtggaggaggaggaggaggaggaggtggtggtagcggtggtagtaaagtcggtggaggatatggtcatggtagtggttttggtggtggagttggctttggaaatagtggaggaggaggtggtggtggtggaggaggtggaggtggaggcggtggtggaaatggatctggttatggaagtggtagtggttacggttctggtatgggaaaaggtagtggtagtggtggcggtggtggtggtggtggtggaggtagcggtggaggcaacggaagcggaagtggaagtggagaaggatatggaatgggaggaggagccggaacaggcaatggaggaggagggggagtgggttttggaatgggcattggatttggtattggcattggaggaggaagtggtggtggtaccacttatcaaaccaatcttaccggtgataaaaattctccctagtgagtagggacttactccatacatatcttatttgtcaactccatttaataaggattttgtttcaaattttgatatctagttattctatttgataaatcttatcgataaaatcatgtacgaattcgttttccataatgaataaaattacaatacgtttttgtatttttttttttttactgcaactaaaaccacaaaataaaatttagaaactcaccaagtagcaacataacataacgttttgaaaatttggttttgtcgtttaaaaaatattgtgatgttagccaaattagattagttacataaatggtttttagcttgtgtatgaatctgcacaagtctatgaatataccaaccgaaaacataatcgaccgtttcgatcccgcgaaatatgaaatgcttaatacaatactatataccaatggcccaataagttctttaaatgggctttatttaaaacccaaattagacccaattgtacattcttctcgccggacctctcttcattccatggcggcgcgtggctataaggtaaagaagaaatcggtttctgatttttccggcgtgggtacaagttatcagctttcttgttgggtattttacgatgttttgattgtattgatttggctgcaattagatgtgtaggctttagctcaagtgattgagtttcaccctaaagttgctagagtgtgtatatatacatgcttcgccttcggaattagattgaaacttgaatgttgctgcagctcgtgctcttatgttgaatggtttgagaatgtacttgtaggtggagtatcttcaaatggaactcagtgttttacataagctgaaagcgagtagaggtgctcttgatgaagatagccgccgaggttgatgttgtaatggaaagatgagaacaaacagctgtttatgttgttagatgagaaagaaggaaatgaagactctaatgttgaggatgctagtgagaaagttgatgtctttcaagaaacagggtcgaatgttcttcagactatatattgtggagctatcagctattgaggctctttccttctagttttgagttgaggaagcgtttcctggagattgtgacaccaagcttgagtcaatacaagaggtcaaatcacaactctttttccttaacattgcaggttcttagctcttcctcgtcctagtcttattcgatacaaagattgcattgaaacagagagcaaccttgcaccactaggcgataaagactgtctcactaatgtccgaaagttatatgattctgctgttgcaagttactactcaatggagaacaaggtaagtttttgtttcacagaactcaaatttaggcttaccctgaagccactctgcatacaaatgttttgtggtgtttattgccgcgccagaaagactctaaaggaagcagcaggtttcattcttcgatctgatttgttagtcttatgatggaaacacaatgttattgcccccacaattttgttatataaaacagactctagtagattttatattaattttgttaaggtttatatatacatattcagtagacaatttgattgtgaatacaaactattcaatgttaaaagcaagactcgttctaaggaggcaacaacaagtgaaccataatttatacttttgaggatttagagattttactgattctaattggttgaccaaaatcgccacaggagaatccaacaactacgaactggtcattggtcaagagtctcttcctattggtcaaacattttctattcctctattgttcaccggtacatctcacaaactatatatacattagatcttctgctctttaggttcaacaaacaaaacaaggaacaccagaaataaacacaatcataatcaacaaaaccagaaaacaaaattctccagcaactagatcgatttaaaccggtgttgtctcctctatatatatcagatggcgtcattacaggcttcaagatttatgcttactacttcttgttcttcttgcacaagaacaagatccgcaatctcaatcccaaagttaccaaaatttaatgtctcgattccgcaaataccgatcaagaaccggaatttcagagtcgaagaaccgattcttcggttggatgggtttgctgaagatcttgatctttcgttgtcagagagacaaaggcaaaagaagagagggtgcgatgatcaggttttgcaaaggtcgcggctcatggcggttcttgaagaagttatagatagagtggagatgcacaagaacattggagagcaacgcaataactggaactctctcttgctcaattccgtcaatatgatcactctcactgccgctttgatggccggaatagcctctatgaacgccagtggaatagattccgtttccgcggtgagtatagcttctacggtgttgctggcttctgctacaggtttggctgccttgatgaacaagattcagccttcacagcttgtggaggagcagaggaacgcaacgaggctgttcaagcagctaagaaacagaatcgagatggttctgagggagaaaagtgaagatggaatcagtgaagaagacgtgaaagaagcgataaagagagtgctctgtttggacaaagcttacccacttcctctagttggcaccatgctcgagaagttccctcaagaattcaagccagcgacttggtggcctgaaacaaaacccgaacccactcattccagaacggaagctaacgggtggaactcggagctagagatggagatgagagaggtggttgaggtaattaagagtagagatgcagaggagtacgagaagttaggtaacgtggccttgaagttaaaccgggttttggcaatctctggaccagtgttgaccggaattgctgccgtaagttccggttttataggtcacggttcaggtttagctggagtagtagcaacaacgtgtgcttcattggctgccgtagtgaacacgttagagcacggaggtcaagtagggatggtggttgagatgtatagaaactccgccggattcttctctcttatggaagatacgatcaaaacagagagacgagagaatggacaagttttcgagaccaaagtagcgttgaaacttgggagaagcttgtctgaattgagagatctggccagaagatctagcttgtctaggttacaaggatcagccatagatgaatgcgcaagcaagctcttttaattagtctacatacaaattgatattcattaattatttttgtgtatagagaaaatgatagatgatttttgaatttctatacaaacctgaatataactatgcaaattagttttggttacttatcttttaatatattacgcttttactctccctgtgataacctagtgcagatcatacaaagctaaaacaaaagttttgtatatacacggttaatatttagacatgtaagttatgtaacaaatctataatccattatgctctgatattatcttattattcaaaattggatgtattccagaaatattgacatatgacgttttttgtgtaactaatataataatgaattactttatgcatgtatcttgtgtacgtatatcttgatttataaatttctacaaatagtaaatactgatttttgtgttgatgaaaatttatttataattataaaatagataacaaatttaacaataccgattcttatatttatgaaatttgtttatttttaatcttttataaataggtaacatatccaaaaattactatacacatacatatagattatggacatgaaccctattattgttttccaaaactcatataaagaaagaaagaattacatgttatataaagagaagatttatttgagaactttaacaaaaataaataatattctttgagaaatacttttgatgaactatccctctccaaggtttgatggatcaagctggtccaagcttccttcagatcttctgaatatggtttttgaacgtcttgggtttgcagattttcaacgagctaaatccgtttgtccatcttggctagatgcttcaagacaatcagcgtcaaaaaatcagatcccttggctgatcatgtttccagaaaaaggtaaagactattgtctcttgtttaattctgaagaaaaggagaaagcctatagaattaaagatcttggtgttgaattcgcaaatagtcattgtttggcgatatatggaagttggctctttatgcgagattctagatataatctctatgttatgaatctatttactcgcgagaggattaattttccatctgtggagtcacaatttggtaggataaagattgaacgaactatcgatgatttgttctatataaaaatcgatgacgaatatgatgttgaatatcctgaaagacacatcaatattgacttccctttattatggatagacgatataaccaaacattacgtggttatatggtcaatccaataccgccaataccaatatctagtttattataggaaaggagataattggttgaaacatgctacttactgtagttttgatatggtaggcattgttgacatggtatacaaagatcataagatttacttgtatagtacaactagtgatgtcaaagtgttggaattttttggagatattctttttgataggattttttggagatattccgcgacaaatctttgaaacgcaagttaactatgatgtgttggctaatggagtacgccgcgttcgtccagagcttggtaatgtgtttcatatcaagaatacacatcttgtagtcacaatgaccggagaaaccctcagagttgatagcataataaggagtgattctgatgtttggtccttttgcatctaccaaatggattcatcaaatagcaagtgggagaaacttacttctttgggagatgaagcaatactcctggatcaaggcatcaccgtgcttgccaacgccattgaaggagttaatagaaattcaatatattttagtggtgttcaatttcaatatggttatgttagcagtgaaaaggatatttgtgtcttcaatctcaacacacaaaaggttgaaagaccatatcgaaatattagttcgttcattcaatcatgtgatgctcgatggtttgtgccaaatatcacacggacatgattgattctcaagtctgttgtatcttttcaatgccttttttttttttgaaatgccataaacacatctatgttggacttgtgtctcttttgatattttcttttgctaatgtgaaagtaaaatcaaacaaatataatgtaaaatcatattggaataatatcaaattttagtatatatatatatatatatatatcgtgaaaatttacttgtatgtggcacatcgtttgacaaatatgaatcacttggttttcattttgatccacatgtgtatttttattgttcgcttcttgttggaaagattaattgtacagtattacaattttcattgaagtctacacacttaaaaattcactatccctctgataaacctagtgcagatacaaacctaaaaaggacaaaaatctcacatataccagataaacagatacaagaaagggtagtcgtccccagctatttactcgctgaaacctcaagttgcagaaaagtcaatactacataaggaatatatgtctgtttcggtcataaaataaagtcatacctgcctctgtttctgttgctgatttttttttggaaatattcgtatcctgattcgccatgtgacacgtttattctcgataagcttttcatcttctgcttctttttatcataccctaaacttactctatctatatatatttctttgaagtctacacactaacgacaaagttacattattcgccactatgtgatagtgatacgtttattctcggtaagctttttcttaatcttcttcgttctacgtttccaactttcttttccatttccgataaaatcaactttgcaaataaaacctctaaacttaattttcgatattgttcctcagaagtccgaaagactttactgcatgatctctttttgacaaacttaagacaagatgtagtttggtttatgttgtcttgtcttattaaagaggcgttaaaaccttacttatacaaagcaaaagatataatctaaagtgttgcacaaaggaaatgactaaacaggacaaatatatattgttgaataagctaactaaaatattgacgagcaatagcttcaacatcctccctcaagttggagcatgcacatcgagaatgcccaacttgcgcagaaagtaacgaacttccttttcacccaaagccttagttagaatatctgcaagctgcttgtgagagggaacaaacgaagtcgcaattataccatcaagaatagcatcgcggataaaatgacaatccacttcaacatgtttggtgcgctcatgctgaactggattgacactgagagcaattgcagatttactgtcagagaagatgcgcatagcctgaacgtgagagacaccaagatcataaagcacccgcttgagccacatgagttcttgagtaaggaatgccatagctctatattcagcctccgcggaagagcgactgatagtgggctgctttttcgttttccaagatatgggagtatcaccaagctgtacaaagtatcctgtgagagagcgacgagtgagagggcaagcagcatagtcactatcacaccaaccattaatctgcagagtagaggtgctagagagtaaaatcccttgtcctgggttagatttcaaatagcgaacaacacgaatggcggcgttccaatggtcctgacgcggattctgcataaactgtgcaagagtgtgaacagaatatgatagctcaggacgtgttacagccaagtaaatgagtctcccaactagacgacgataccgtgaagagtcagaaagcagaggagatgtagacaacgagagcttatgattctgttcaagcggaaacgcagacggcctagcccccaaaagtcccatttcagaaataatatcaagaacatacttcctttgggacaggtagaatccttgagcattgcggctcacttcaatgccaagaaaatatttgagcaagccaaggtctttcatgtgaaaacatgattctagataggatttaaattgagcaacagcatcagggcagctacccgaaatgatcaggtcatcgacatatacgaggacatgaacaaagacaccatcattgttgtaactgaacagagagtaatccgacaaagattgtgtgaacccatattgttttaaagcagaagagagcttggaaaaccaacaccttggagcttgtttcaaaccatacagagatttatgaagacgacataccttgctaggatcatcacattgaaatccctgaggcaatttcatatacacttcctcctttaagtcaccgtgaaggaaagcgttatgcacatccatttgatgtacatgccaatcacgggccgcagccactcccaaaaacaaacgcaccgtgctcatttttgcaaccggagcaaaagtttcatcataatccacgccttctttttgacaattacccaagactaccaaacgagctttatatcgctctatcgccccatccgatcgatacttgattttgtatacccatttgttgccaagagcccgctttcctggaggcaaatttacaatcgagaaggtttgattaactcgcagagattcaatctcagcagacatagcctctctccaagctttgtcaaccatagcctcgttgtaagttgttggttccattccagcagtaacagctgcgagaaaagccttgtgcgacgaagtgaatcgatggcaatccacgtatttctcaattggatacagagaggaggaagaagcctcaggggaaatcgattcaacactcacagtattggtgacaaaattcttcaacttcatcggtttttatgtttggcgagaactacgtctaagttgtattggcgccggtgttgtagatgacagtggaagatctgctgtctgtacgatgcttgatgctaaaaaaggatcgagagaggagagagagacaaactcacttggacttgaagattcttgattgatttcaggtattattgggccagttgcaacatttggcccaactgtagcttcaccaatattttgtccaataatagttcttggcccaatagcttcttcaataaaaggtggcaatccaccaatacacgttcatcttcctcattgcacgacatcttggagtatggaaactctgtttcctggaaaatcacatctctagacacgaaaaatttttgttcttctaaatcaaacagcctccaccctttttgtccatgtggatacccaacaaatacacatcgtcttgatcgtgccgcaaacttatctcctttatgattttggttatgtgcataacacaaggaaccaaatacacgaagatgagagtatttcggagccgttttatataacatctcatatggagatttaccttgaagaagcatcgagggagtgcggttgataaggtaagccgcagataagatacactctccccagaactgaattggcaaatacgattgaaatcgcaaggctctcgcgatattcaaaatatgtcgatgcttcctctcaacccttccattttgatgcggagtcccaacacatgaagtttcatgagcaatgcctttgtgtagaaaatactcacgcatacatagaaactcagtcccattatcacttcttactgttttgatctcagtgtcaaattgtcgttcaactaaagccatgaaatctttcaaatgtttctgagtttcacttttatcagtcatcaaataaacccacacaccacgagaataatcgtcaacgattgtcaagaaatatcgagcaccggagtaagaaggtgttcgataaggcccccacacatcacaatgaattagctgaaaactatccatacttctattatctcttagaggaaaagtatcacgggtttgcttagctcgcatacatgtatcacatacattctccaaaatctctttaccactagacaaaagttctctaggcaacaaattaactatcttgtctgatgcgtgtcccaaacgcctatgccatagatcaaaaggggccttcacactcgtgtgcacagcagcagcattctccattccccgaaaacaaaaacttccattctctcttttaccaattccagtcaccatcctcgtagtgcggtcctgtatcacaaggaagtgatcagcaagttgaaccacacaatgattctcatccatcatttgcccaacagagatcaaatctgattccaactccttgacatagaaaactgattttaatatcagatgcgagcctaatctaactgttccctcactgacagcaactctcttatttccatcagctaagataattaaaacaggagacatggatcgcataccactcaacaattccaggtttccagtcatatggtgtgaagcacctgtgtcgagtatccaagaagtgaaaagagaacatgtacctgattgagtttcatgagcattggacttgttatcgcttcttccagcattgagatgcttaacaactccacgccattgctcatcagtaagcccactgactgcatcacgatcgctatcagtgataacccggttcacatgttcagaagatggaaacggtccagtcatgacggcattcacatacgttggacgaggttgtcctccattaaaaccaggcccaaatcttcctctgccacgacttgttgagccatttgaatttgattttcctcttgggcgatctccccaccactctggatatccaatcaacacaaagcaattttccggcgaatgacctccacggttacaatgagtacaaagtttcttgttttaaagcttctctaaatttgcaaacttctctgagattacctcagaacgtggccgcatttgaacagcaaaagcagtgacatcggttctctcttcattagacgatctgttgttcaacatatcttcttcttgtcgcacaatgttgtaaacctcttccagcccggggagaggaacacgagacgtcaaacttgaccgtatggtgtgaaatttagtttcattcagtccataaagaaattgatgaaccatgtcatcttctcgatatttttcttggtctgttccaagattgcagatacacctaccacatttacatatccgaagagggcgatagctgttgatattatcccaaatcttgttgagttttccataatatccttccactgtcataccctcttgcttgcaagtcgcgagatccgccttcatcttctgattctttggcccattagaaacagaaaaacgcttccgaatctgttcccacaagtctctcgccacatcacggtgagagatatttgtcagcagctctgagtcaatagtcatcttcatccaagagaccaacaaagcattaatcgttaaccaatcttctagatctggagaaccatctagtggttgaggaatggttccatcaaggaaaccaaactttttcctagaccgcaacgccgtcttgaaaccacatgcccactcttcatagttatttgtcttcagtatcggatgggagatcacagctcccgaattgtcagctgccgttaagtcgtacggcaaaattgtgcgtcggacctcaattacagatggaggtggtggtggagcatcagccatagcttcagagaaaactcacttgaaatactcaattcgaaaaacccagattgcgctctgataccatgacaaacttaagacaagatgtagtttggtttatgttgtcttgtcttattaaagaggcgttaaaaccttacttatacaaagcaaaagatataacctaaagtattgcacaaaggaaatgactaaacaggacaaatatatattgttgactaagctaactaaaatattgacgagcaatagcttcaacacttttaatataccaaccaattaatactggaccctaccttcatttttactactatggttatgattgtttgcgagtaaatgatttgattaatatgtattatatgtatgtcgtatgtatctgtaggtacaagaaaaagttggagcttgactcgagatttctatctgatttttatgacgaaatcaaatgttgtgttcttatttaaagtgaaaaaatattttgttttactagccatcagtgtagagtttttctggatctatagttttcagtataacctgcaaatttgagattagctaactaaaaataaataacactttgaaaatggaagagaaattatgttaaatgtaaattgatgaactttaattaggaaattttgttgtatacaatttttttttggatgaagtatacaatttgttttcattcaactgtttacagatgaataatttgttatgtgatatgttatcataatgttgacgtgtaaattatctttttcttcttctttttgttgctgttgttgaagttgatgtataaattatctaataaactttataccttaaaccaaaattctactcccttaataaattagagcaataacatgttaccgtccgtttcttaggggtcgtcaagattggtccgccttggttttaggggtcaagattggtcgcgattataggccagatatatttagtaaatgaaaattttggaatgaccccaaaatgtaagaccaagaatacttggattgaaaatttgcataatgtttataatgtttgaacatctgcatcctcacaatttttataatgttttgtttaagggaagtttatcaaagtttttgggagtaatttcttttgagtttctaacctatttccacaaacgacctatcaataaataaaactataatataccgtagttatgattaagaaaaaatcaaacatactcatataagtataaataagtggagttgttatttttcttcaagaatatgatatttactggttattgacgagaggaatggattccatatgacttaatgaataattatgattagaagaagaaaagaacaggaaaaaagctaatcttagtttgtagagttcaacgttcagtttggaaaatggatcaataactacttcgaaaggtataaatgttacttgagattgtaagaaaatatatttcatttatttctcgtgaaatcgtacctctttcacttttatccctttgtttcaccttgagctaatttttcctcaaaaatccgattaatcatataacaatagatatttttcgagtacgtagaatataagttcaaaatccgaatcatcaatattataaaaacatagaatgtacatggtaactaaagtaaaatacagctgattttaacacattcccaacaaacttgactactccatatttttcttcgaagtctacacacttacgacaaatttgcattatatgcgtggcactaattttgtcttaaagactctattgcatgatctcatgcatgccaattaatatcgtatcccacttgcggtttgcacatgcaccggttaaatagttttaatatttgatttgtttatcaaagtatagatatcagaataatacacgttgtgactaaaaaatagaatatttcgacgatccttagatactttgtaaacataaaataaaaccttactagaagtttagatgcatgatttcatcaaaaaatgttaataatcattattgactcatggtttaacgctatgaattaaaacaaataagataaacttgacggctcgttttcatatttctttttttttgaagagaggaaagttaattatgtgagagagagaacgatagtcaaaatgctttttaataggattattactcaactttccagtttaagacaatggaaccatcaactgtgtcaatatcgccattacacagcctggtagaagaataattaggtatgacttctgcgtttcatcaagtaaaaggaggtggagcctaccttcttttttactagtagtatgttttggttgtttacaagtaaataatttgattcaagtataacataacaattaccatgttcaatgaacctagcatgttctgtaagataattttgatgagactttaaagttgaagttacaaattgagtagagcaaataggaaaaaaaaaattgaattgtcgaatttgattatacctactcttgttgtcatttcgtgatattgaagaatatttctaggtggtacatttattcaaataaaacaaattctaaaaattaatacttgaattcaacatcataaaaagtagaggtcagatattaaaatgaaaattcctaattgcaaaaccatcttaaaatagaaaacataagatagattcaaaaatatttctgtctttttgttgatgcgaaactttacaaacttcaacacataattacatcctttatacaagtaaaggctagattagtaattaattaatttctaatgtcccttatgtaatcactatatataacgtacattctcaacctgataatatcactgagcctcacatctcaacaatgtatacgagtatatttttcatcttttcctttctttctgtgtcagaagcgcttgtgagaatcccgttgcagatagatcatgccttgtcaacaaacaatgatggagttcagttgaagaacgtaaaggactttctgtactatgggaagatccaaattggcaatccaggccaaactttcactgttctgtttgataccggaagttcttccctttgggtcccgtcagaaaattggctggccaaaactgaaaaccctcgcaatcgttacatatccagtgcctcaagaacctttaaagaaaatggtaagttttcgactgtgttattatagttttgttttatcaaaaaatttctaaattttatggttgtctttatctttcatcccatttcacagtttacaaaaaagtttattcatgatgattatttgtatggtcaaactaatttgctgaaacaaatatattttggtgtgaatttattttggtctgtgtgtcaaaatctgaattatatatctatttagattgtatgtgtatgttcagtgtgttaacctctctagtctgtgtgtaaaacaggaacaaaggcagagctcaagtatggaaagggttccctcacgggtttcctaagtgttgacaccgttacggttggtgggattagcatcacgtcacagaccttcatagagggcgttaagactccttacaaagagtttttcaagaaaatgccgtttgatggtatattgggactcaggttcacggacccgctcaatttcggtacatctgtttggcactctatggttttccaaggcaaaattgcaaaaaatgtgttctctatctggcttagacggttttctaactctggagaaatcaacggtggagaggtagtatttggaggaatcatcccagcgcatttctccggtgaccatacatacgttgacgtggaagggccaggaaacttcttcgcaatgtccaacatttgggtcggaggaaaaaacaccaacatttgctccagtggctgcaaagctattgttgactccggaagttcaaatattaatgttccaatggtaaataatacatctgttggtaaagatataaattgtcgcaaggcacttgttaactttctttattttactgtaatatttaggattccgctgacgagatccataggtatatcggagtagaaccaaactgcaataattttgagacgctgcctgatgtcacctttacgatcggcggaaaggccttcgtcctcacaccacttgatgtaagtggaacgtacaattttctttcctccatttttactttccttatttattattatattggtctttttttcaaaacttattttctctgtttgtacctagtatatacgtcgttcgcggagtcaatgcacgagtaaattcgtgggaaaaacaaatcgtagccactggtacgtaataactaagaactctgttttcatcttaatatcttttgactggtagtaacacaattcattataaagatttcttttctgttgaaaataacattacaatatcttttgactgcgtgtggtttgattgcaggacattgggcatcccattcatgcgagtctttcacactgtttttgattaccagaacacacttgcagtgaaagttgggttcgctaagtcgactgattagtttttcacaaaagctaagggttattgttttaatgaatgtttctgatatatatcgatttaggtgatcagatgaatacgatcactaaagtaagaaaaacataacttttatcaaatcaaaatatattgatctttatattctaatatttgcctaatattatctcgatgaatagagttatatatatcttcaaaacaataaaatgtctaccaatcaactgaatgagaacaaaaatacatggcgactttagtttaggatatttacaaattacaaataatctccactcgtttgatacgacatcaaattaatctctcccataaaagtaattaagcctgaagttgagcaaagcacaattaagaagctcacataccttttacaaatctcttcatcgtgataagtacaaatctgaaggtcttatacttgtttacgaagggtagaggactccttcctaagacaatagcgatggattttgattggacttgttattatcattctcgaaacctggatcaatttcttcgtttggtatatgttgtaacttgtaagattaattttgaaacgtttcggattgagttcaaacatgtctgaattcaagccgaatcatcatgcctcaagttttttgaggagcaacgcatctcaactctctcgaactttactgaaaaacttgcctcaactctctcaaacgtcattgaagaacacacctcggtagtttcaatatcactctttctcaagccttttttgaatcaatgatttgtggttgtgacttgattgaacgacaccaatctagtctcccattgttcctttggtgttattatctttggcgatttcgacaaaccttgtccggtatttggaatctgtttccactagcattctcttcgatggagcattctagcaaaagctcttatctttcttttccatttattaactcaagtttagttttaggaatttctctcttttgaataagtgaatgaaagttcttctatcagaaaaaaaaaaaatttagagaacagcaatctcacatctatcaaatataaggggtgttattggttcctagtttacaaagaattttgatgacttcaatcaatccatagaaagtaaataaatgaaagattctaaactattgctagagagttttttaaaatcttgttgattagtatttcataatcttgtaaagtttctctaataatttttctgttttgataatatttttcatgatttgttataactttattttgtgaagaaaagttaaaaaatcatgaaccaataacataataatctaattcattaacaattagaaattctttggttttaattgaaaaacacaaaacttttactgacattatataagtatgaatccaataaccccaaatttataaagattttagattatttttacaaatattaaatgataaacacaaaactttaataaactttttttttttttgatttaataacaaacagattctacatgacactttaagttactaaatctcttttgaaatcataaaccaataacatcccctaactttatatctatggtatatttccttctccaaatatcaaagttttattccttttattgtttatgaaaatttatagatttgttacatgtctaaatatgaacgtcaatattcttgtctaaattatataagaaaaaaaaagattttccaggtgtgagattcttgtgttaataaggatgatatacaactcacctttccaagtttacaaacttatatatattatggacatgaatccaattcttctttttcaaaagttaaataaagaaattatctacaaattagttatcaacaaagaagaaattgtctgtcgtcggacacatgtctttttagagttttggtgttaatgtatatctttttatttttatgaaaatatcttttattgacacgcatccatatttcttcttttcaaaaatcatataaagaaataaattggttattgttagatatatgttttttctttaaattaattggaatagggtcaactttgtatttatcgtttaggggatgtttaggtcccttatttaaatagatggagtttgctactttctaatgtctctgctctattagtgagagaagatttcgttttgataaaaagatttgaaatggatcccccttctctgatgtctgatggctcaagctggtccaagcttcctttagatctcttgatcatggttttcgaacgtcttggttttgtagattttcaacgaactaaatcagtgtgtctagcttggctatatgcttcacgaatgtcagcgccaaacaagcagatcccttggctcattatgtttccagaaaaaggtaaagatttttgtctcttgtttaattctgaagaaaaagagaagatatataggattcaaaatcttggtgttgaattcgcaaatagtcactgtttggcgatttatggaagttggctctttatgagagatcctagatataagctctatataatgaatttgtttactcgtgagagaattaatcttccgtctgtggagtctcaatttggtaggataaagattgaacaaattaacgatgatttgttctatagaaaagttgatgatgaatatgattaccatcctaaaagacacatgatcgatattagtgaccatatattatggatagatgataagaccaaagattatgtggttatgtggtcattcgagtgcggatacacatatatggtttattgcagaactggagataatatttggaattaccgcagtcttgatatatcgactgttaacatagtatacaaagatcataagatgtacttgtatagttacactcgtgatgtcaaagtcttggatttttgtgaagatattccgcgacaaatctttgaaacgcaagttaattatgatatattaatggaaaaaggattcagaagtgacgttgatgatgtgttgaatgataaaaaggaacatcttgtagtcacattaaatggagatgtccttagagttaagagcaaaatatgggataatagtgacgtttggtccttctgcatctacaagttgaattcttctaatacttactgggagaaactcacttctttgggagacgaggcaatacttttggatctaggtatcactgtacttgccaacaccatcgaaggaatcaatagaaattcaatatatttcagtggttatcatcgccctcattatttcagattcgatcatgtttggagtgaaaaagatatttgtgtcttcaatcttgacacacaagaagttgaaagaccacatcaaagtatttgttcgtccattcaaatatctggtgcacgatggtttgtgccaaatttcaaacatatatgattgatctcaactttattgtatcttttcaatgttttttttttatgtttgattccctaaacctaaacacatctatattggatatgtatctcttttcttttgcaactgtgaaagtaaattaaacatatcatatcatatatataaaatataatgtttaaaacttatattggaataacatcaaatttagaccacatcatgaaatcattatggcctttggttttcaatttgatccatatccctataatttttaatattgaaaggatttgttgaatgtacaattttcattttttctaatatcgtctttaacatttggtgagattttattggtgagtactgtgtagagatgaaagaaagagagtgcttccgagagtggaaatgatgatactctaaacatcttgtgaagctgagctcatggctgccatagaagcatcaaaacaatcggtatagcttcaagagcttcttggggaaattattggagaaccatgcaagaaggtgttaatcttgattgataacaagtccgcaattgcaatcacaaagaacctgatatttcgtggatgaagtaaatatattcacaagagatatcatttcattcaagtgtgtgttgagaatgaacaagtggaagtagaacatgttcccggagacgagcaaaaggcctacattttaccaaaagctcttgggaggatcaagttcaaggagatgagaattattgttggagttcaagatgtggtgaaatgtgacttcaagcttaaagagaagaatgttgacttaaatttgaaggaagcttgaatcataagctaaaaaggaataggattagaattagactttgtatttaggaagttgtctaaatatttatatatatgttttcttaatctttttaggaaaacttatatgtatgtctaattctttttatatataagaagatgcaagtgtgttgcataacttataagtattgagagattaagagagtttagattttgagatatttttctaagctaataaaagagagttattcttttatctttgtgttcttaatcttctttgaaactatataaaccacactcacaaaagacataactagttgagaaccccattggagatgttcttaggactcaataaattcagctatattataaatgatcatgattggaacacatggtaaaatccaagctttcttttttcttttttcacaattaggcttttgatcagaatgttatagctattgatttgtttggttgaaaccctgttttggcctatatgtatatgtattgaaattccaaagctttacatgctcaaaacggatcaaaatcttgaaaactattactaaatgatgtagcaatatgcaaaaatacatatatgttataaaagcaaatacaaagtatcagatcaatcattctcgtttgaaaattggtaagaaccatcgcgcgtcataacatggaacggacaaagaaacaaagtaattcggttgttcagccttctttgtaacgagactggatataaaaacattgtttttgtcatagagacctccaagatcattggcattgaagtagatcaatttttttttaaaaaatcctatattgtcttcggcgagaactgtgatatacccaaatccaaaagaattgctttgtttcccaaagaaactattttcttccatttgtttcccttcgatgaacccatcttgtagatttcaaagttccatattcgtgacttacttggacgttgactcttaacaattacgacatctccacctacagtgacaactaaattatccctatagtgagtcctttggacttccaggaagtctcatacaaaatctggatactatttatatgcatctacgtacacttattttgaaaacttttgcttgaatttctccagaaaaaacaaaaaatttgagtttatcaaagttgagacaataaagcttgtgatattgtatacagtgtcaaaacattcctcgatacctgagatctgaggaatttgtttcttagagttgtctcctttcttgaaagaaacaacatgttctaatttcttcatcaacaattcctataactagataatctatggatttctcctctatgtggctaattaaactgttgaaatataggtaactaattcttcggtgaaccgatcaattaactgacaaattgttttataagtcgactagtccatatattttgtgacctttaattggaacatgtaaacttgataagcgtattttgctttcatttttgttcctttaacctttacggcgttttatccaaaattcctagctaataataataataaaagaattaacattttattttaaaagtaatatatcaaaatgctatattacataaataaatatgtgtgagtttatatagaagaaaatatattttagatagagatttaatttccaaacaaaatcgttgatcttacatgaagaacaggaaaaaaagacatgttcttaagaccctagcttgttgtccacggataaaagctaaaccaacaaaatacgtagaattacacatccgaaactcaaaacaaagtacccaaaaaaaaaaaatcgaccatcaaaatgaaaactcttattgcctactgtcattgttgctcgtagccacattattattattggtgttattattttgatgactggaaccgttcataatggacgtgatcgctgccgctagagccgccgcaaagtttggatcggacgcaattgctgcactggcagcactaacgctctcggccaccgaggaagtggccgcgatctgcagtggctgagccggtaactgtaaaccagaaaacttggactgttgttggttattgtacatagcttgaccaaccacttgaggcaaaactgccgggttgaaaccgggccgttgagcgaactgcatcaacgggttattagtggtcatattagggttgttaccgttgggtgaattggtgaggtccaatgtgatggttgggaatggtgcggaggctgagattgtagccatgcttgaggagcaaggcaagatagctcgagctaggaggtttgttgggttcattaaaccgtcttgactcgacattgagcccgagaggagcatgcttgcagctgcggtggttgttgaggccatggccgtagcggctggtgggagtggatggttgtggtttccttcgtaggtggttatgagaatagatctgtcttctgcgcaacgctgcacctgttaagacatcattggttacggcttcctttgtttcaaacgcaaattatatagtagatcttaattatatttttatataatcatgccgacgtaaaatgtaaaagcatacgtacttgcttgcgaactggacatccaccggccattgtgcaacgataataagcccgcggacacgggtttcctttagccattttttgtccgtactttctccattgacatccatcgcttatctatagaacaagttaacaacattaaaatataaccgttaaaatttatgatcaaatataagcctatgcctagctaccattagagggatttaggttaccatggcagcttcagatcgggcacgaactgagacacgggctttccgcatggtggcttctgcggccgactgatcaataacatttccgtttctgtttccattgctattgctagaggatggattatgtttggggactttgttagggtttccccaggcgttagactctgattcctctgagctttcttctcttccaagcaacctctttccgttctctcggggattggaactttctagaagcgaaggaggagaacctgaacgaaccgttgtcctctcttcagatgacacttcggctccatgctctgctgctccagacgacggcccaaggtccatgaactgccttggcaccatgatttgcagttcctgccgtttccttccttctgctttgctctcctgagcctaagttaagttaatatatagaagtgcatattactctttctgcattatttataactaatacttagctaaacaaataaaatacaaagcgactgaggatttgttttttttatagttaaataagaatgatacttttcagaaagatcatgaaataatttagtcaatggattacgtgtttggatttgtgtgtatgtaccgattatcgaaaacacttcgttttctagatatataaatctcatgcgccgacgttactttacttaagatcaaaaatttcaaatttataacgtttattacgaccaaaaatacatagagttggtaagaaatatattttttaacaacgaacacaaccattgatcaactatacaaccttttggattgtccacatagttcatgtagtagtagtatgccaaaaagctatagaggattcaatgaatacggtttggagatcgatctatatattttttactgacacgatttaacggatacatatataaaatatatgtatattttagagggataaagatttagatctaagtaaaaaagtaaattattgtaacattaccaggagatgatcttgtgaagagttacgttgttcttgttgcctcatgacggcaacaagttgcatttgtaaggcattgaagttggtcgtcgcttggctcaacatatctcttagcctttgattctctattttcatcttcttgagctcttcttgtagttgtgcgttcttcatttcatttattacaaccaaagacatatacatattagaacgagaaaaaaaaactaaacgtctcccaaattttgaacagtaatctattgaaaatttgtgcttttaggtcttttcaattaattttactgctctcgaaccaaacagcattcagtggagttagaaggatgtagtattttgtgttcgtggataaattagttacagattaaaatggaaaacgagtaaaaaaaaaaaaaaaaaggtacctcaatctttgcacgtttatcttccatatccattgatagtccatcatccaccgttgactcatcgcttcccgtattcgcggtcagaagattcagaccgatctatatatatatttacacagtattaatacattaaccagattcagtttatctgtgtagtaatgtaaaaataataaaattaactgtttgcaaaataattgttgctagtgttatgagcattcacatcacatctcaccaaccaaagaaatatatttcaacacatataagaaataaaataaatcatttaatatcgatagcaaaaattaggagaaaatcaactatacttacattgacatctctggaacgatcgttttcttcaactcgtgaaccctccattttgatgagaaccttattgccttcgtcgtcgtcgtcgttgatgttctcacgtgaaaccctatctctcttctctgagaagaagtcaacctcatcaaccaccacacgatggtcatccaacggtgtgatctgatcgtgacggtcttcgtcacgtgaaccgcctagactcactggaaaccggaacatctaagtctgtgcgtgatactgattattgtaacgatgattattttctttgttgttgattggattctccaaaaccctaggaatgtaacttgccaggtaagataaaaatgtacgttttgataattaatccagtttgatggatccgtacagtatcgtatagtaagtaccgttttggtgcttctccatatataggaagatcaaaaaggaaaagagcaaagcaaaagatcttagaaagagagagaaagagtttgattaaattatgtggttattatcgatgagagagtctcttaccggtccagatgattcgcctacaaaaagggttttggcgtcgactcaaatatctctccaaattgtattttatcatttatcaattatatagattatataaatgtatatttaggtttaagatagaagaatcttgtaggaagtttcgtggagacttttggttttgttaaaaagcgtcagagtctgcgtcatgtgtctgccacctgacattataggaggaacatgggtcccataatctaatagacatattgcacgtttacatttggtctttctattgtcttaacaaacatgctgctgttttatgattcgagtaatgataaaactgcgtggtgtttcaaatgaaaactaaaagactccatattgcttttgttttatatatttcaactccatgctctatgtctattgatttaattaagttttagctatattggtacggaactcatagacgtgtgtgattttagataaatcaaatccattacactaatatatctagataattttcttaagatattaaaaagtcaaatttctcttcttaagaaaatatttatgaatgtttttggattttcttaactaaatttgaaaatctcattgaacatgtcaatatacacacaaagaaattgaaatgcggcgaaaagtaggtgatttctagaaaagctatttttatacaaattggaaatcagttattaatggatcttattcaggtttagtttttcctcattttaagaaatatttttgactatttctaatattagatcaaaggattggaaaaaaaagacaccgctagcaactagatcggcacctttcacgtgattaaaaatacgtttttatggcaaaagaatattcttacaaccaattcttaattttgttgagactcgtttaatagacggtacagtgcattactagttttttttttttaactagtatgtattgatacataacgtaagccgtacgcacatgtgcatatagttgtgttcgtgtgtgtgaaaccttttagtttggaggaaataaactttaaaccgacgtacgtcgagcaaactaattagaaagtgaaccctaaacaagtaatattgaataactaggtatttcaaacaagtaccttctcatcctatcatatattccattgttcaggttttgtagatttcggtaagaaagaaaataagagtttgaactttcacataaagaatctcatccttccgatttatcatagaagcatatctcataaatggcactttaaaaggattttcgtgattattataagaagtcatgtactaaaactaacaagtataaacgcacaaaaaaaataaaagatattaacacaaaaatatgtaaccattgttggtttcactttgttatatgcacaaacatctaatgaatagtactatttttggggaaatttcataatgtttaaaatatatagaagaatataaagtcccgatcatattatatatataaatatatatattggataatgtctcactatatgcagaaactatagtttagagaaaattttaagtatatcgctattttttcttaacgtatgttaatttcttgtcttgctaaaataagaaattaattgttttaactgcgtaacttttttgatatattttaacataagaaaaataataaaaataaaagaaaacatataaagtcaaaatcaacaaaatgaggttggcttcgtttacaggtaagagtgcctaataggcttccccactgtgtccctcaaagtagttccaagaattaacttatactaggtgatcatccgcgctacgtcgcggtttaaacaacgttcatctagcagagggtagtgttcgattctacaatcctaagaatttgatgatggagcttcgtacgtattatgcactcttagtgatttattatataaatatcaatttaagagaataacctactcaaatcattagctaatccacgattattatataatcatactttgagtttggattacaaaaaaatctttaagtataaaaaaactattaaaatgattttattgaaaaatcttttaatattaaaataaattcagtaatagtatattgaatatataataaaataatatataaaattgaataataaatgtatcactaacctataattaataattcattacattaattatttaataaacatatgacaaatgttaaaatgatgatgtgtcaatcatataaaaaaaatttactaactttcatatatatgatttgttgacattcataccgtagaacccgatcacttcctttgactttcttttcttagttttgtataaataatttgtatcgagtgattgattatcttcaatttcttggaatattaaattactgaaagaaaaaaagaagagaaaacataaacagttcctagaccaatgactacttaaagaaagatttcagcgttttgttctctgttctctttggtaatcatttggcttgaagattcaagtagtagtcagactatcttgggtaataagtataaccagtactgattcatgtttattaaaaataaattactgttttggagtgcgtttaattttacatttcccgtattgatctgatcgagttttactaatatgcaagtgcaccgtgaagtgtaaacattatatatagtagtgaaccataaggactagttctcacatgctaaagatacgggaaatgaatccttctaatctaagatgggtaatatagattttagatttttacaaaggttaaacaaaaaataattaaaataattaatagcgaaccaagaaacttgtaattgcaaataaaatacatgatgattaactaaaaaacctaatcaaatatgccctaaagagaaacgagacggtttatatacttaaaaatcaaattaaacaagcatttgtcaatagggattcatcataggtattgaggatttaaaacataaaataagagatagaggcaatcattaagtatcaataccatcaatttaatactaattagtcctctcttggagcacaaaacatatattttaattacatgaagttgctaaaatatatattttctaactatacatatatagtaattagagagatgatttgtgagttttcttctttatatgtttaacacgatatcaaaggaaacattacaaagttaattactaacactgacttcaaaaagaattcatacaacccatattactcaacgatatcagaggttccaagtcttcttttgctgctatacaatattacgaatttcttgtagtctaaatgcatgtttcgctatcttacaataatggcgtaccaactttttagtttttaaatgagaagttgaattgagtgaaaatcaacccattcagtctctttgatatatccaatataattaactaaaattcagaaagtgtcaatatgacatacacagttgagaaatagtccaaattttgatagaaaaccaacccgtccataacttgtttttaagtcattataactagtatagcttacaagttgacattcttaaaacaattttattaagtacaaagtgaaattcaaaaggatgttgaaatcttttgcaatgatcatttcgaaggtgaaatcaatgaactgacggttctctccaaaaaaacaaaacactctcagttctttttcatcgtcttaccaatgtttgacacctcaaatggccatatttataacatgtgtgccctattccactactatacagctatatctgtagactgcatatataaaaagaaaattaaaaactattcaagaactatcttgtggcaagaaaccaaaaaataatataattaatgtctaatcaagaactaagttgtgtcattcattacatggttcaagacatcatggtcatagatagaactgcagtaaatagtgattttcatcaccgctaacttttagttactgacagaatatgtcaaaattcatgttatgtactttgaattatccaaaagagaaaagaaaaaaaaaaatcagagaatataaaatgtatcacacataacggaacaaatcgaactacattacacagattttttattaaattagtgcagctgcattgaccaatgtgtgtttgattctctagcttatacgtcagctaggatgcaataagctaacgtgcatcttgggatacaagtcttagtcaaccgagtgcctaaactgaaaatatacatatgaaataatttagagtctataatttgttcaattttatacccccgttataattgccagtcttgaaaaaagaaaaaagtgccggttttgttgatataaaacaagaaaaaaatgccgatctttattgtgaaaagaataacacttcaaatttcaaaaaattgaatttcatcatttagttgaagttttaattgactgtggcaaatagaaaactgaagcacttaggcagaatttatatgataataaacatggagaatttggaacgatacttaatttgagtataaataaagttagagctaagtagctaacatgaattcacaaattataaaattttagttttctaatatgtaggaaagtttaattgtaaaaacactaataaattagacagaaacataaaggatgggcaggatagagcttgcaaaatttagattatttaaagagaacacttaaaagtcttcagtttttgtttgtcatgttaatagtccatagttcataaatcataatcaaccaaagtcaaagtctatcgatatccgaaataaaatattcacaaataatataagttttttaaactaaaatattcacaaatagatgtaagttttatggcaagaactaaaagcatctccaatggagagaccttatggaggggctctctccattttttatgattaaaactttttgaaaaattataaaagagcttttgattattttttctaggttttcatacttcaatggtagtctctcttatagaggttctctgaaaaaaaaatattattttaaaattattttatttcataaaatttaataattattgtaattcataaaatattaaacattaaacatacataagtaaaaatattatttaaaagatgtggaaattaaaaaatatgttttgtctctgtaaaaacaagaactagtgttgtttgtgtctttgtaaaacaagaagtgttttgtctttgtaaaaacaagaataaatgttggttgtgtctttgtaaaacaagaagtgttgtgtagaagtgttgtttgtgtctctgtataaaacaagaagaagaggttttgtttgaaacaagatgtacaatcattcaatatatggttatgtttgatacaagacattcaaaatgaagtatctttcaatatagtacaagactttatgtttgaaacaagatgtactacttgtggtgccaaaactgagtgcctctaatccatttgtcaccaacggttcttaattgcaaaacatggagaactcaagtcacacacataagtagccacggaccatgtcgagtttgaccatgtcaaaatccttcattgttcttctctttgtgatcttgcacaagtcccatatacggtacacatcatctctctccccttcaacagaaaaaacaaacaacccgaactgtctcctgcaccattgctcttaaaacctctctccgacacgaatccctccaaccctgcttcaccaccggaacattgagaaatattctcggtgacactgaggttgaaaaacccaatcgaaccgcagacgtaccaggaatcgaaccatgtattaacgccattgaaaaagtgaaaaacgaaatattgagaatttgtttgctttggacacgtgtccgcctctctcattttaatttagttttgattaatttttcatcgaaaatatcaagagagcctcacaaaaattgcattacagcctcccattggaggtgctctaaataccccatagcaaaacaagctgctcagaaacactttgtttttaccaaaaaataaagctggtaagttgttggtaagtacataagagtcgggtcagtccaattgataagggattttacttttcttgcaaagaaaaacaaaatatcaagttatctagactggattataaaaaaaaaaaatctcatatgtatatgtaattatgtatacacaaaataaataaaattttcattcttttcttacaaactcttgacgtttctcatctttcataaccagtgctacatgtagcaagtccagaccaaaacatatatagttcaactaagtaaaaaaagaaaattaacgtgctataccagaaattagatgcatctcgtgaaaagagtatgaatactaataacaagggccgttgcggttgcagtttagagggccagcgtctgcagttaaagaaggaaccaagtttcccggagctactgtgaatcgctgagcagaactgtaaggtagcgaaatgctgccataaccagaaggtacgaagtaagctccgttcttgaaaacatcttttgaggttctccatctccaattgttccatcctccttttacttctctcttcgtcacctgtttattttaattatgcttagcattttattttcatgaattaatcataggtgaatcatggtctttagacattaatcattatatataaccaaaaattggttagacgtgtaaccaaaatatagaatatcaatcggtccaactcaacctaattcagactagagtatttctacttacctttcttgtttttcagctaacctcatttaaaaaaaaaaaaatactttcggcctaaaagaccaacatatatgactctctttttttctaggtcaaatagtattgatagtcgaaatttcgaatcgttatttttttctttgtcaaaagatgcaatatgctgatttgttgaatatagatgtgatacaataacagcaataatatccatcactagcctacatgtttagatccgatgcgtatatatgtaattataatattgagttaagaggataaaatttaattacctctttgctgttagatttatcagaagcaatgaaatagttgccttcactaaaaatggttggatcggcgctaccaccaattgcatacattatccatttatcgtatctattgtttgccacatgagcgtaccctcgtcttactctgcacccaccaaactttttttacattattacatgtctaattctgcattaaaaattcttaataattattttattttctaattaccttggcattctctccacaagtcctggtccaaaatgattgaatgccacggtcactttcattttcacatcttgcacaaaatcatcgttgtgcccaagtaacatcacctatatatacataaatagcaaccaatataaaaatgtgatatatattgctcgagacattaattagctatattactaatgattttataaactgaaactgactttgtcatgctgagtgaaatagttgttggaaatagtgattcccgtggaagcatggatcacatcgatgagcccgtccgtacaactcgctaggtaacaatgatcgatccaaatattcgatgaaccgaaaatagcgatcgcatcaccgtccgatcccttacggtgaccaacatgcgtcgggctactcctcaccataccgtacttccccggtttgcagtcgtggatgctgatcccgtgcacgattacgttcgtcacgtcttgtatcgtgatgcatggtccgtatgcgatttctacttttgcccctctcccatcaatggttttatagctattgaccatgagctcattttctagggttatgaccatatccttagcgaaagtgatccacaatggtttggcttggatcacgccgtaccgcaaagaacctggttgaggattctgtgcattgtcgtaagggtttgtgacaacgtataaattacctttctttccgcccaaggtagatgaaccgaatccaaccacgcaatccgctaggtctttacgattggcagcccagtcagacttgagccgccaacaggagtccaccggattcatgatgttctgcggtttctcggggaggtagttggcaaccgtgggggtatacccgtaataaccattattttcggcatggaccaaggaatgacataagaatagtaccacgaggaggcacgaaacggtgaaaagagtcatggttgggtgggtttatggtttgagtagggatcgatactaagaaaagagaaaagatgggcaagtacttaaggaagtgtttagatgagagattgtgtcggaaagattagaaggtgtggtaaacacgatcttttcctaatattggcctaaagatcaaagttgtattggtgagactttggtgttgttgcacaagatcacatgttcgtgcttccccacgaacatttctcaagccgacttgttggatggaaaattccaaagtcttaatgtattttgtttagttaattgtattacattacattaattagtataatgtttatctgatggggtgttttatgtacgtgtaccaatccattactattttttgtttcttttacttcaaacactccatttcttatgtttgcttttttttttttttttagttttcttttaagcaaaaaccgaaccggtatcaagccaaaaatggaatcataccaaacctaaattaaacagaattacaaataattttatatgagcgagtggtgtgttgaaaattatgtaatacattagggtcacagtgtgaaaaaagaaaaaagaaatcccactattacgtgagatcaaggaaagcataccgttttaaggaaaaacaaaattaggatgatagactttaaaacggcaagcaattcaaacacagtaaaacagagaggtctgagggttctccctaaaagatgagatttcgttcggcacaattcacatggttttcgctaaatctgaaggaatcagattcatgagaataaactaaattcaaaagattactacgaagaagatgaagaagagaagttcctctgcaattgcgtgatgccttgagaaccaagaaaagtgatgttgccactgagaaaagcagagtaacaatgagcagagagtttgggagttctcttacgatgaaaatcactgaaattcgcagagtataatccaaaactaaactcgtatccctttactatctcgtataaatccataaatgaccatacgaagtaacctctcgtgtctgatccattcctacagacggacgtagtaaaatcttttttcttagtacacgtagaagagaagaagatgataaaataagaaattttaacggatttgagcacagcaccaatataaactttaacgatcatacgttttaatatttgttgtccgctgtactcaatcatatattgcagtatttatatgatcaaaaaatccggactgaaccaaaaccgtcaataaatcaggttcgagagaaaacgcaaatagatacacaaaatttatttcttacaaattaaactcttgacgtttatcatctttcataactagtacaccagtgctacatgtgtagcaaatccagaccacaacatatatagatcaactaagttaaaaacgaaaagtaacgtgctatactagaaaataattagatgcatctcgtgaaaagagtattgaatactaataacaaggaccgttgcggttgcagtttagagggccagcgtctgcggttaaagaaggaaccaagtttccgggagcgactgtgaatcgctgagcagaactgtacggtagcggaatgctgccataaccagaaggtacgaagaaagctccgttcttgaaaacatcgtttgaggttctccatctccaattgttccatcctccttttacttctctcttcgtcacctgtttattttagttatgcttagcattttattttcatgaattaatcataagtgcataatgatctttagacattaatcattacataaccaaaactagaagtttagataagtaggcagtccgatggttagcttagctaccgtcatttatttggaaaaatcagcggattaaattttggtggtggaataataatggtcaagcagttattcagtccttagaaaccgatattaaaatatataaaaaaggataagaaaattgtaattaaagtctacttacctttcttgtttttgagctaaattcattctttttcataaacaatttaggaattaatctataatatgaaattgggaccaaaatgtccaaaaatactttcggctaaaaagaccaacatgactcttttttttgtaggtcaaaatagtattaatagtcgagtttcgaatctatctttttttcttcgttaaaacttgcaatatgctggtttgttgaatatatagatggtgatacaataacagcaataatatccatcactagcctacatgttcagatccgaggggtaaatatgtaattataatattggattaggaggataaaattaaattacctctttgctgtaagatttatcagaagcaatgaaatagttgccttcactgaaaatggtgggatcggcgctaccaccaattgcatacattatccatttatcgtatctattgtttgccacatgagcgtagcctcgtcttaccctgcacccaccacacaattttacatcattacatgtctttttggtatgctcatcattacatttctaattctgctctaaaaattcttaatagttattctaatatttttgggcaaataattttagttttttagatgaaaaaagaaaggaaaattaaatagtaattaccttggcattctctccacaagtcctggtccaaaatgattgaatgccacggtcactttcattttcacatctttcacaaaattatcgttgtgtccgagcaacatcacctatacatatataacaacccatatcaaaatgtgatattaacttcccaagacattaaatagctatgttaatgattttgaaaaactgaaactgactttgtcatgctgagtgaaatagttgttggaaatagtgattgccgtggaagcatggattacatcgatgagtccgtccgtacaactcgctaggtaacaatgatcgatccaaacattcgacgaaccaaaaatagtgatggcatcaccgtccgatcccttacggtgaccgacatgcgtcgggctgctcctcacctttccagatttccctggtttgcagtcgtggatactgatcccatgcacaatgacgttcgtcacgtcttgtatcgtgatgcatggtccgtatgcaatttctacttttgcccctcgcccatctatggtcttatagctattgaccatgagctcattcgctagggttatgaccatatccttagcgaaagtaatccacaatggcttggcttggatcacgccgtaccgcaaagaacctgggtgggggttttgtgcattgtcgtaagggtttgtgacaacatatatattacctttcttgccacccaaggtagatgaaccaaacccaaccgcgcaatctgctaggtcttcacgattgacatcccagtcagacttgagccgccaacaggagtccaccggattcatgatgttctgaggttcttcggcggggtagggtgcagccgcggggctatacccgtaataaccgttatatgcggcatggaccaaggactgacataagaatagtgccacgaggaggcacgaaacggtgaaatgagtcatggtccgatgggtttaaggtttgagtagggatactaagaaaagagaaaagatcggcaagtatacttaagggagtgttagatgagatattgtgtcggacagattagaaggtgtggtaaacttgtattggtgagacgtgagactttggtgttgttgcacaagatcatatatatactcaacggcgggcccatgtttagcccctaaaattatgaaatcagtcattagttatagcaattaaatctaaccctctatttcatttgtttcctttttcttctatgatcagtttctttgcattcattatttaatttattttgtttctagttatcttatttattttttagttttccaaatttttaaaaatcctttttgtattttgattttaaaaatacaattttattaaaattttacagaaaattaattatgtgtcgtcttttatctcactagcaaatttaacaatattattgggtccgtcccctgcatctgcatgtacatttctcacgaacatttctcaagccgacttgcttcgatggaaaaatccaaattctagattttgtttgattagttgtatcacattaattagtacaatgtttatatggtgggggtgtttcacgtacgtgtaccaatccattacgattttttttttattgtttcttttacttcaaacactccatttgtgatatgttcgatatttttgaattttcttctaaacaaaaaccaagccgatatctaggcgcggatctaccttagttaagatgaggcagctgccacccttaattttttcaaatctttgaagagttttaaggaatcaattttatttcccccgacaaaaaatccctgcttaccccccccccccccccgccccctaaatttttgttttccaattaaccaaactgaagttaccttaaaaaggtaaaaattaatatttaaagaaattggtctcttttcataactttggcgattcatagttatggtaatttgtttctctttaatatttttatttatttatgtgttgttttccaaatatttgatattttttatgagacaataaaataaataaaaagagcgagtggtatgctgaaattaaaccgaattacaaataattttatatgagcgagtggtgtgctgaaacgaaatacggaactcattattaatgtcacagtgtaaaaaataatcccactattacatgggcctaaggaaagcatgccgtttttaggaaaaataaaattcgtatagactttaaaagggcaagcagttcaaacacagtaaaacagaggcctgatgtttttcgctagaacatattcgtgagaattaagtaaatgcaacattactactacgaagaagctgaagaagaaaagttgctctgcatttgcatgatgccttgagaaccaagaaaagtggtgttgcccttgagaaaagcagagtaccaatgagcagagagttttggagatctcgtacgatgaggatcactgaaattcacagagtataatccaaaactaaactcatatcccttcactaactcgtataaatccataaatgaccatatgaagtaacctctcgtgtctgatccattcctacacgtagtaaaatctttaatctttagtacatcgacaagagaagagaagaagaaaatacaataagaaactttacttacctaatagatttgagaacagcagcaatataagcatgtaaatactcaatccttggtgtgtccttttgttgcagctgcaaatcttgcttcatcggtgtacctattcgtttgcattggcaagagaattaaacagactaagatacaaacaagagatagagatcaggaagagtgagaaggagagaccattttcaagaatgtagataggaggattgccatagctttgctttatatactcaaggacactttccatagcccatggagcaacagcatacttttccaaacaagaacaaaacaactaagaaatatagattgagaagttttgcatctgaatttggtagccttgaaactcttacctcgaaagctgaaaaattcccaaggactgtccctccaaagcagtaaaacaaagaagagatgattagcaacaaaagaaaatcaagaaaaaaaaataaagaagcagagactttgtatttgttattcaaaagatagagtttgatgatcctacatgtcatagatacacccatgtctgaataaaaatccgggtttcctgaaatagaaggtttgatcttgatgcttgtgaccgaagctgcaagatagtgaatgattcctatgaaatcagatgagcctttaacttgttctgattcttcctttgagaaaactggcagtcttgatccaacagttcttttcatttcatcgggatagtcaccgaatataaaaggctcaagcatcctgatttttaagaacagagtgttctgttttcagctaagaaccttggatctgttttacaatttggaagttatgtttctgcctaactcaccagccgaagtagaaatctttggctctttgaactgcaatgtcatcatccttggagcttgtagaaggtgtaaaccctagggagaataagctaaatcccacagaacctccttgcatatcctgcatgttgctcgtaactcacacattcaagagaggattatgtaaaatatataaaaatgtgtaagcatgtataccttgtacttttgcttatacagtcttgaagcagaggcgtgcgcaagaagcaagttatggcctacgatatatggttcagttgaagagttccctgatgagcagtttctacccggtgaggagcaacgaccaggcggtgtgatcccatcattgtatcctccaatagtgaatatattagcctcgttgatcgtggtccagaatttgacgtgatgcccaaactctctgaagcaaacatttgcataagctgtaaagtcttggctgcaatgacaagaattatatcaaccattctttttttacattgcgaagcatgaaaagaaaactaagttactaaaatgaggttatttagccttacatgattctgcggttgatccatcctccatattcatcttcaagatactgaggatgatcgtagtggaacagtgtcacatgtggttcgattcctgtaaaagtttactttaagtccaaactcaacacaacagaagtttttggtatccatgagtagtctcaccatggcttacaagttcttgaatgaagttcttatagaactgtagacccttgggattaacaggacctcttccatctaaatgagataagtgctcatcaagtaaagttccggcgtgaaaacattaagcgtgtttaagaagacttcttactcggtataagcctagaccaagaaatggagaatctgaaggcatctaagccagtttccaccatgagcttcacatcctcctgcacatgcaaaagcagaatctctgatgtgcaataacaaagccaatgtttctgtaattaactattcaagagtttgcttggtgaataagctaaccttgtacttatggtacccatcacttgttatgtctccgttacttaggttacctgtcaaattaagacagcatattggttaaacaccaattttactaagactagacgcttaattatcatttaactaaaaatcataacacaaaagaaaagcttgtaattacgagtgtgaaggaaagtatcccagacgctaggttttcttccatcttcatcaaaagctccttcccactttcaaaagccaaacatttcttcttcagaaaaatgaaagacataaccctagaagttgaaaaatcaaattccgaagaacctgataagcagaagtggcggatccaaaaatgaagccctcggggaagtcgttcttgtcgctgcatctcccagacaatgcaaagaaaagcagaaaaatggttaacagagacaaagtcagttccatttctctgtttttccctctctgttttgttccatgattttttggaaataacttgtcgactcacgagagaatagaaacacttgtctgtgtcacaattagtcatcgtggactcaaaagaaacacacaccgacaaacactgataatcatagatatggaaaggaacttgtacaaatgttaaaaggaaatgagccttttaaggcctttaaagattattattataccacaataaaactagtttcttctatgtttttcttagagattttaataaaggatatgaagaaaattacatcaagaaaaattacaccggcataaatgttcgtatccaaggttatcacactcgcaactaatgggcttattcatcacacctcctttcttaacaaagtctttcatgcatgtcttgtttccgtcccggccgcatcctccgataaatatatccttccggacgcgtaggttagccgccatgggatccaatccagcttccacttctatatattgttttatatcaaccacaagaattgttaaagtttgaacgaaagattctagttattcataattcatatcaacaagttttttttggttcaaagcaaaaaaaaaagaaaaaacgtattatacctttaacatggctcaaaacgaaagacatgagaacacaggaaaccaagaaaaaagtagcagatctcatagttcttctcttgtttcttattattggctgatgatacaagttgatgtatgtgtgtgtatatatgaccacgatttttttacctttttttgttaaaggacttatatatatgaacgcgattagaaagtatgtacagagtactcacttaatgacctattaattcttattcaacgatttgtaacgtaaacaaaattaatggctaatttaaattagttttggaaaggtaatctttaaattttctgaaaagtattgcttgctggtcaaagctgtcaaaacaaataataataatatatattattggtcaaatatagatgatttaaacagcttgtgatgaattagttaatatttttaattataagagattatggaaacttgcagatatcacggattctcatcaccaaaatttatcactagattgacctaaatgcgtgtcaaaacggtcatgcacatgaaattcatatcgccatccactaaaccctagtatgccacgttttatggtgtgaattatatgtgttttagaaaaaacggagtacattttttctttaatgtacttttaatattctatacatgatgttaaataaattcatatataaaatttcttgtattaatttgatgagattttcaaaacatgaaaaggtattcataattctcatgcatagctagcataaaacagacgaacacatttgatattattaaaataaacaaaaacacgttcaaacatcgaaaaatagaaagagtaataattaattcttttctttttgataaagaaatttaatcaatttttcaacatatatagtttcaacataattaatcacttcacttgttcatccaaagaatgcagcggagagactttccttgcactaataaatcgaaagctttgttgatttcctcaaatttcaattcatgtgtaataaaactatccaaattaagctcctgcagttttaaacaaaatagtgaatcacatgataacataatatgcaagttagatatatataagtaaaatactttttaataaccaaaaactgtaatcaaactggatagatttgtgtatataccttttttaagtaatgatcaaccagaatcggaatatctagtttgggtttaagaccaccaaacaagcttccacaaacatgtctgcctctgagaagatcaaagctacccaaacttactggcgttagatgcttatctatccccaacactaccgtttttcctgaaccctgtgttaattatttaattgttaaagtcttaaagacataagtttttttttatgtaaagttttaaagacatatttaatcaattttggttttaacatattggaaatttgaataattctacaaccaaaaagatcgagtatatatataagtgtaccgtgcgagtgctggagaaagcttcggtcaataaagaaggtaaaccaacgcattcgaaactatagtcaactcctcctccagtcatttctttaatcaccttttcaaaattagccaaaaaaataaattaaattcgtttgggatagattagtgatcaattacaaccaaaatttacattattctcatgtaaatctaagaattatatatgagatagagtgtaagatattaaataacatacctcgctaatcttattttctccacacaaggtagaattgatgaaatccgtgaaaccaaatttcttgcctattcaatgtattacatgatgaatattatttttcgctttctattaagtattagttaatctgcaatattttatgttaaattaaataatgtagcttttcaatgcaaaaatatcatttgtttatctaaatttttctttcaaatgatattttattacatatagattggaaactaaatggtgacgcaacaacggtcctagaacacaaacattattaggttatatatatttatatatatttatatatcttgggttttgttttattctcttaatcatgttatagaatatataaaatataagatatttgcaaccatgtgtattcaatgggaatataatctataagttataacaaaacaaaagactaaataactacgacattcggatttggttattttgacaaataaataatacaacctggaccggacggaacatcaccaactacaaactagtagtttttagtgttttgtaagatataataccaaacctaacgtgatcacaataagccagaaaaaaaaattgactttaaaagacaaaaatattcaattgaaatacaacacaactttacctagctcgaatttttctggattgagatcaacaccaatgatcttgccggctccacgcagcctggctccttctccaacctgttaccaaatcatttaactaatcttactagcaaaatcaactaacgtatacaaaattcattcatttgaaggacacaaaatattgataccgcaagtccaacagcaccaaggccaaaaactgcaacggtggagcctttttccacgttagccactttccaagctgctccaattcctgatccacgtgatattttaaaattaccatcctaactcctgatttctacttctttttatgctttaacccccaaaaatatttgaaaatatgttttcactcctgatctttctctacgcaacaaatattgaagtaacctgtggaaacaccgcagctaagcaatgctgctttatcaaccggaatatcaggagagattttgacaagatgtgcgatgtcgacgaccgtatattcagaaaaactcgagacaaagagaaaatggtaaatatcttctccaaaggagtctttgaatcgtgaagtcattccatatcgtctcgtgtttgataagaaatcgtcggcaaatcttgcgcaccagttgctctttgaggatttgcaatctctacattcttcacagtgagggtgaaacactggcaaaacgacgtcaccttgttgaaatccattcacatgttcaccaatgctctcgatcacactagattacaacaagatcaagatattattaaaaattcttgaaaaaagaaagtaaaacaagtaaataaagaagattcttacccgactgcttcgtgtcctagaatcctaggaaaccttgcaagcggtccctggaaatttggaaaggctaattagtgaaaagaaatcgagttttgagagatatattatgtattgataagtgtaaaacttacactgtctattttcgagaaagaaacatcggtatgacataaagatgtacatatgatctttatcctaacttcataagcttgaggtggatccacatggatctcttctatcaccaatgcttctcctggttttctagatactgctgctttgcatcgaatcggctttccttcgtgaatggagaacattgatgttttctccatggtggatgatagattatgaacttattacggagtggatttgagagagagaagagactcacttgttcatcctatcttctctttctgtatagttgtatctgcatgcaaattaacaattacatagttttttaatttttttaatcaacactgtaattttataataatcatttctagttgactgattatataattaagctcgtctctaatttattatcaaaataggtgtaaagattgaaacgtcctacctatattttgtcttgtggtcaattttttctactgaatcttaagaatatgaaactgttgacatattgtattaatggaaagcacagctcgagatcgtggttggtgaattaagacaaagccaactaataaatacagtatcttgtattttaattttgattaaattccaactaactaacgctttattttttattttttttgagatggcaacattcttacattcatatggttcctggtaagtaagaccaaattaaaccattggatacaaagaaataacatctttgcttcaagaagaaccacgtgaagatactcatgaagatcaaaaaacgaaataatggaaatggttgttttgagaagagattcaaacctaagagtcaagtagagtagtcttacggaaacgaaactttttattgaggtattataagttttgcgactgttattcattacaatattgccaacatctaagaagattcaaaatttcacatcacaataaactggtttcgttaacgttatattatataattcattgtaaattttatttgtagaactataacaaaaactagcaaggaacataacatctacataaatgttcttccccaaagtcatcacactcgcaactactaggcttagcggctacacctcctttcttaacaaagtcgtttatgcatgttttgcttccgttgctgccgcatcctcccaaaaatatatccttccggccgcattggtccattggcttcaacacagcttccacttctgttattttatatcaaccaaaagaattgttaaatattaaagatcttagtcattgatcatgcaagaagattataattagaccatggtatacaaaccattgtttatgaaaagaacatacaatttcgcagttgatagaaattgaggttttttttttaagattttacctttaacattgcccaaaatgaaagacaaaagaacacaagaaaccaacaataaagtagcagatctcatgattcttgttgtgtatatttcactcttttgtgctactgaaaatttatcttctttcacccttgttcctccttcctcgattcaatggacgatatacatattattttcttgtcaacttatatatacacatattcaacaaaaagttttggtagccataaattacttacttgaatctttttctctacatattacttaattatggaagataatttaatctctttttttccaaacaaggtatctttaattagttttggaaggtaatctttaatttaattttgaaaaatgtatattgatttggtcaaattatatatgatccactagtctatgattgattagttctatacaaaatttattgataaagttaatcaaaatctaagagattttagaaacttacagatttgtatttaacattttattcaatgatagaatatgataccctttccttaattaggctttgctatttaattgctgaaaagataaaagatataggtgccttaggagcacagtttccaaatgaaatccaaattaactaaccgaaccaaaaatctaaaccaaatttgaatcatacatttgaaccatagagttaggacaactgagctaaaattatgattaaaaccacaataaaatcaatttcttataaaacgaccccgaaatttaggattcaccattcacaacccagaaaccttataaaatatcaacatcaacaaatcttagtcaaattttctcactttggtagcttctcttactctctgtatacattgaaagtagcatatgtatatatactttcttttgaccatgagtgaagcttctcttagactagtttaccactaaagggcaaagacggcgaatcgtccccactgattatgctaggagccggagtatttctcctcgactgacgtttggtgggaacaataatggcttcatcctcaaacttcccgagcttgtcatcaatgtcataatcgtcttcatcgcctttgaaaaccggatgaacgtaagcattttgcaagtagcctttaaggttcaggtttggttctcttgcggtttctaatgtatctttcatcatagcttcctgtaacacgagtaaacaaatacaagaatgattcgtgtttggtatgattgtggaatctaaaatgttaaatggttgttagaagaaacgacaaacctgtaaagggtatctgatgaaagctggctcataacgacctttgcagaagtggtggaaaccaatggtaagcacaggcaaagcaatgagaaacggtgcagctaatgcagcgtgctttgttcccaatagacccatcagaagcaactgtgatattaccaatgctgctatgactcgtccatgaacgtctggccaaaacgctgcagcactctcgtattcttgattgtatacgttaatgatctgacagaaacaaaaatttgtttaagaaactgctttaaaacaaattcgaccctattaaggaaagaagaagaaacttacttggtggcgatatacaatgtaagcaagggcgaagaagaccaagataaaaggaagaagcatcggtgtcacaggagcgtagacaagaccgagaagaaagtagagctgtatccgaggctcacccgtgttaaaaccaatgcttcccgggtccattgcttcctctctgtctttatcagtcttaaccaagaaggcgtttttgagatggaacataatcaatggtttcagcattagaatctctcctgcaactcctgcccaaccatcaaccattatatacgtgatgaagaaagttgctttcatcggtatcgccacaccaatggttttggggatttggtttgcggattgattgaggaaagagttaagctgttcaaacgcagctccagcgataacgctagcaagaaagacgttcactaagttgaagatgtaatatcgaaacgctgctcgtctctctaaagatgagatcgatgtgaagccttcaaatttggacatgatcatcaaaatggatggcagaaaggcgaggaaaagcttcagtgcaatacccggaaggaaaccttgtatcaccgatttcatgaatttactgcattaaaccaaacaagtcagtccatcattagtaattttttcaggttatctgatgtcaagaagagagagagtaaagaagaaaaactcactcatctacaataaacttcaagaacggagcagctttcacaatcccttcaatggtagcaagagattgaacaaacgcgatggggacaatgaagaagaaggttaggaagaagaaggcaacatgcatgatcaacctccttactgtcagagaaacatatggaatagcaagatttgaccaaaacacatcacgcggttctggagcccattcggtcagccattgggttgggtttcgggtctgttgagtctgagcacaaaccgcagcagcccatcgtgttttaaaggagacaaacgctgctggcataatggccttaggatcattcaccacttcctctctttctttactgatctcttttgatattttgtcaatttcagcaatgtaatgttcaatggcatcgactttttgtccccatagcccaagaaagccaagctggttggtggaggaaagcatggaacgggtcagtttaacagaacacaaaaaaaaacaaagtttgagatttaaactgaagtaccttcaccataattctctgagagttattcctagcgtatttgagctggtagtaatcaagccaattctgcagctttttcttctttttcaccaaatcggccagcttgtttgcattgcatacaacctacatatcgtctcacaatgtttatgttgttcttacatctcaagaagagcataattttaaagaaaactaaacggtttcaaatttaaaacttctaaggaacttgcctgatgtgttaggtagtgatcaggatgattgaccaggaaaaaatgctctaccagttcacttacagattcatctgcgtccggaggtacattcctaacaaggacctatcacaaatcccgacgtattagatcgttggccacagctgttcagtctttaaagtttaaaccaaggggaagaaaggagtcttacagtgaactggtcaggtcgacgagcttctgatgcaacaaactggagcctcatgttagcaattgtctcatattctttcatcagcacataacaagtccagatggtaaaggcataagccattactatatgagtccaaaacctggcaaaacataaaatgtagctcaaatctttacctgctacaccatttgtgacagatggaaacataaaagactcaagatggtaaggtctaacacacctcattgaatactctggaatatttgaaacagagagtttgtcaatgtcgctcgaagttacattccttaactgcttagccatctccaatgtgttattagtccagttgactggcacaagaactgcccaagcaagcactgctattggagtaaagatcttaagcctgcgcatacaaagacaacaaaagagatatgtttatcaaaatcaataaggagacaacaaaaagtggccctgagctaaacttatgttgacccttcctacttccaaaaatagcaaataacatactgacccttttgtttttttgtcaattagattcaactaagactaaatcaaccaatacacacacaaacccataaaccaaataatctacaaagttcaaaactttaccccagccagtaaatccggagataaacaactgaatccaaaccagcatgatcaataagctcaggctcaggcatcttcagagcctctggcatccaattcaagaacttcatataagacctgaagtccaggttcacaaacctctgcgcaaaggcgccaccacgagcagggctgcttcttaaccccttgagataccattttgagaagtaaactctatcattgaaaggctgaagcctcaaaaccgcaaagattatgaagaaaacaaaggcactgagaatgtttatcccagctgatacaccaatatcctgaagtgtcgccatctattaactaacaattcaacctgttaatcacacaaagaagcaaccaaattttgttaaaaattgaagctttgtgatctttgaagtgattcaagttggaatctaagtgaaacccctgctaattatatacagaacatgaaaaaatccataaaggtgaaaactttaggaacaaaaccccacacaatctaaattccaaaaacaagttcgaatcttttacagagacataaaacaactcagaccataaaatgtgagctaaccccaaatttactccaccgaaataatgagattcagagaaagcaagttcagaattagagagaaaccctagagaagaggagtggaataagccagtgttttggatcacttccagattcatccaaagctaagaactttttgttttgtttttctctttaccctcttcagtgatttagtaacacacgcaacacacaaacgaaaaaaggtaaaatttgtaaaccaatgaaactttttaaggtttttgatataaaatttatcaatagaactatttgagataatgttgctatagaaactgacaagagaagcagttacggacgaagggttaagatttaagagagtaggcggtgaaggagatcaggagatcgtacagtcgcaaggaagaaaaagaagaacgaagacgagctgaggtttttatttttggttattattacgctcattggcttatcaaaagtatttatttaatatttatcatgtttttttaataattcgattttcgaatattttattcttagtgccgttggttcttttgtgaaatttgttcacctaaaacaaagaacattggtcggttgattatataattctataagaattaatttagtattttccgaatcttcctttgtttttagcttttaatcaattgtgatcttgacgcaaaaatcattttctttgtagtaagtgttttccttttatcgaattttcaaattaaataatggaccattgatgatcctttcttgagtatgtgtatgttgttgttcttcttccttgcgactgttaactatagtattttaataatgagaatttattgagtggtagctaggtattagtatcgtaacggttagttggaacatgaactttgtaacgggcagaaaatgttgtgacatttcagatcacgcacaaactaaagcttgtgtagtgcacgtacaaacttttgtagagattctagcgtaacgattggtgagacatgcccttatcgtggggacacaggttaataatgagtgcactcgcggagcgtgtgagtggtgcttcttaaagcaaataaacaatacttaaaatgagtaattattttgggctatactgtgtgaactttatgttaataatcatgcaagatgcggtgtttctttcatactccactaaatcagaatattaattgagtcatttatacaacgaaataaaaaggaagttgttgaattattgaactttggagattagattttcgcagcttctatatatacgttcaccttatgagtggccacgaccatattatacgttcatggattatttcgattccgaatctggagcccactaatatgctactaatgtaaagaccagtttgattcggtcactactcactatatatatatagaaaatgatatcaagagattcaagcattacaactaagcatatacaccacgagaaaatcaaggtttcgatgtttgttaaaataaattgatccataattcacgaatatttttcaagcttcaatctgaatttgtgttttttttaacgttaatccgaatttgttttgtgtggaaagttctcatgttttttcgatttttgtttttccggacgtggtaaatgtatggaaatgaggaaagatgttcaagaaactgtagaagcaataaaattatgggctgaactctacacaataaggcccttttcaaatagtcttcagctttatggaccaggctacacaaattcatcacatttgaagcaattggtccgatgagtttttttttcattcaatgaactttgtattgttttcgtagttgatttctatagtctcatttgcatttcctcgacaatgactttggcatgtgctcacttgatttgatgttgtgacttgtaaaatttatgtcacagtcataagttgtcatcagttgtgttgtgtatttatcgaaaagaaaacataaaactatggtttgagatagaattcatttggagctactaattaaactgaattggaagatatacattatacagagtatagaaaattcaatcgcatctttcgtttgtccttctcttatctttcagtgattttgatgcatcaacctacaaaaaatcgttaggatttacataattgaaaacttgtaacgttaatttaatcttttttgctacgtataactgtctgacttgattagctcaactactcatcaaaatttaagttttccatgtgatttataacaagtcttgttccaaagaagttaagatttcatgaaaatatatatacataaatagttaaaacttacaacagtaaccaacacactgaagttttttttctatataatgctcaattataaaatagatatacgttatttaaaataatccaatacaaggtcacgggatttcattccatggaataaagtctctctttcaatacattaaaaaagcaatactgattcttcctaataaccctcatttaccccacattgagttcatgtgtttttttttagttcacctatacaatacaaaagataagaaattatacgatatataaaatgtaaacgaatgaaactacatgaatgtgacaaagtaacataaaactacacgaatttatggtttccagtgtccggcgaattcatttattggtaagacgtaagagacaaattatatgattctaccattcaaattcaaatatcgttctaaactttgtataaaaacatatagaatgaaaaaccaagaaaaatctcgttctaaactttttttgtatcaaagatataatgaaaagatgaataaaatgggggaaaaaagttgatttaatatatcattgatgttctattctctgtcaagaacaagcgggcgtataagctattagccagattggatccacacatgatttcactttgagctttaagtagagtctcttttaaatgtgtattttactcattgattaacatgagaggaataatagttttcataagagtacaaaaaaataaagtatataacatgagaacaggccaaaaggtaacattatgctcgtggatttcatgagtggacaatactatcttttactctatgtagtctattattagtcgttttcacgaaactatcccacatttcttttgtccatctatatcctgtcgttttcctttttgctgctatatcattttttagaattctctcaaaatttacatttttttttgcaaaatacaaccttcacgtattcttttgtgtgttctaaattgtaactctgttttataaaacctcaatttgttttgtgtagttgaatttactagccaactaattaagccgagtgtttctaatcgtcaaatcatttttcagaaaaaagtcagccaacttactttctcaccaacaataagccaatttggttcttatatactcactcaatattcaactataatttacaaaatacttttactattatgaaaaaaactcatgcatagtgtcttcaatgtaagtatgtcctacaaaatgttttagagttggctggtcaataaatgatagattcagaattcgtaaagatgatgatatatagaaagagcttttacagtagcaagtacaaataattgataaccaaatgggtagaatttaactcgaagacgtggcagagaaggtgtactataaggaatttaagaacacaagtagaggattaacaaaagaagaaaaggctttggaaaaagcaaaacaaaactgatagcgaaagccaaatagcccaaaaagaacgcgagtcaaatgttgcctcccaaaatttactatttttttactctcatattaaaatcactctaaatatacatagaaaattgttctccaaaacattaaaatatgttgaaaaaataaaatgaaagcaaattccaaactcccaccgacaccaacacaaacacacaagtcagtaagtcagattcaattatcaaatatggtcaagaaattcaacaatctcatatcaatcacacaagataaagtataaaaagacttatataaatgattgaatcagtgatattaactactattaacaatcttgtcttatgagttaaatgaagtcttaaatacgttttaccaattaatgtgaatgaatctacggagaaacagaggtttttagtataataatcataaaataaacctgaattaaaatattatatactaaaaaatagtttctctctcttcataactcagagcaagcttggaatcaatctctcaatctctcactctctcactacctatccttttctttaatggcgatgtctctaactactactatccccaacacacactgttactcttcttcttcttctctgtcactgtctattctctcttttggacctttcatggctatgtttctctgcaatggaagtccaagctcgtgatcaccaacaccgacacgctaatggctattggagatagagctatgtttactgttttgcttctattcattgcttcgatctctggattctctgttgttcgttgtgttactgatccatctgatggtaaagtattcagctttatgagttttcttcttctctgcttttaacctcattgttttgattgatcatctatgtgatttgagagtgaagggtttttaaaagttgattactttagatttagaagatgaaacccttttgcattaatgtagatttgatgatttttgacaccgtctgttttcctgagaacccgccggaaaataatatttctgctttacttacttttttagctcaaaaaggaaagttgtaaactttatgaaagatttttcttctttcttgatagatcctttgatgtgtttttctgacttgtgagctgttttcttctttctggtattattgcagttcaagcccttcaagttttgtatacttcactaaatagtccttcacagctaaccaattggaaaaatggtggtggtgatccatgtggagagtcatggaaagggattacttgtgagggctctgcagttgtcactatgtaaagaatcagattttgagtattatttttgttctttccacttgcattgatttgtgattgtcttataatgttgttgttttctgttgttatgattgtaacagagatatatcggatttaggagtctctggcactcttggatacttgctctcagaccttaagtcactcagaaaattgtattgtttttggaattttccttctgtttttgtttgtttgatctttctgctctttggattttggttcaataactttggtctctttcgttttggttacagggatgttagtggtaacagcatccatgatacacttccatatcagttgccaccgaatctcacaagcctgtaatgctgtgtttgcttagctttgttgttatagtatttactctcagttttcaatttgaaactaacagtttaaagaaaatgtaatgcagaaatcttgcgagaaacaacctaagtggtaaccttccatactccatatccgccatgggttctctttcgtatatgtgagtttgcctttctagaaccatacactgtgagattagcatgtttagttttcttatgtattatagtttgaaatgttattgtgtaggaatgtaagtggtaattcacttacaatgtcaataggagatatctttgctgatcataagtcactggcaaccttgtaagatcgcttacctatcactttagcatagtcatatcacttccagtttccattgatctattgtttctttattcagggacctttctcataacaacttcagtggcgatcttcctagttccttaagcacagtgtccacactttccgttctgtaagtgctttcaaacaatctttagtggaacaatacttaagaagtgcgaaaggaaattccatgataatatctgattatcttcatttgtgacagttatgttcagaacaatcaattgacaggttccatcgatgttctctcggggttgcctttgaaaactttgtaagtttcattgcaagtagaaaaagaaacgaatgtatatattcctccatcacacttaccgtctatgttttcttggcagaaatgttgcaaacaatcatttcaatggatccatacctaaggagcttagttctattcagaccttaatgtaagttttcaataacaatctgttaatttcaatttaaactgtaagtttatgtctttgacattcctaaatgaaacagatatgatggtaattcctttgataacgtccctgcctctcctcagccagaaagacctggcaaaaaagagacaccttctggttctaagaaacccaaaattggttctgaagagaaatcttcagactctggcaagggtttgtctggtggagtagtcactggtatagtgttcggttctctatttgttgctggtattatagcacttgttctttacttgtgccttcacaagaaaaaacggaaagttagaggaagtacaagagcttcccaaagaagtcttccgcttagtggaacacctgaggtgcaggagcagagggtaaaaagtgtagcatccgttgcagacttgaagtcttcacctgcagaaaaagtaacggttgatcgcgttatgaagaacggctctataagtagaataagatctcctatcactgcttcacaatacactgtttcctctctgcaagttgcaacaaacagctttagtcaagaaaacatcattggtgaaggttctctaggccgtgtctatagagcagagttccccaatggaaaggtaactcaaaagttgacagctttctacactaagcaaagctaatattctttctttgaactaaatttttctgtgtaacataattctagataatggcgattaagaagattgataatgcagcactttcattacaagaagaagataatttcttagaagccgtttcaaatatgtcgcggttgaggcatccaaacattgttcccttggctggatactgcaccgagcatggtcaacgtcttctagtgtatgaatatgtaggaaatgggaatctagatgatacgcttcacacgaatgatgatagaagcatgaatctgacttggaatgcgcgtgttaaagtggctcttggaactgccaaggctttagagtatgtgcaaattgttatgattatttctagcctctttaatgaacaacattcatcttaaaccaaagttttctgattttgtttttctaggtacttgcacgaagtttgcttgccttcaattgtccatagaaacttcaaatcagcgaatatattgctagacgaagaacttaatcctcacctatcagacagtggtttagctgctttgacacctaacactgagagacaggtaataacaatggaaagaatcagatttaatctaattgaaacattttctgagtctttcatggtttatgcatgtcaacaggtttcaactcaagtggtaggttcatttggatacagcgctccagagtttgcactgtcgggaatttacacagtgaaaagtgatgtatacacttttggagtagtcatgcttgagctcttaactggtcggaagcctcttgacaggtttcttttcatatttttagtagccaatgttgagcaatagccaatgtgagcaaaagcctgatttgagtttccttatgtaaaatgtgctttgtgtatgtgtagctcgaggacgagagcagagcaatcactagtgagatgggcaacaccgcagcttcacgatatagatgctttgtctaaaatggttgatccttctcttaatggcatgtatccagctaagtcactgtctcgttttgcggacatcattgctctctgtattcaggtaaaataccatccaaactctggagaatgtcctaattgaacaaaaccgaaattgttttgtaaagtaaccatatctctctatctttctttgttaatttagccggaaccagagttcaggcctccaatgtcagaggtggtgcaacagctagtaagattagttcaaagggcaagtgttgtcaaacgaagatcaagtgatgacactggattttcatacaggacacctgaacacgagcacgtcgatatctcattctgagtaatgatccaaaactactccaaaatcgggtcttttctgtcattcgaagctaaaatgcagcttgaaaactcaaaaggaagagagagttttgctcaatgcataagagaatctgatccaaaggactacagagaagtaaagaagcatcttggttcataccaaaagtgtaagaaaatatatgtttgtgtatttttgtaagagtaaaattagagtacataaccatgtttcaatcatctttcttgtaccattttctcttcacctgttgaataatcaagtatgagacttgttgctgcatcaaaataacatttgaaattttgcctatttaagagctcttctttgttgttgaataatttcgtagaagccagtttgattctttaagaaaagtgaagcatgattaagaagaaagatagatctgatgttaatttttgttgagatgacccaagtcaaaagcgttgttcatgttcatctgttctcatcagccacaaaataacaacagaccataacaataaacaaacctaaagttaacttaaaccccacggaagtctatacaactgattctgccaacatagttttcttcatcatctctctgatctctcctctttttcacatttctctaagttttggaacgcaccatacagacatcacaaccatagacgacaaagaccgacaaagataaaccctaacttactaaaatctgcaccaaagagcttcccaagttatataacttatcatctcttgtggcttttatccccaagaactcgcgattacctttttctgcgcttcgtttccacctgatgatgaaaacatttcagccttgttaatatcggtgacaagactttgggcacaaaataggaaggaaaaaacgggttccttagagtgccagacatttcagaaggtaaggaacaaaagcttttaaaaatcaggttctctcccgtaacagtcacagagatttctaatctgatatctacagaatgcttaagtgtatggaagtagaagcattaaaaaaattgatctttgatgataaccttaacagacagattgttttgcagcaagacctggaggaatcttaagtaaagataagatccttacaggaccaataaccataaattgtatctttctggtcatccaccattcatcaagcaccattaagccagtgcataattttgttttagtaacttttcccagatctcaatgacacaggtgcacacagaggggcagagactaaagttataaataagtgatagaacatctatataggagatgactaaagagagacaaacggaccttaacatcatcagctggagatgaagtaaacccattctgcgattttttgacatcgtcatcagaactgcattcagcacatacaaagtgatcaagcttctttgcttcttcaatcgtcatgccaacacacgcaggatgatacctacaacagcgaattaatgcttattatcaataattcctggaaaagaatacgtaagtttaaaaacagacatatagtctcttttctgttgaaacacaagtaaggaagttaataaaaaagacaaatatcaacatttaccagtctttgcagccttcacactgcaccatgagatcgtctggattgtaaggcatttcacatttgcagtaccttcagaaccaacaacaacccacaacagataaaaaatcatggaaattccaggtaataagaaggcgtagttctgatctgattactatttatctacttacacagcaactcgatcaggggtaaatgcgccagtagcagccttgtactcgaatctacaataataatcctctgccccaacgttttcaagcctcgtgtagtttttgaaggtgtgaacaatgcattttccctcaatggtgtgtgcactttgaacatcaaaatggtcagacaagaaaagctctttggctccatgaaattgtctcctaccaccaagtgactcctcagggcggtaataccatcgacagtgcaccttcacattgttcctcgcatcagcttcaatcttctcaacacgggccacatatggtggtttaccagcatctgatgggcgcatcaacacacaatctcccgctgcagaaaataacctcaaagattagttcagagcttatcatgcacattagtaaagtgatataaatgcccaacactaaaattctaacatctaaaaaaggtataagctttaaatgaacaaaagtatgggttgcaaattttaaaaaacagtgttcaagcttttaaagatcactcccttcaacgaaaaatgcctagaccataactcttatgcacctattcaccagaaggaaaaacccagaattc

SEQ ID NO: 611 - DNA, 82891 bp, Arabidopsis thaliana
atctcccgctgcagaaaataacctcaaagattagttcagagcttatcatgcacattagtaaagtgatataaatgcccaacactaaaattctaacatctaaaaaaggtataagctttaaatgaacaaaagtatgggttgcaaattttaaaaaacagtgttcaagcttttaaagatcactcccttcaacgaaaaatgcctagaccataactcttatgcacctattcaccagaaggaaaaacccagaattctaggtatacgcagacacttaacatgtgaaagcacacattttgcgtcaacaagcataacaagctacaatgcagatgatagagatacaatgaattcatgtttcacatttaaccaaccagccaaacacaaacttcatttatagaaaccaaaaaagcaaggaaatttacactaaaaagcccaaatcaaaacaattcactgcaagaaatctcagttctaacaacaagagagctaccaaatatcacattttgtgccatttcatacactagaacaccctacggagcagtgacatacccttagcagctagctacacaacaccagaacaaaaagaccaaaaacaagagtgaatctaaaagacctaagcagacattgactccataaccaagctttcaagcaatcccttcctttataaaccattactcaacactcaaatgcccaaaatcatgcagagaaatgtctaaatttgacaagtgacgataacaaatgataatataagcactacctctcacaactttgttggtgcccttgatggtataagagtccagctccttccttcccgtcttaattttggaggcgacaccaggtcgagttttcgccatggaagctagggtttttcgaaaactggttaagccggaataaaaaaaaagctaggttttttgttcccggaatgtataaggattggggcttctaagaagatcaggatgtgtagatcgatgggtagagaaaaaaggagaagaaaaggaaaatcccagtggggaagaagcgaagagaggaagacgaagagtaaatctggaaccctagattctctccaggtgaagaagatgagtcatttgcaaatttgggagttttactgttcacaaagcccaattcatttttttgccctttgcttttattttatttctcttataacaattttggaaatattgttactttttcctgccacatttaccgtaaaatgggaaaaaaaagtggctcgaatttcaaatttttactgtcgttttgaactttgattgaatattttgagcaagtaaaagtaaaagtttataggtgaaacagtacaataattttcatggttattcaagttttttttttatttatgttatcatgtatttgagccatttactggcaagatcaatgtttatatttaaatctagaatggtagcacgcgtgtttaatctttcggctaatgaaaattactaattgtttgatacaataatcactagttttggtatttgatgaaactaatcaaaacattagtgaatgaaactaaattaatcatggatatacgtacgtccaaaatagccagtttggcacagcaataacatgaatatttaatcaaaagttcaatgatattttgatattaccaaactgtcatacactaattgtttagattgaactttaataaaacaaagaaaatcaaataattgttcatgtgaaatttgaagtaatgttagaactcaaacttttcactctcatataggtaacaagtatgaaagtaaacacattgaaacgaaacaagatagaaaccatatgatgtttttatttctcttgccacaacaataagccgattgaatattttcagtacaattccaagttgttgaaatctctctctagtacaaaaaaagagaaacgaaacttttctagaatttctgaatgactacagaacttgctagaccggcttgttcaatggtctgagaagggtcagtaagtggctttggtgggaaccccatgacctgaagggtatagttgtttggattccctggtcgagaaaactcaatgaaaccacgaatgtcgttaaccgtgtgatggttgttgaactttgctaccatgcgtgtcccatccgcgagtctaagctggatcgatgtggatggaagagtttcatctactacaaggctctgtaacggtgattgaaccgctgctacatcagttaggttactttggcttgaagctgttgatgagcttgcaccacctagagtccttccaactccttgaaatgaaaccttaagcttttctttctcctacaaaagaagaagaaacaaagatgttataagtgttggtaccatagtcataagatggatcaagcacaagttagtgtatcccaataggaacttacagggcacttctcatctcttctcataagattaacatgtacaggagctcttttatcaacaggctcaagctctttcggacattcagactttcgaatgctctgcaatacacgaaaatacaagacagttcaacacaatattcataagccaattcataagcattaaccaaaataaaattcacactcacatcaagaaaagaagcattctctggatcatccaacttcctcaaaggtccatcatctacagtgaatccattagaccagaaaataatattgtgaatcacaggctcaggctgttgaagagccgttggcacactttctccagaaagcaatcttcctgttcctgtaaagcttctagaactcgaaggatgctcaagaggtccttccacagctcctagctgtcttgcttgattaaatatctcatcaacatcatcgtgttttggttcttttgtaggatcttgaacaagcataccacttcacacataaaacacaaaacaaagatccaacaatttaccaaccatactaatcatcaaatagataattgatgattaataaattactcactaaactacacaaatctcaaaaagtaatgattttgattaaaacacttaattggcctaagaccattatagttgaatcatcaaaaactttagttaacacatcataattaagcagatcatagtaaaactagtgatttaagggttttttaagtacgaaccttttttcgccaccggtgaagtattcttgaggtccatcggagtcactatcggaatcaggttctgatcttcggttcagatcggaaagtgtacggataccaccagtacgaccacttgttggcttcgatagtttcttgtccttagacgacatatctccgatgcttttttcgctgctttgatcggaataaaaaggaaacggattaggaattaggaaatcgaacttatgaaataataatacgctaaacaaggcttttacgcgaaaaccaagcgcgtgtaatacactccttgttaattctaaagcgtgttctcttatgcgcgtgtgcttagccagaaacaaaactagcattaattattaaattttttttttttttttttttttttttttttttttttaattattaaattgttaatatgctttatgttatactgtaatcgtttgagattatcagaggatttttctttttcatgatgtttgagaaaatgtgatctgatggagaattatttccgaataatcttttagcgaatttaatagattaagaagagaaaattgatttttttttacggaattaatgaacaactttcgtatacgtgaaaaagttgcttttaatcgaaagtggaaccactttagtctaatcagtttttaaagttgaaagaatcaaaaccaaaacaacaaaacccatgttccactgtctctctctatatctctctctgcccaaatttacacttcatgggcaagtcggcaagacttcgccggagccagacctcatcgccggagaatgtcttgttgggtaaagatagctccgatgatccttacagatccgactcagagactgaatcaaactcgagctccgggaccgagtcgaacatgagctctgactctacaacttcggcaggagtgtcggcgatgatacgagtcttgtctgattctctgcttcgaacggaactcgcggagatggagatgatcaaggctcgtgaagcagcgaggttggaagctgagaagagaaggttggaaatggaagtcgacttgactcagatggtgcttcagactcatttgcaagcgatgtcgtcgttacccgtcggagaacataagatttatcaggcacagaggaagaggaagagatcagacgttgaagaactcgagtcctctacaaggtaaagtcaaaaccccctcaccggtatagaaaaacattggtttggattggtatttggtaacattgcagaactacaatgatataagttaccgaatgaaaacttgcataatgaaattttgtgttgattatatatatttgcataatggtggaacaactatatatgcactttttaacaatctaacgaataaaaattctttaatgaatgtagggaaaagagtatagctttgttgggattactccaacttaacctgattttttggaactcattgacctgaaaaatacaaaagccaaagtcagaaggcccaactgtatcatgttatttactctttcagtcttttgttcaacctctaatgaataattctacgaatacaagctgtgttgtgatttgttgaataaaagatgtctacgaatttcagtgagtaacttttatgaactttccagtaagacactcaaaagttatggttctcctaaatccattcactcattcagtgtatgatgcaaaagtttgagaaaaaaaaagaattgggtcaattatgtaaataaatgacaaaaatggtttgttacagttgttgataaatgggctatcaagattaggccaaaaaggctcatattaacgatgaaaaaacgaacaactaaaatcatataaaaccctagttgtattctatcgtttgatttacaaaacctttcggagatttctcctttctccccaatactgtattgccatggagaagaaccataaccctaatacatggtcggagcttcctctagatctcttgaacttagttttcaaacgcctcagcttagttaatttccaacgagctaaatccgtatgctccactcggtactctgtttcgagacaatgcgtgcccgaacgtcagatcgctttgctgattctcttccccaaagaagacaacaccgataacagtacttgtaagttgttcaatcccgacgaaaaagacaaactttacaagatgcaagatcttggtgtggaatttgcaaagagtgtttgtagggcaacttatggaagttggctcctgatgcaagattcaaagtatcatctatacattttgaatatattcactcgcaagaggatcaatcttcctcctgtggagtcacaacttggcatggtaaagattgaacgaaccatatatgattggtttcacttttcacacggtcactatagcttttcgctaagttcccctgtgttttggattgacgaggaatccaaagattatatagttatgtggggacttggagtttattgtgtggtttatgccaagaaaggagatacctcgtggaatcaaatcccccaaacttcatatttttatgacatggtttacaaggatcacaagctttacttcttaagcagtactggtactttccaaatcttagatttttctgaagagatggacaacaaaacttccaaggtggtatgcttgttagatagaaaacttgtagtcacggtaacaggaaaagccctcaaggttgcaaaaatgtggagacctacatatagaacatggtcctttcgggttttcaagatttcttcatcaggatatgaaaaacttgattctttgggtgatgaggcattgcttttggatctaggcatcactgtgctcgccagtgacgttgagggattcaaaagaaattccatctatttcagttgtagacctagtggtggttatgaaactaacgcaagtgatttatttcttttcaatctcgagacacagaagatggagctactgcacaaatttgattgttcgtcccttcaactctatagatctcgatggttcttaccaagtttgactcacacatgattgatcttagctttgttttcctcttcattatgttgtttctttttccttttcttcggttttactactcaatatgctgttttacactattaataatcatgacgtatgctagtttttaagataaacgtgagtatacacacaaaggataaaaatacaaatgggtactgaaaatgatatgtttaagtgagctttacttgtggaatctatctagtatttgatctatggaagggacatctttgaattatttcagaaagttgtttttttagcgaatttgatatagagaagattaaaaattagcacatgtttaatgagacatgttttttatagagttagagcaccattattggtagttgtttaggttgattcttagaaaattttgattataaattaaatgcttttaatcatataattgttaagagagtctcttatataacagacaaaatgagattttcttaactttcctttcaaaaactttaaaatcaattataaaaaaatcctaagaactaacgtaagactaacctacaatactatcaataatgatgcttttaaagaacttttgtgagaagaaaagaaaaatgtcgatgatcaccaaagttagtaccctctaccgagagtccgagacgttgcaattcttcattagacacttaaaagagatttcttttttttcgatgataataacctcagtattatttaggcatatatcactttcaacttgtaaaagcaagtttactttctttaaatttttcaagatgtattttttgtaacacagtctttttttgatgaatatagttttacattcataccagaaaataaataaaaaatatgccaattgatatgatactttcctacttacatagcaacacaaaaatcaacatagcatgtaaaggatcactacaagccgacaacaggtaccctacttgattacatgtagtaacatcacacaatttggaattgtctctcacgatccaatgcctcacgcattagtctaagcaaggcatttatattaaacccaaaggcccttttattcatcactatttagtttgctaaaataactacgaaaatccatgtgtatcttatcatatattcctacaaagacttagtaattcgtacactgggccgaagaagccgatatataacagcctaaatgacctcaatactcgttaccaaatataaactctaaacttaaagattttatcaaatataattcagatatttcccctgtttctccaatttgtcatggagaggaaacataaccctaattcctggtctgatcttcctcacgatctcttgaacttggtgttcgaacgcctcagctttgctaatttcaaccgagccaggtccgtgtgttcgtcttggtactctgcttcgagacaatcggtgcccaaaaatcagatccattggctgattctcttccctgaagacaacaacaacaagaacaacagttcatgcacgttgttcaatcccgatgaaaaagacaaactttacaaaacgcaacatcttgatgaggaatttgcaaagagtgtttgtagggcaacctatggaagttggttcctaatggtagatcctctgtttaatctctatattttgaatctctttacccgcgagagaatcaatctacatcccgtggagttactgtggaaagattacgagttaggcgtttcaagtcgcaaccgaatgaagtcgagaggtgggaacgtacgatctcctgtgttttggattgacgagataaccaaagattatgttgttctttggggacttagagattggtgtgtattttattccaagaaaggagatacctcctggaatcaaatcccccaaactccagattgttaccgtttgcgttacaaggatcacaagctttacttccaaggctacttctctagtttcaaaatcttcgatctttctggagagattccacaacaaacctttgactcgcttgtttttgtggaccattgtcactttcgtcgttgggtcctttattccacacttgtagtcacactcacaggaaaagtcctcaacgttgaaaaaatgatggactgctctttcacggttttcgaggtttgttcatcaggaagacggattcattctctgggagatgagtcaattcttttggaacaaggcatcactgtgctcgccaatgacactaatggattcattagaaattccatctatttcaataatgattgtgaaaacattgaaaagcacacttacgacatgtttatcttcaatcttgagacacagaagacggagccactacacacatttgatagttcttcatttcaattctctagagctcattggttcgtacctagtttcacgcttacatgatgttgatctcaactatgttttttttcttcaatatgtttttgttttttggtttcaatcaacatgttagtttactctagttaatgagcatcacgtgcaagtatttgcagacacgtgcaagtaccttgtgtttggtcatcgtttttatcggctaagtgattcgtgggttgttgatgagacaaaacttgtagtcacagtaacaggaaatatccttagggttcaaaggatgttaagaccttggtctggaatccagtcatttcgcgtctgcaaggttttccccaaatatgaagaagttaattctttgggagacgaggcaatgcttttggatctaggaatcactgtgtccgccaatgaagttgagggactacgtagaaattccatctatttcagtggtattcatggagagaagacaaatcagatcttaatctttaatatcgagagaaaaaatatggagttgctacaaaaacttgatggttcgtcagctcatcaactctctagagctcgatggttcttaccaagtttaacgcatacatgatgatttctactttcttcttcaaatatgttgtttttggctaatgagtaatggatttcaaattctctgtccattcttgaaccaaacttatttttcctcttttttactatttttacgcaaaaaccaattagaaatattatttggaattttaaactcacatgcctaagacaaaagacttggccgatgaagcccatataatcaaacttatgttgcaatgaaatcctaggtttaggttaaaataagacataacttcttaagcaacaaaacattcaatcatctggatctcgctttcaattttccatggaaaagtggcataaccctagttctcctaagcgtctcagaggagatacacccaattcctggtcggagcttcctctagatctcttgactgcagtgttcgaacgcctcagctatgcaaatttccaacgagctaaatccgtctgttcgtcttggcactccggatcgagacaatccgttcccatacagatcccttggctgattctcttcccggaatacgacaacaacaattcatgcacgttgttcaatcccgaggaaaaaggccaagtttacaaaatgaaagatcttggtgttgaattttcaaagagtgtttgtactgcaacctacggaagctggctccttatgcgagatccactgtataatctctatattttgaatctattcacccacgagagggtaaatctacctcctttcgagtcacaacttggcatggtaaagattgaacgaaccatatatgattggtttcactctacactccattacaacggtaaggagtaccacaaacgtattagaatactatccactgtgttttggatcgatgagaaaacaaaagattacgtagttatatggggacttggaagttcatgtgtggtttattccaagaaaggagataaatgttggaatcaaattccagaaacttcaaattgtcatcacatggtttacaaggatcacaagctttacttctctacgtctacctacaaatatgaattcagaatctttgatttctctagagagattcctcaacaaatctttcaaggctatgtcattatgcaaggacttacattaaatcgtcatcgtggtcaaccaggttatccctttgctactattgatacaaaacttgttgtcacagtaactggagatgtccttaaggttgacagaatagtggagaaagagactagaatctgcagatttttttacgtctacaaggtttattcatcggggtcctataagaaatatgaaaaagttgaatctttgggggacgaggcaattcttttggatctaggtatcactatgctcgccaatgacactgtgggactcctaggaaattccatttatttcagtggtactcatacaaagtcgaaggtcattaacgatacatttatcttcagtctcgagacacagaagatggatccagtgcacaagtttgattgttcatcagctcaactctctagtgctcgatggttcttaccaagttcacacaaacttgattgatttcaactttcttcttcatatgttatttttctgattttctctaatgaataatgatgacgtgtttggtgttttagttattataaattaacaaaatgataattgtaaagattgatgaaatttttttgtcaaaagaacgactggttaattgggccgatgaagcccatagaaacgacctgatttcttatgaaataaaacccaatgggtcacattacaaatgcaatcctaggttttaggttcagaccttgactcttgtaatataaatacgtaacttctgtgctacgacaaaacatttcaagtaagcataaccctaattctcaaaagcgtctcagacgagattcatcccattcctggtcggagcttcctctagatctcttggatttagtgttccaacgcctcaattttgctaatttccaacgagccaaatctgtgtgttcgtcttggtactctgcttcgagacaatgcgtgaccaaaactaagatcccttggctgattctattccccaaaagcgaaaaaaacaattcattcacgctcctcaatcccgaggaaaaacacaaacgttacaaaacgcaagatcttggtgtggaatttgcgaagtgtgtttgtatagcaacctatggaagttggctccttatgcaagattcaaagtgtaatctaaacattttgaatccattcacccgcgagaggatcaaccttcctcctgtggagtcacaacgtggcaaggtaaaggttagacgaatcatagatgatagatttcgcatttcacactatcacatcggaagcgagtccaaatatatgagtataggatcccctgtgttttggattgacgagaaaaccaaagattatatagttttttggggacttagagattggtgtgtggtttctgccaagaaagggtatacctcgtggaatcaaattcccaaaacttcaaattgtcgtgacatggtgtacaaggatcacaagctttacttcctaaccaagtctggtggtttaaaatcttagatttttctggtgagattccacaacaaatcttcaaatgtggtacgtttctgaagaaaagtcctcctagtccttctcctagttggaaacgacagaatgcgtttggtcgctgtcgtcgtctaccaagtgattattggttttttttcgatccaaaacttgtagtaacagtaagaggagatgtcctaagggtcattatgaaacagcataggtctgaatacatatggtccttcgacgtctacaacatttattcatcatcagggaacttgatgatatatgaaaaagttgattctttgggagacgaggcaatgcttttggatctaggcatcactgtgccctccagtgaaattgatggactcaatggaaattccaaatgtaggaagacaaatggtattttaatcttcgatctcgagacagagaagttggagaaactgcacaaatatgattgctcatccgtttgattctctagagcttgatggttcttagttcttaccaagtttcacgcagacatgtcaactatttgggttttcctctttcatatgtgtttttatctaactaatgatgatggtgacgttctttttttgtttgaagttttgtttagttcttaccaagttttatgcacaaaggtttaactacacgttaactagcaaatggggtacaaaatatatgcttaagtgagcttttgttgtggagtctaactgaaaataaagatatcacctgtgctattctcatgcctaccaatgaaatctattgaagaacatatcaatgcccatatccaaaaacactatcttgtctcccaaattaagaatcaatttgtttcaaatttcttaaagaacccatgaataaactttgtagacctagaaggaacagattctatagctaggtattaacactcgttcaaccgtgagaacatcttctgaattctgtttttgtgattacaagttttttcgctagaacgcgcaatgaattacttgttgaaaacgaaataggacctaactccaatattttcagaaggatacgatctttgaaactagcgaagtagcttaagaagtaaaagcttgtgatccttctaaacaatgtgaaaacaatctaagtagttacatattaataagcatcgagttcttaattacatgatatatataagcaaatacgatatactacctaaatccacacatcgtactaacaccaaaagcagcaattaaaaaaaaaaacgaaattaagaacaataaaaaggtaccctcgagattatataataagagggtctttcgataaaatgaacacttatacaagattactataatacaaaagaaaacaaaacaaataaagtcaatacactttcttaatgaagagattacgaaagccaaataaaccattaggattaggattattagcgttggcgttattattattattgttgtcactcccaatgttactattaccaccaccactactctcttcggttctgcagcttaaccggctccgataaccgatgcacataggcacgttcaagttcaagacttttgctttattgctctcaattactgttttacccttacgcgtctcgggaatctcccttttacccacaacccgacccatcggttccggtatcgttttcccaaccggagctcctcctccacgccggacttgccaaaccggactattccgaccaagatgcacgccgttacgactgggactactcggccacttcctcgatttggattctccggtggagttgctacgtgaacacggcgcactgcttactttccgggtcgtcggagctccaaacgacattctcggtcgggtcacgttgttaccagcggatctacttcttgaaaacggccaaatgttgatattcagctccgctcctgaacccgaacccgaacttggacccgacccggttttcttcttctccttcttattctctttcaccttctctttcttccccggcggtttggtttcgctcttcctgaaaatatctctccaccgcttcgaaaccgttgtttctcgggtcaactcggatcctaaaccgggttcaagatcacttttttgctctgtaatcaaactaccagtcgaaggagatggatccgggtcgcattctgcgatattcgggtcggactgaagctctgatttaacggagaggaggtcaagagggagaagaacaccgtcgtgaaaaagctcgtcggcggagaggagatctgaatcagcttgaggaaatgaagagttagttaaacgccagaactcgaactcaggtgggttagagtcgcagctgcttctccgtcgttgactaccgcatggagaaagagtctccggtagtggtttactacgtatgctcgtcggactatccattgttgacgacagagagagagagagagttttggaaggtcgaagaagaagaagaagataataaattaatgaattcgttagagagagaaaagatgatgagcaggtgcagtgtgaccatatatgcagagtttgtggtacataacacataaatgacgcataaattatgtaccctttttttttgtcatactaatttttttttttttttcgattgcttgtttggttatttataattggaaaattaagggatgttgtttatgattgtgaaaatcaaaatatcttagacgtgtatataatacgtaacgtggaaatatatgtactaatgtttctaatctcttggctacttaactttttgatacacaatatcttatatttcctactgtaaaatcattacacatttgtttttttttttttgtcacaacaaaatttatttttatacttcagccaaaaattaaaaagaagacatagtgtagattttatttgatgttaaatttaccattaatgatatatattctcaacaccgtagaagctttatgtctcctcactatctatataccacccaactcattaactctcctcaccaaacttgaatttttagcaaataaatatatgaatcgtttctacatttcaagggacaagctaaccaaattataggtcttaagacgtaaattgccaaatcctaatcaaataccaactccatgataagactcttctagcaaaattatgctaataataggttatttgaaaatttataggtaagattctttttttctttttgtcaaccctaggtaagattcatttgttacatttttacaacatactccttagtagtgttttttttttgtcaagttaatcattcgtattgttttcgcttctcttacacagtttatttaaacaattacatataggtgggaggcataaaaatgagatgaagaatataaattccactcaaccttattcctggacccctcggaacttgataatttttcgatttcttggtgaatgtttcccgagaaaatagcgaaagtaagttaaactttatggtttacaagaataaaatctctaaatcgaagttgaccctttttcatgtttaaaatcttctgcaattatcattaccctctgaacccaaaagtcatttccattttacattttcctcttattttgtcttctaaaacacacaaaattatttacgttttattcaaatatgatgtcattgtgatgttggtgatatcaactttcaaaacttcaaaagtttaattatttatccatcatgtgatttttcaatcattactttaatttgactataataattagacgaacgaaccacattcctcgaccgcatttcatggaaaataagaatagcacatacttagggattttacttcataactaatgaaaaatgaatacttagagttttgtttaattgtagatacaaccaccaagccaccgacgtacacgcatgctatacatattcgatattcctagtcctatacttatgtacaagcctttgttttgttagtatcaagtttcactcgtttgtgccaaataaaaacgacaaaatcaatgtattgactttttgatgattaatttacgaaatagtcaaattgtttcataaagtggtggttttattaggaaaaattaatcacaataggttggcggaacatagaaaatgagtgatcaacaatgagaaaatctataaatacagtacactttattatttaattctatttaatatctccaccatttttaaaattgagtgtctaacgaatgaatcttatcattaatgtttgatatttttctctacattcacgaataatttcattcttttgttctgctatgtttttttgtcttgccaaattccttaccaagttatgttatgtttacgacaccaatacacttaatagacaaatgttggctgtcaaaacaaaaaaaaaacaaaaaacaaatgtagtcccaaagtacattattattagcgataaaagacagccagaaggggtaaacgggccaagaatgaggcccattaaacagaaggaaacaaatagttaaaagaatgaaacgtgattttaataggacctacacgtattaaacgctttttatcgtattgtttagctttttctgctgtagcattacgggttcaccaccagtgactggctgtgattttaactagttcaagaaatttttaaaaatactaagaaaaaatatgtaagctagcagaaatataaaaaagatctcataaatctatttttttctatataaatgatcatcaaatgggaaaaaattaatacaaaaatagcaaaaagatttgttggttggtttgtgtttggaaacagacatagataatgtaaggccatgtgatggatagcattatctcacactcatttaatgtcgtagggtcgtgattgtgaaatgtcgtaaataacccaaccctttctctctgcacgcaacttcgacgttacatagatttggtattttaggttttcacatttccccatccgtacaccccatgttacgacttacaaatttttaattagctttcaatgacacaatttttaataatacaaatcattctaaactgattttaaaatagtaatattgaaacaatagttttatatatgttggttaacgaagttttaggctcgagttccttttagccaacgcattttctgatactcaaaagttgtttatatttggatagttgataaatgctacacgaactaaaatttggtaatggacgacgacagtccataattgttaacggagtttctttgtaggtccttagacagcatacatatggttctttgcgtatttttctcgtcaacgaattatatttttcaaactaatcacaaatctaaggatatagtttgaatgttattttggttctatgttcttgtccattttttatatgattatctccacaatactttattattagttacattcatatttcttacatcatactaattcagaaagaatcaactccacaaaaactagaaatgtgaggtagggtttggagtgtgtctaaacttcaagtggtacaaaaaaaagtcgcatcattttatggattcattgacaaagaaatatcatagaactactattcacgtgaaggtcacgtggatcattctcttcaactcgacgactattccataataccaaagaataaagtttttcccttgcaaacaaaacaacgtgtacaacctcaaaaattatgttccaaaataaaatacgaaaaaaactcaataattcagctaaattcgaaccgtagcatagcatgtgatactgatactacgacagtcacgtcacattttcatatatgtagaaactatatacctagttgaaaagtttgtacagtagattaggtttctaataaatttgaactcattttggattttattattttagtaaatttaaatttattatttggaacgtttcttacccaaatatgtgttacatctcactttgatggacgcatataaatattacaatttgtttttcatttttttgtcacgctctctcttatctcaaacttcatttcgttataatttttcaacttctaaattatcttgtttacgacaaagtagagtttgtcattatctctaatcacttcaatactgtcaatctcagctccatcttcattcgtcaccatcgtctcacttccatcaaacccaaacttctctcctgtttttagcacatgcacaccaaaacccggttagctcaataaaccaaaaccaatttgaaccggtttaacaccatataacctaaaccgtaatttggtgtttaaactctagtcacttgtgtaatttgtatctttacctgcaattttcttgaggtcatcaagtgaaggaggaagaagaataagcttcccagcttcattgcaacttctttctctcctctccaatggatgtcctctgtaaatactcactcttcctcgttcttcttcttcttcttcttccacaactcttaacttctccaatggtgtgaattcattatgtgtattcacacaaactacatctgcaccgttcgtcgccaggagattcaccatgtccatctgatcctccgccatagcgacctgtaaagctgtgacgccatggtgatcctctgtgtcgacgttaagcccctgttttaaaagagccttcatgacttctacattgttctgtttcgctgcttcacatagaagatctccagctatgtgtggatccgatatggctgcgaaatgataaaggattctgaatatctcgtaatgcttcgatattattgcttcccatagagcactattaccattcacatctgcaagattatgataaaatcttgttcttaaaacatatcagtagaacataaaacataacggttcttaagtatgatgtgtttacctcttatgtggatgttgcaaccgtgctttaagagtactaaaacacaatcttcatatcctctagaagctgctacatgctgaaacatgaatataagacgacgaattaacggctgtgatgatgattatgagtaagggttttaaatggcttatggtgaaagcaaaacgttaccaatggagtttttcctttggaatctgtaatgtcagggcttaacttagccttaagtagctcatcaagaagagctgcattgcctgtagtcaccacagcgatgagatttgaggcaatgttaggaggaacaacatcggtgttttcgccattttgttgtgcctttagatcaccaatgtctaaattactcagctttttgtgatgctgcaagaagttcttgagcattgtggcattgtcttgttgtttaatctgcattgtctcaataaggaaagatgttttgagtcggagaagctgtgataaagacttagtttgaaaagtgtagctttgtggtctgcaacaaagtgctccaacttctccaaatatgtctccacaacgtagagtgcctaaaacagactctctctccatctctgaatcaatgatctcaacttctcctgacacaattatgtaaacatcatccggcgcttcgttctgcataatgacatcctctcttggtggtatatactcagccttcatttttgaaacctaatcaccaaaacctctgtttagaaaacttatccagcaagccaaaactcaaccaatcatgtcagaaaattaactcaccagaagaagaagtatttctcttgagacgcctttgaagaggtaaactttttcaacagatggaagaaaaagatgttgacaaatgcttttgtagatagattttgggagctggtcaataagatgttgctgatttaagctctctgctttaaaccttaaacacatgtaagctaatatctggtcttttaatctaggaggcaatctgtttctgttaacaaagtttgacgctgcttcaatgctattcctctgcaccaccacaacaacaacataagatcttccttgagcaaactatacaaacagaaaagacttaatcttgtatagagcgtgagactcacaaattccatggtacgacgagtcccttccacgaccaaattagtcatgttaccaataaggtaagcagtgaggccaagattgaataacatgtagactgttatgaataccatttcaatagtgttgcttgcatgaagatctccatatcccactgtggtcattgtagtgatagaccaatatatagctgcaatgtatctgatggaaagacttgtctctgtgaaattagggatcgcatcagtccatgtctttccttggtgtggatatctgtctgctattaggtaataactgcatccagcacagtgcactagaaacaatgtcacctgtaaaacactcaaacctcatcatgtactgcaactacaaaatctaaagaaatgtgatcttgttccttcacttataagttatttactcactgatagaagtcgaaagcagcgaatccagaaatagctatatcttatgtccttctcgagcctaaaacaacaccaaaaatagaatcattttgttaccttcttgatcagagacatgacatagagtcatagggaattagtgtacctagtgaagaggtgtttaactcttcgaagtcgccaaaatctaagtaatcccaagagattacaagtgatatttaacgtggatgtgccagtgattaagtatccaatagcgtcaaatggtatagttgatgcaacatccatcaagaaccatgttgataggtacctttaatgagatattaaaatagcattaagcaagaactaacacatttatttaaaaagctttcttttcacctaatatatataagtagaatctttctgtttattccaaaaacagaaatctatctaactgattatgaaaataaaagaatcacatggtgtgggctcaacagtcacctaaaccttgtcttcttccacttagctaaagatatcagatcaaataaaaaaggtgaaactaagatcatgaataacaatcactgacctcactgcaatctgtttaggttcacggacaagaagctgtgttctttcgtctatgtaagcaacgaaaaacgtcaagacaatgtcaaccgcgaagaacaagtctacgatgttgtccgcgatacaaaggtttctctttggtgatgaattcagaaatgcaacttcaaaagggtaaacccacgcagagtatgccactaaaagcaccatataaaattcccagcacctgaatcaaccatttaacttctttacgttatcactaattcaagcattcttttatgtcactgagatataaagaatgtatttttcaggtactctgtttcatcaatatggatggtacctgtatcttgagtccataggtgagatgatccatccactagacctgatgtgattctggttatagctagcaacaccaagtggaggaagaataagttttgacagattgttcaagctgagagaagaagcatcatactcttcttctcttccttttcctcgatgctgatgaaaacgcctgagcttcatgtctgaggataagttgcaatgagatgctgaatacttgaggtccattatatttctcctgaacaaagaaaatttagcactaagaacaagaaagagagagggagaaagaggttttagtagatgatataataattgtaatgaagaaggagtttgtggtttgtatgatgcaaaccgtacgtggtagtggtggtcctatttgttaagattgaagtgaaattgggtaagcttttgtggggaacacaagttttaattttggagggatccaacacaatcaataaggcaaaaaaaagttgattgattttatgttttggtgataaggtaatgaagtgtgaaagatgtggccccaaacgatagagaattatgccaaacgtggtataattagaagccttgagggtcccaatatatctctccattaacaaatttaaactctattgagaatctaatcagaaggagattaattaagaggaggacattctaatgcttcgagaaaacgttgtgtgcacttattaacatttgactagcgggaatgtgaagcagaagaaaatgagagataaaggaattagattctaaaccgggaccacttttaggtgaaaagaaagctgatatatatatttccttgtgtgtgtagtcatcgtcggtatagtattcatctagattgatcatatattcttgaaatacctttagaaacaatcaaatggttaggttttaagaagaaaaaaaaagacagggtaaagagggatgacattgtaattgaccgacctgtttgtcctctgttataggagaaatcgtctttaagatcccactaagtatcacacttgctacatttgtctaaacaatttgttttaagtaataagagcaacatctattggtgagaaattaaaaacgattgattcttcaataattaacacgggatcgtggattatatttttggagttaagtgattctcaaaatcattacactagagactaagaatttggaagtcaattcgagtatatttaaaacctgataatagatttgacgaatcaccctacaagcaggcaaattgatgtctccgacgatcggaaacagagcacaggagaggacacgtggaagactgacgttcagtggcgggtttctatttttttcaaaagcgcgcgaagaagataagaaagggacaaaggcagaccaagtatgaaccaagaaagtttgcaattcgaccctttaatttctgaatatatttaattcacccttaattctcttaaaaagatttcaaaagaccttttcaaatctaggacttgccattttaaacggaaaattgtcatttaatagtctaattttcgattgacaaaaaaagaaagaaaaaaaacaaacaaacagttattaagctttaacagattttctaacatttttaacgattctcttagtcaaaccaaaacgatgtcatttaagctctaatcgattaaaaattagatctaatgcaggtctcgttacgtatattatacaaaaaaaaaaattagtgttatcgttgacatatgtgatagtgagtattttcaatattttagactcaatgtgtgtctcgttacgtatactatataataaaattcgattttattgatgctaatgacagatgtgattttcaatattggagaatcattttattgtaaatatgttgactgaaagttatttgatctatttactcatctacatatacatttttgcagcacttttatgaaataaatcctcaagttgagatttatttaccatccaatgccattagcatttaatattttaacaaatttcttctcaaatccaaatataaatcaattttgttactaaaatttagaattaaaataaatatatcacaacaatcatttaaatctttccaaatctaaaatgtactacacactaatattcttttttaaagagatctattagcattaatggtatattattattgatatattttaactttataaaacattattaatatttatccttataaaaagatattaaaatattatgagacgagttatatagtgggacgggtttgcattgatataacgcgggttaaatctttatttattattctatcatcactaattttttttttacaatattaatataaaattatataattttaatactaaaaatttaaaaccttaaaatttaagattattatatatataaataaaatatttgctccgtggtataccacgggttaaatcctagttccaatataaaattgcatagtgatgttttctttaaaaataaatacaaataacataaataaataaaataaaataaagttacatgtttgagcctctcattttcccttcagtgctataaattcagactccttcgctaaataaatcacaaagcggaaaaaagaaagaagaattgagagatatctagtgttttaaaaaaaaaagaactgagaaatcagcaatggggagcttaagagtgagcacatttgctgttgcagtagttgtatgtctctccatcctcctcatgtctcctacaggtacgtaaatttagttaaaagaagatttagaataaatacatgttaatgaaatgttgcatctttctatatatggactggacacaagtagatgggcgtagagtgtgtgacagcgcagcgggtttatgtagtatgttgttctcttgcaatacacaatgcaattcattgggccgcaattttactggaggcgaatgctcagatgctcgttttcctggtttaagtgtctgttattgctgccataatgtagagagcagtgctgaaatggaaagcatgtgattgcagatgctagaaaacgacgtcgctttgtgtgtgtgagtgtgtgtgttttgctatttgcatgtttatgctttcatttcatcacatcatatgttttgagtgttttgccttgtactctgttgtgcttctgtttgttttgcgttgtcaagtctccaataaagttggagtgtttccgttgacaaacgtttttgttagttcttgttgtatttagctaaccaatgtttttagatttttttttctctttttctttgtgttaaacactaatgtacatgtttttgttttcataaagtttgatgcatattagttaaaaaggggttacttgtttgaacatacaacaaaagttaaaaaggttactagtaagctaactaaagtcttacaaatgtccactctagaaacaaaacccacaaattcacaaaagacggttagaagcccaactagtagagaccaaaaaggtagtaagccccacaggagtaataagccctgtcaagatgaagggagtgacgaggaaacagatagctaagggtcacttgttcatcgaagattttaatcgtggttgaatcaggttgacccaatgatctggtgatttagaagatagtccaacttaacgctcgaatcaggtttaaaaatattggtttatgtagtattttcttgaatcccatatagtatttttacttttggtaaataaatgtattattgaaatatttaacatgagggtctcgttacatatattatataataaaaatattttattgatgctatcgacatgtgatggtgagtatattacattattttagatcaaatgcaggtctcgttacatatattatataataaaaatattttattgatgctatcgacatacagttagtgagtatatttcaatactatagaccaaataataggtaggtgagtggatgcctggattagtggaaatattttaacaattattattctcttacgcgtggaaagttttaaattactaaaaaaggtaaacttggataatcattttattgtaaagatattgacaatttgacataaagtattttgatctatgtacccattccaatatataaaattgcatagtggttttttcttacaaaaaaaaaagagtaacatctagatgccctttcccttggagtgctataaattcagactccttccctaaataaatcacaaagcgagaaagaaagacgaactgatcagcaatgggaagcttaagggtgagcacagttgttattgcagtagtggcttgtctctccatcctcctcatatctcctacaggtacttaaacaaccaaaatctttgatatcccaagatctaaactaaaacaaatttaatgaaaagaagatctagaataaatacaagttaatgaaatgttgccatctttctatggattggacagaagtagatgggcgtttagtgtgtgacactccagcgggtacatgtacctcgagctctacttgcaatgaccaatgcaatacatggggcggcaattatagtggaggcgaatgtgcagattcaagctttcctggtttaagtatatgttattgctgccattatgtagggagcagtgctgaaatggaaagcatgtgattgcagatgatagaaaacgacgccgctttgtgtgcgtatgtgtgtgttttttgctaatcgcatgtttatgctttcatttcacatcctatgttttgagtgtttgcctttgtactttgttgttgtgcttctgtttgttttgcgttgtcaagtatcaaataaagttggagtgtgtttttaacaaatgatttttttattattcttgttgtatttagctaatttattttatttaagagtgttttatttttatcaataataataatcataattgcggtttgttgtgcgaatacctatctctgttttttgagttttgaatttgtttagattttaagagttatgtgattttagtttctttcactaatagcagtaaatgctgcctggtctcttattttttgaatatgtataaaacattttttcttgaaaaaaaatacaaaatctgttttcaatattgtaaaaattcagtttagatattaaagttatatttatttatgctatggaaatatgatgagcttatttagcaattttcaaccatatacacaaattaataaccaactgtaaactaatgtttcatggttctagtattctagaacatataataataggtgagctggtggagatttttagtaatcattactttctaacacgattaatgttaatttttaaaataaatttgttaattattataaagatatttgacatcaagttacatgatctcttttgcttaaaaaaatatatagtgatgtaaggagagcatcaaatgaatagataaacaaataacatctagatatgcaaaatatggagtagtggatagtaaatgtaaaataaaataaagtaaattacgtcttcgagctatttctctccttcccttcgagtgctataaattaagacttttttgctagttcaatcactcacaaaaaaaaaagaaacaacaaaagaagaactgagagataagtcatggggagcttaaagttgagcacagttgttgttactgcactagtcgtttgtctctccatcctcctcatatctcctacaggtacgtaaaaaaataccaaaaatctttgatcaaagagctaaaatgaatacatgtttatgaaaacgtttgtctctttgtatggattggacagaagcagtggaggggaaactgaaagaagaatgtgagaatgtcccatatggtttctgtccgttttggttattcaatccgagatccgaggaactttgcaaggagaaatgtaagaggtttaagtcagaaacatccgaatattatggtggtttttgcacgcctaatggtccacctgggggagtgtctctcacggcgacttgcaactgctgcgttcgggaaaaagtcagccctcctgaaatagaagcagtggaggggaaactggaagtatgtgacaatttgcaaatcggtatgtgtctgtggtatttatggccttggtatgattccactaaaagatgcgaagagacctgtcaaaaacaaaataacagcccatcgggagcaagataccgttattatggtggtttttgcacgcctattgttagaggaactggattctttatccatggggcttgcaactgctgcattcgggatataaaaaagcaggcatcatcctgattcctgaaatagaaagcatgtgatttcaaaaacacacactttgtgtgcgtgtttgttagtctgttatgtgtgagtgtgcattgctggtgacatccgacatctatatttgagtgttttgcttctgtatgtactcgtttttcctcattgatcaagtttcaaataaagttggattttctcccataatattagagtgtattgcttctattttgtgtaccaaccaactaccaagttatttattaaccgtgcaagtttttctatctacaattaatgaactaattagtgttatcttgcgcatacgtaaaaaatgaaagttttgagggttttaagtggttttcggattatagatttgagttttcgatttttggtttttggtttctcaaaaagttcataaatgtgggtttttagatttttgttaaagaatttggtaaaactctcaaaatttagatttcctattcttttcttcctttctaaaaactaataagaacatcaaacaccaagtgggtgtcaaattcaactctttgaaatagcaacgacctcaaaagagtatttattccacactagtcatttacttaatcgaaacagagagcaagttataatgtgaaaacaccaaaactgaaaattgtagacttgtctttaaaaatgatacatctctagggatgttgtggtgggtaaaaaaacctaacccagcccaaacccataaaaaaaccgcccataaaaattccaatttaaaaaaactcgaatgggttttagtacttgtgggtaaaacccagaaaaacccatataatccagaactacccgtgggtacccaaatgttatacaaatatattttaaattgtatttattttctgtattctatattgtatatatttggtgggaaaatgttgaatcacgtttttggcggaaaaatgttgaatcgcgttttttgggggaaaatgtcgaatcgcgtttttggcgggaaaatgtcgaatcgcatttttggcgggaaaattgttgaatgtcgttttggcgggaaaatgttaaattgcgttttggcgagaaactgttgaatcgcgttttttggtgggaaaatgttggatttcgtttttggcggaagaatgtgaaaaaaattgacgagaaaatattgattcactcgaaaaaagaccaaaaaaaacctgttggtacccataactcaatgagataaacccatatgggctttatttatttggatacccagcccattttaagcctatgtttttttcccacaaaaagtttatgtgggttttgggtacccaatgggttttaacccattattaacatctctatacatcttccaaaaaagaaagagaaaccattccaacacaatagaacattagacaactagagggcaaaagcaaatcattcttggatatttttgtcaacagagtttcattacaaaccataggttgtatgtatcctcttctacttctcccctgttttcaccgtcatatacacgttatggtttactcattggttaaaagaaaatcaagcctgtgtggtttatccggctgttgcataaccgtttgttttcacacacttctccttgtagtctttcacagctgccttgatggcgtcctccgccaacatactgaaatggagcttgactggtgggagagaaagaaatgggaaccttctatacattcattcttcccaaatatgttggaacaattgtttaagttaataagagaaacagccattggtaagcaattttacttcgtaaaaataaatcacatggtagacttgaagcatccctaagtcagattgacgtctccgaagatatgaaacagagcactggagtgggacacgtggaagattgacgctttagtggcgggtttctatttttcaaaagcgccaagaagataaaaaggaacagagaacagaccgaaccaggaaaactttgctatctaaaccttttatttttagatatttttaattttgaccctgattcttatagaagacattttcatcaccctttattgatcttggagttagtatgtcacatggaactaaaagtaataattaatgttttttttaatataaagaactcaatgtaaaattatacatatgaactttgaataaaatatattgttgtgaatttatattatttagaattcttttttggtgaattccccagaaaaaatcttcggattttgttaataagaatctaaaaataaattaattacggacttgtcgcggaaaagtagttccttcaacatcatccctcataatcgtctcaacgcaaagcgaaatagaagaaaaagcatgaaaacctaactatacagttaggttctcaatacacgtgagaaattctatgtgtgacatgccggtacgtcttgttacataatcttattatatgtactgtagttatggacatatagcgagcatatttcacgttaaaacttaaaaagtattgtagacgagatggataatgtttgatttgtgtctagaaaatataattataggcgaggtggatcacatcgtggagactcttaattagatattaataatgtagaagtagtgaagagaaaatgtgtttggttgagacgtataaattgaaagccttttgctgataaaatcacaaagagagatcagcaatgaggagcttgaggttgagaacagttgttgttgctacaatagtcgtttgtctatcggtcctcctatctcccaccggtacgtaaaatcaagatctctaactacatagatacacaagtttttgttataaatgtatgtggctgttcgtgtcgacagaagtggatggaagctgtgacttcccattaggtgcttgtactcctttccgtgattgcaaggagagttgcatcaagttcaaaacgagggctggacagactttttttgatggcaagtgccgtccaagggataggccgagcgtgtggacggcttgtttctgctgctattatgatagtatcggtgctcaataagaaaacatgtgattccgaaaccatataatcgacatcgctttgttctactctgctttgcttttgtttgttgtactctgcttaatccaataacagagataacgtttcgaataaaggttggatgttttgtgacaattcaggaacagagagatgataagtcaagctacacccacatagttccatgcagagaaaattataatgtcaaaattgaaaattgaaaatttgtctgtcaaagttgtaatttataaacctcccaaagaagagagaaaacattacatcacatcggtgcataaaacagcaaaaactacagggccgaagcaaaatcattcttacacgtttctgtgaacagagtttattctaaaatactccttaagtcttgaacattacaacataccataggttgtatgtatcatcctcttctacttctcccctgttttcaccatcatatacacattatggtatacacactagtaaaaggaatcaagcctgtgtggtttctcctgctgctgcagcaccatttgtcttcacacgcttctccttgtagtctttcacagctgccttgatagcgtcctccgccaacatactgcagtggagcttgactggtgggagagaaagatgctttgcgatttcgctggcaaaataaatcacagaaagagaagcacacattcagagtaagtcttcagatattgagaaactccatgacagaaatcacaatgtttactttgtctaagaaaaagaagtcaagaggtctgcatcattataggctggaaaaccttaaataccatacaaaccaaaccagtaaccaatctcagaccaattgaccaaaatccagtaactaagttcatctaaacaaaataatcacattacttcgtctcaggtatgtcaacattcaatgagtgcagcaattagataacacgagtgttcatatttatgttaaaaatctgcaaaacatgaataggaacacagggcatactaaccagcaaccaatattgtaccaacagacaaagtccagtgaccaagttcctcaaaacaaaataacagtcatgaaacacagtaactggtatatcaacatttaatgagtttaaccaattagacaacactgattggcataacacaacaactcacaacagattatgttaatatctgcataaaatgaatagaaacagacggtacttacgtgtttttgatggtcagaacatcctccatagctttgcctttcacccattcagtggctgaaaaaaacgtaaaaatgaatcatacattagataacagcaacaaatccccagagagaagatagctcccacatagaagctaagccagaaactgacgacatcgcatcaaaaagatgaaatctttctcaataacattaggagactaggagtattacaaattcagcattgaatcaccaataaaaacgtctcaactgaccaaatcatgcactaatttgtcattaacgacaccaatcccaaatttgaacaccgaatctctacacgaacccatcaatttaaaacctaatttctccatttgagaaagactaatcaaaatccctaattgaaatcatttaatttctctaattcaatcctcaatcgaacaaaacacgaaattagaatataaacataccaacagatgaagaagcgatggctgaaccacaaccaaaagtcttaaagcgagcatcaacgatttgaccagtcttctcatcgaccttgatttgaagcttcatcacatcaccacaagcgggagctcctacgagtcccgtaccaacgttgggatcattcttatcgaaagacccaacgttgcggggattatcgtagtggtcgatgacgttctcatggtaggttcggaggataccaacagaccacggtgttgattgacgtgacgtaagccctagggccttcttcgcagcttgcttgagcatcatcgtgttttttttagggtttcggaagtaacttttgctccgctgattttggtaatgagaaatgagatcggacttttcctttaagggttgtgagaagaagtcggtttggtttcagacagagagataagcgaggggacacgtggacggtttagatggttctgagatatttgctatttcttttttcttttctttttttcctttgattttttcttttagtattagctaacttgagacgctaacctaaactttagattgagattttgataagttgactttttcttttcaattatatttttgatatccttcaaatgttatagtttataagacctatcgctcataaatcgtacttttcaagtttacaattgaatcggaacatacttcttttacgcaaacaatagtcatgatgatttagtatgtgtatagaaagttctcaaatttcaagtgatgaaacagtctatttaaaattaaccttaattcattaacgtatagttaatcataacaattaaacctataagttataggctataacaacattataggcgaatgtcttcgtctagataagttgtgaggagccatctacgactgtgcattgtcctatggtaaacatatatttggttaatggttgatcttgatcatttgaaaagtcgttttgcaacattaacaaatatatttgtctgttatttttagacggcaccaccggaacggattggaagcaagatcaagtaatagatctgagatttggaaagcttctcgtgaagcgagttagatagcaaattaagttgaggattgagaaatatggattttaaaatatattaatatgtattttttaaagtagtacatatagattcgtaaatataaagttattttaagacacgagttcattatgcatctataccgtgaaacatgtggtaccgagaaacaaacaaaaatttaagtttcattatgcatgcaattggtttcagatataatatttttttttggacaaaggtttcagatatactaataaaaagcaaaaacaaacaaacaaatatgattgaaggaaaaatgaatcaatgatgatgatgagcgcttggtctccgttgatttagcatctaccactttctttggcattgttgattagtatctaaaagttgactaatttaatgaagaaatcaaacgaaagattctaaatatctatctttatctacacaatacaatagtattgatcatctacaataagagtcgggggtgtattcagttaactatttaaaatgatttgtcttaaaatcatatatcttacgtcattttaatcccaacgacttgtccagtgctagctataaattaaaaactcgccttttgcctaaatgaatcaatcacaaagagagagagggaaacaaaatagaaagaaagaagctaagaactaataagcaattaatggggagcttaaggttgagcacagtcgctattgcagtagtcgtttgtctctccattctcctcatatctcctacaggtacgtaaaaaaaaccaaagtctttgatcccaagatctaaaataaaacatgtttataaaatgtagtatcttcctattgattggacagaagtagatgggaggcaagtgtgtgactacgataaaggtgaatgtaatagttatgagaagagctctacttgtattgaaccatgcaagcaattggacagcaagtttattggaggccgatgcatacctgttggtggtattactggtatggggttatgtgtttgctgccgtgatgtacagcgtggtgctgaaaaggaaagcatgtgatttgcaaatgatacaaaacgacgtcactttgtgtctgtgttttgcgatttgcatgttaatgatttcagctcaaaatctatatttgagtgtttgccttctacagatctgtttgttttgaattgtcaagtcttaaataaagttggattgttttccgattatgacctgacctattcatcatatttttttattttttttatttttgtctaattgaaatctaaatcggaggggaaaaaatcaacaaaaagaattttatacgagtacattaattcttgcaaatgttaaattatccgtcttatgatttatacaaataagaattgaattaagggagaaactgataaatacttgttcctaacaaagtttaatagatgtgttgagaaaacacacttgtccgtcggtatagacacttattcaccaatttagaacaatatgtagatgtagttagctagtttattaactatagtttttctatttagctaattgattttatttagcatttaccactttttttggcattgttgattactatctaaaagttgactaaacaaaatacgtgtttaacgtttttttagctgtcataatatagtaatatacaattcgagttggtataataaatatctgatcgcatctaaaaggaaatagtgaatggaacgacttacaaagaagtataataatccaactatttttaaaatatctcctccatgcatccagatctgagatttgaaaatcttctcgggaaccggatcggagtgaaattagttatacaatttacaactatatataaattttaagaatttgatttaagaaaacatatgtcaatgaagtcgtaacagctagtcacacgacagtaaaacgaacaacctaaacgacgaccagttacagcaatagtaaaacgaacaatatatagtaaaatctgatcgaagtcgctaaccgtatattacgggtcgcagttgctagcgtgcgagtttacatatagaatacaataaaattgcatgtttggttaagctctctcccaactaactattgctaaaaaagaaagaagctaagaagaactaagagatcagcaagtaatggggagcttaaagctgagcacatttgcaatagtcgtttgtctctccatcctcctcatatctcctataggtacgtaaaaaagaccaaaatattttgatccaaagatctaaaataaatacatgtttatgaaatattgtctctttgtatggatcatacagaagtgaatggatggggaaagtgtgacttacgaaagggtttatgtagactcgcggacacgatctctacttgcgatgtaccatgcagggcagtggacagcaagtatcatggaggcgaatgcttaaatgttggtggtggtcaagggatatgttggtgctgccgtgattatgatgctgcaaagagcggtgctgaaaaggaaagcatgtgattgcagatgatagaaaacgacgtcacttaatttgtgtgtctgtgtgttttgctatttgcatgtttatgatttcatctcacatccatgtttgagtgtttgccttctactttgggggtatcaaaataaagctttggcttttgcaataaaactagctgtctaaattgtgtcgttgttttgtttctttgttccttcactttaaactttttcagttttttttttataaaaaaaaattcaaacacaaatacgtaatgatgtagacatgtattgtgttacgtttgtgttcgttataatttttgtaatttttaggtgtcatatactgataaaatgccaaaagtagtctgatatatatggactatagttgctttttttagtggttgtcatcttagtcttagatccataaatttatttaaattattatacgaagaaggtcggatgatgaaagttactattattatgatagtgttttagataatacgaatacaataatagtaatcaatgtatatcttgtttgaccgtgaaaagttttagacccaagaaatggaccctgtttgttaggtggtggcagaaatacttaattcctttccaaaaataaaacacgattatttttcttttatacgtttgcataaaattacaaaattacaaaagagaactagtccttgttgttatatgctgtaattctaatggaccattcttatttttattttgtacttaacatgataaaatttataaaaatactgtaaaacattaatgagtgaagaagattcgggagatacactttgcatggctgcacatgatatgtcttaaaacaagtgacttttaagacaaaccacaattattttctcttttttcagtagtttggcagattacaaatttattgcgaatttatcatctaaaagactaaaatatagtaatagaaaataaaaaaaatcatctgcaaacctaaacaaaagaatgtatttttgacaacaaactatattattactaacggtagttagagcggacaaatacgtcagcgatttagtccgctctatttttaaaatgggcaataaaccgttacgaactaattatatttgtatgtaaaaacagtccgtagttaatctgcagtggttttttttttcttttttaaattcgcacctatacaaatatgaatgataaataaaaaacagttcaaaccgcaaacgaatttgtccgccttaaccgttgcaaccattcaaatcctatatagcaaatatgtgctacaatgataaagagagacatagaagaaaaagaaagtaataaaactcagtttacagattattcttcattgttatcattattattgtctcctccactttcagttttggctctgattcatgctctccgcatcaaaccctccaccaaactgtacataacaaaacacagtttcaaactttcagttatatgagaaatttggtcaatttaggtttcttatgttcttgtctgaattgagtttttcctttacctgatggtctctaaataaattacagaaagaacaaacacattcaaaatagggcttcagatattgagaaactctatggcatatgctagaaacctcgagtactatactaacaagtatcccataccatactaatagaaccatttccagtgactgagtccctcaaaaaaaaaatgataggcatcaagcacagagtgaaccaattagacaacaaaatgacagtcatcatctcgattcttatcgaaagacccgacgttgccgggataattctcatgtaactcttgcatcggtacatagtttactttctaaatcaaacagaagagaatgaaattctaaaacacttgaattttgtgaaaatctgagacacatttcataggccatagacgagatgttctgtagtagttaaaaacattatattccttatcatcgagttaataacaacgattaagaagtaaacctacaaccacactatatatttgtctcacttaacacaacgacaagagagagacatatattttgaccaagttcaaggattcaagagagggcttccttctttgataagcacaaagacacttccaccgtctcctctagagatccgaatgtctttgtctagataagtcgtgagtagccaagactgcgcattgtccgccggcaaagagaatttcaacggtggttggcttgatatggttctagccacagacgaggctgtgtcttgcaccgaggtaagtaaccctctgatcgggttaagatcaatcttttgaccaagaacctctacatattccggtatctcaatagaatccgttagctgaggcgtcccaattacgccttgctcaaacttaatctgcaagaaaaatgaaatccaaaacattactgaaaacgtttcaagatgttgatatcagatcatggtcgatgaatggtcaatttacctggacgcgtttagggcttcggatttcgaatttagcgttggtgctaatcgagtttgtacctaaaggaccagcgaaacgaacagagttctggacggtgaagttatctgaatcaatggtttgagagatctcatcgacttttattaacggtacgattcctcgtgatagcaacgggaacaaattcacgaacgatgtgtagctgcaaaagaggtttaaccaaatcaaaagcagcacgagatctaccatttgaatccagaatcctacgaatgatgctatctacaggactacaagagaaagttttcaccggaaaaaaacttacgcgaggatccatttgccgttgagaaggaaaagagcttccgtcggagctggagtagggttcttagactcgagctgtgtgattagatctccgatttcagctctggtttcgctcgatgcgcttaaacctcgatctgttccgtacaacgaatccacgagcgatctctttagccgctccgtctcttccacgtcttcaattgcttcctccgccgccaatagagctgatcctatctctcccgtatctgtggctcggactttgaaaactctacggggggaaacagcgattcctccggtggagatcatcgggcggtgaataattgaggtcaccggtaccagaaacggaggcttggagatagatttagagttcggtgagattgaaactctggtttggcagctaaattgggtggacaattgtaccgtcgccatttttttttgtttcttcgactaaaatttcgaagctagtgaacaagaatagacctgtactgattttatagacattgttacgtaaatgttttgctttcatcaactaccaaactcacaccaagagggataatatcgactattccacatagatcatgtacattcgactacgatactgccacgtgagagacaagatcaacggccaagaatccactcgacggtgtgaggcgagcattgtttaggctagataaaatccaaaataacggtttactgggcttgaatagactaaatgggcctcgtgaacaaaaaacctcttgtattcttttttgcatttacatcatcttcttcaataaccaaaagaaacgtacaaagtacacaaaccgtagttaaaactttggaaacgtatctagggatcacctcacttactcacgtggatcgagaacttttagccgtccgatcgttttcagaaaatatcgagtatctcaatgatcggacggttacaaagaggacacgatccacggttcagccacaattctctagagcacactctgcaaaaagtatgaccacatggaataaacgcagcgcctttctttcttcccatacacacgcaacacaccgaatcattacccgttaacgtcccaatagacgccgttaatatctccgtttctttcccgtcgtcatcaacgattttctccgccgtctcttccaacaatctcatcaacgaaactctcctcggcgtcatatctgcctccgcctccgtcgattctccacggttatacctctccgcttctaacgctgtcgcgagattcatacccgtacccgatccatgatccgattcgagaacgagtccggtttcaatttgtaactcttcgatttcgtcgtctcttgaggttggactgtgaagagtggtgttgttagttagacggagattccaggttggaccacagcatccgatgcatttgaatctcaaccgttcttttaacgtccgtttccttctggtgagatcgtgaccgctcatctgtcgtcggagcaaatcaagaaacgtcgtcgtcgtgcggtgtgtttccgtcatcctctgactcgttccgagatcgagttcactcatcatcgactcggtaacggaaactctaaacaaattctcagatagtgaaacagaatcaccagtgaaatagacagattagctccgccatgagagagccctgtgagggagagagagaaactgtttagatctttgggtctcgcagtgatgatgacattataaaggaagttttcagagttttttttttctcttcacatttctttattttttttgttaaagttgcttccgaatattgatttcccgcgaattaaaattactttatacagttttactaatttttaacagttataacgattctgtttgactggtattccacacaaaattacagtagtagtggaatcgagtatatttgtaaaatatttttccaacttgagtatataactttcaatttttaaaaaccaatttttaataagttacttacatcattgtttaaaacttaaaaggttaatcaacttataattatgtgtaatttaccgagaaatgatgtacagtgtacgcaatgggggcaactataatgttagttcttctgaatttctgatagaaagagaaaaaataaatttacttaagaggaaaaatttaatgctgtttctgtaactgtacgacttagttttaaaattaaataaaaaagtcttcaaggtctcgaatagaaacaaaatcgaattagtacttaagtttatactccctccgtttcataatataagttgttttataccaaattttttgttttataatataagttgttttcaagtttctatgcaaattatatattattttaatactttatgattatttatattctacagttttttttataattggttgaacattttaaaaataaatattcttaatatacgtatttttagttaaaacaacttatattgtgaaacgaagggaatattaccaacaaaaaaggtcctccatcggagttcaaaccctattaaagattaaacaaatcatcaatcgaataaaggtactattaatgtaacgctaactctgaaataaaagcgacgatcaaagtattcgaatttgattactgctaattatactagactgatgaattctcttacctgtgctataaccggaacatggttttttggtaaaacctttctggcgggaaaacatttttgttattaaacccgcggaaaatcattttaaaaagtgaaaggcaaagaagagacaaaaaaaaaaaaaaaaaaagaagaaaaattaaagaaggcgcatgaatcaaggcttttcccacgtgaaatgttcgcatagacgacgtcgtctttgcgccacactctccccaacaaaaccaataaaaataaaagtgtgggatatagagattctaaacgctaataccaatatgctttttgagagaatgatacattcaatgattttgtacttttaaacattttttttactcctgtgaaataagaattgaagaaaccgacaatgcaaccacaaaggctagtagtatggataaaatggtctacaacgacttaagctcatcaaagtacatttacatcattagggtatttgattctctcacacactagcacaacgatgggaatttcacattattcctttattcccaagtatatgggattatatctattgttcatgagctgatacaaataatcttttttagtttactttctaatttattaacttgtaatggatttcttgaggcagtctacaataccttcgcaatgagcctcctcaggaacaacacaccctgattcttcttcagtatcatcatcttctaaaatggagtgtggagaacgcagactgcctagagtctgacaagctctcattgtcttgcagtgttctgcttcatcatctcttatgttcacaaacacatcgtatagattttctgcccaaccgtaatcacaaaacaacaaaaacgttatatagattcttattttaacatcaaagtaagtcacaaactgtgaataatgcttcctccatacaaacataagacagaatctcagtcatttatagagcgcagaatcataaccatggataaatcataaacttttttttagcattttgtggttcgacggaatcagagatggaaagaactaaacggatatgaaatagatttgctacctattactggtcttcgagtattgggagttcttgatgtttggaactcatctgcagacaatacagggccagtttaaaagactactaatcataggtaaaaacatctctacaactctggaggatattgataattcctggaaagacaaactcaccaaataagtacaagtcacctcccgtatagtattttactgcgatatccggtgcaggcatattcttcaactcctctgtttagggaaaccaaaaaaaaatgaagcacaacaattcagaatgtaaagatcgttgaagaattttgtgtaatatttcaaagcaataactccattaacaactttagttctaatgtaaatggtacacagaatggtggagaaagaagaaaaaaccattggtaaccaacctccactggccttgagaaatttatcataagtctcatatgcatgactctccacacattccgaaaagtgatctgcataggtgacacaaggttaacgaagtcatgtagaccagaagcaatttattcagctactttctagaagttacgcggaaaggaaacttacatgccattctagggcttaagatatacaagaacactgtcatgaagtagtagaaggttgctatgtgctgagccagaaaacgatcaaaccaccaagaatttccacccaattcctgtgattagaaacatttgttttactattactaactatgtgagtaaagagtatgaaacttgtagagaagtaacattttggttcttacttccattatgagcaagtgatgcatttcattccagctctcagcaaagtgtactttcaaataatctgctctcctccaccaaccaaaggtctcatacatatgtagcacagacataaacgctgcaaggagcatatagaagaaacaaacattatgttctagcctcggaacaacttttcatttggtatccagatccataattagtgataaacacactaaaaaaaacaagattcgattctcaacaaatccaatatctcgatgactgaatcgccttttgttgttaagagttgaactatgcttctaatgagataagaaagagtacatattcctcaaacacaactatttcgtcattgttcttcttctgcacacatctcaagtgatgttcacaatcttactgtcttctgaagaatacaaaacctaatgactagctcttaatgctctgctcaatgtttcttgcaaatattataacgaactgaaactacaattacaaatagatgcacttaccaaaataaggcactctagcaattgtctcaagaacaaagaaccttgcatatgttcggtcacgatacaaagtgtcaagtatcttaataaccgagtcctgcggagaaaacgaaaacaagacaacaatcagaagacatgaaataacttccggtaaaataacacaaccaaaaaatctatatttctagtaagacataacgtttcaggtaaataaaagagttataaaaccttactgtaaggaaaacattcactccttgctcaagcttgatgatccatgtctcaaaagcactagttgaagaagaactcatatttggctcctcaagtggttctgtaccagtagaagtctcggctttaaacgattcctccaccaccactttctcttcatcgtcttgcaaaatcgttgcttggactcgatgattgttcctgaagttttcaaaaaagttccaattttcagcaaactagaaatggacgaaacaaaagtacagcaaaattcaaatccttttcataatcacgtgtgaacaaatcaattaaatattagctgtagctaggcacaccttaatagcagacgacgagaagagagaggaagatgatgaagcaatcggtgagaggagctgtacgaaacggcggctctagagcgtcgaagagtaaccaaaggccgtgaaatcgtcaacgtaccagaggagatgcctgaaatcgccgccatctccgtcaggaaccaaagatttgagcagataatttcacaggaaagaaaagtaaaagttggatatttttggtagaaatggagaaattttgcgggttttagaagaagaatgacgaatcccaatgtgagcggattctccactacttctcatccccatcgacgtcgacgcgtccaacaaatcacggccggagaaatttcctaccaaaattaggatccgattaagtcaaatgatccgacccgggttaacttattgggcttagaataatagcttatgtgctaaaaggccctgaacatggcgccatcttgtatgaaatagttcgaaattaaaactatcaactgattttctagcccgtgaaaattgctaacatttctgacttggaaactgattgatatataatcccgtgaattcaatgacgtgtatagtttcaaaaaaaaaaatgattaagaatgtgaaaaaaaaaatatgacaattaattagcgaattcaactcaatttgattatttgtttaaattgacttatttaaaaaaaaaactcaaaaatagtaataaaattttggaaccatactgtatcatctgtcttttctgttgatctggttttttaaatatttttagggttacaaatttagctggaagctcaaagtcatacagagacaaattcctaaaacattaaacacctaataaatcagtcattactcattaaatcattgtattttcttaaaccattttgagtttttgaccatgacactctactgcatcctttttaatcattattttagatattaaacagaaactgaaaaaaaaaaactttacacctaccaaaaaagatgcaaccacataatatctgaaaactaataaaataacaaattatataaagtcctatgttaatacgtgtgtgtttttaaattaaacatataaaattacgcaaaactttagtatttaaacaagattacaggtttagcttacaaaaccaatcaacgcgacattacttttgcctttttccctcttttgaatctctcaaaattctcctaattcccaaaattacccctctcatggcgacgaacggatcgtcggagcatcttctcccggagacgacaagaccaagcgcgatcatcaacaaacaacaaccggagtttcctgcatcacgattcacgttcatgtccctcgtgctctggttcgaccagtcaaatttcggtacggctctgctttcgtggtccgttttcttccttctcgtcgtcatcgttcctttgatctctcacttcttgctcgtttgctccgactgcgatttccatcaccgacgtccgtacgacgttattgtgcagctttcgttatcgattttcgcaggaatctcgttcgttagcttatcgatttggtcgagaaaatttgggatgcgacggtttttgttccttgataagctttgggatgttagcgacaaagttagaatcgaatacgaagctgaaattcaggtcagcgtctctattaattacaaattgattatcaaaaaatttcttgatttgaggttaaagagatattgcaaacgtaaaattcaaaaaaaaaaaaaaaacagaaactttaccaaaccatttatgtgacaaagacgacaaactgacaaaatattagttaattaatttctgagtctcgttttttattccagaatttagtaaacccaataataatcatttactaattttattttcaaaagttttggtctatattaattactccttactaatttcagttgataaataaattattttttaaaaaggacttgaaactatcaacattagcaatctttgttattatttctttaaaaaaaggcttgaagttattgaaataatcaataagtatctgaaaaaacgtcactcaacagttaccaattttttatttctgaccgacaattttttttgttttagatagtgaaattttcttcttttaacattcatttgtttgttaattaaacaatttaaatccaataataaaatacttttaaataggcttgaaatttttgaaatattcagtaagtatttaaaaataatcagtcaacagttaacaattttttaatttctggccgacattttctgttgtgatttttttttttaattaaacaaaagaaaaaatccgacctgccggaatcgaaccagcgacctaaagattatctgtcaaagactacagtcttccgctctaccaactgagctaaggtcggatgttgtttacttctgctagaagttaactataattactaaaactgttttgctctgttttcttgattgatacagagatcactaaaacggctaatgatcttcgtcctcccatcactaacactcgaagcaacctacagaatctggtggtacatctctggcttcaaccagattccttacatcatcaatcctattcttagccacgtcgtcgcttgcactctccagctctcttcttggctttaccgtaactccttattcatcattgtctgcattctctacaaaatcacatgtcatctacaaactcttcgtcttgatgacttcgctcgttgcttcgcttctgagatcactgacgttagatcagctctcggcgagcatcaaaagattcgtcgtaatttgaggattgttagtcatcgattcaggagatttattcttttgtctttgattcttgttactgctactcagttcatggctttgcttactactacgagagctagtgttgctgttaatatctatgaagttggcgaactcgcggtaagagttcttaccggttctgttttgttttgctctgtttattcggattgaactcatcactaaatgttttttgttttggtctatacagttatgttcgttgagtttggttacaggagtattcatatgtttgagaagtgcaacgaagataactcacaaagctcaatctgtaaccagccttgcagctaaatggaacgtttgcgcaacagttgactcgtttgatcatcttgatggcgaaactcctactggttccattattgaatctcaagtttccctacgcggcaatgcgatagagacgtctgatgatgaagaaggagaaggagacgatgatctcgataataccaagatacatcccatctatgccaatacaatttcttaccaaaaacgtcaagctctaggtaaaataacatttccatggctaatttgatatagaccacaaaaatcgatatttatggatttgttgttcttttttcgcagtgacgtatctagagaacaacaaagctgggatcactgtgtatggattccttgtagatagatcatggttgaatacgattttcgggattgagctcgctcttctactatggttgctcaataaaacaatcggtatattggcttaaaaccggtttctcttgtttccaaaaggaacttcttttggctattttttaacctttgtattgtttgtctttggttgtgtgacagtgaatataccatgaacaaacacttggttctttgtaatatatgaattgttttggcatgatgtttctctccaagatatgatgaagaacagtagaggagatttttcacggtggtgatgatatatgtctctctccacttacttgtttagttacaaatgttgagatacaacaactatttttggttaatatatagatataaagatgtacgatatgaaatatgtaatgtttattagtgtagaattaatacaaaccaaagtatatttagagtatagtgaatttacttggtaatctaacaaaacttgagcttgatattgcaattggacgatctaggaaccattagcagatctttggtgatacgagacttttccttgtcgtttattgcagaagcacgaactttgacaagctcaagacatggcagtttctttaagaaatgttccatttgctctagctcttcatattttcctccatactcagttatctccaatactttcacaggacatgacaatccatattctcgttcatatctatcagcggacaatggaccctgaaacaagagggacgattagaaattttagattgtccaataaacttcaggagtttcagttataccttgatgacgagagtctctagttttggagacttttctagaagtattggcagaagattccaaatgtagtagtgtcttgaattacttttaatagataaacgaaacaacttgctcaacactgggattgcttcacggaaatcatataatatctgcaacaaaaattaactagtcaatatacatagtcatcaaacaatttgcaatatttggatccaaaaacctcaagacagggttcctaaaattcgtctccaagctcttcgattatcttacagagaaagaaaaagaggggagatcaatctttacctgactagtataaccagatgataactccaagacctcaacatttcttaaccccttaatcagatttgttggattgctatcagaacatagatcaagagcgagcttagcttcgacaagggattcaagattcacaaacggaaagtgtcttggaactagatcagagtattctaagtaggcaagactcggtgtatcgatagtgatgccccaatattcatagtgaaaagaagacgtaatagtaagtttcttaagggtcgaagaggagacggtgcgacaaaattctatatgttgccagcacccaccaataatggttaattcctcaagcacagggcaagcagaaagaagccttcccaaagggcaacaatccctgttacagaaccaaatggaactaagaaagagagtcttaagcgatggaagagaaacataatcaggaaccatggcataaaatcctcttgcgagtttcagctcaaccaatgtcttgcaagtgaagatctcaagaggcacgaaaccgatgtcgtcttcggaaattatgtcaatatcaagatatgagacaccatgttccagcacgtcaaccatccagcgggtgacatgaccggtgtcgatactcatacgacattttattgagattctccttatggggaaattacctgtcacaaccaatactctgtccacaaaatcgatgaaactgtctcctccacccacttcttgatcatctaaacagagatttggtctgaaggcaaacaaataacgccatcgcattgagaggacagatgtagaggtggcctctttgaacgaaaggagagatagaatgtggcaaataatatcatctgatagaccgttgatcctatccatcctttgccaaatcctaataaacctttcaggcgtgatcaatctgaataagagatctccagcatcaacaacaccaaagaagataatcacacactgcaaacaaaacaaaacaaaacaaaacaaaacaaaaaagccactgtgagataagtaaacatgagtaaaactgaaaagatactgccatcagaaaaagaatgaaacttggacaaaccaaccagctgaaatcaatgcagaatctaagataaagtacactcctttacaaagaaaggatggatcctagctcagaaccataattctcaattcattacagtaaaaaaaaaaagagtgaaatttggacaaacacatcagctaacatcaatggaagcagatgcagaatctaaaataatgtgttgagctttactaaaaaaccaaagaattctctcccaaacccataattgataattcaattcactactatcaaaacatgtgagcctataagggggatgagatcaaccaatacttgataattcaatgcaaacaccaaccatatcagtcatacggtgagcataaaactgaccagaggggacgagactcgagagtggagggagacagagaagcgtgcatccgccttcgtagagagagtttggggttttgtgttttcacttttcacattaaatgggtaagttttgggctgtcttttattttccacttttgggctttaagatttaagtttccactatggaaaccaatcaaaggcttctacatgggctttgttgtttactagcacaacattgcacctttaacttcagacttatcatgcactgatgtgagatatttaagccgttaacgttgacaatagttgctggatttcttcccacaatacatgtctcatcagtcatcacatccttttccattactgtggaagaaaatccaatgataccagtcaaaataaacgcctacatcaacagtctaatacttcccattctactgaagtactcagggtttaaagattgatagtgtatacataaaccagtctatatactattaaagatagtatctaatttgggtaaaataatgatccaaggtttggatagtgactctaatagaaggttctttttagattttggctaagatacttggtgcaacccgaataacagtttaagatgcgtgttgaatatagcatacccttctttgagacgcatgacacggtcatcggctgagaggttgtgtattaagatacaaataaattagaaaaacacacacttctttttaagatattttttggaaatggaaactcaaaagtcaaatgtgtattttactacaaaatttcaaaagttgcagaatttgaagactttttaccaaaagctcttcccaaaactcatacaatatgcgtttttttaccaaggtttttcattatgatgaatcactagcaacaacaggctctctctctatccttaaaaaagaggttcaagaatcccctttttgagttctaatctcattcctcctcaatccaagattaaactggtcacttttactcttaaaaccagatggagtcagtttgtttccagtgctctattcctcctcctgctcatatatctgcatgtatgcttccgatagttctaccatctggggaagtgtctctgcaacatgaagatcctgcatctcgtacctgcaatggacattatcccccaaatgaatttatgtctttcttatgcacagatctagatcatgcatttgtgaacatgaaacacaataatagttaatgattgagaaagcttaccatagttcttgtgacttgcgctgcacaaagactctgaagtatccgtcctcaggcttaccatcatgtacaatgttagcgattagattatactttgaacacacattctcgccttctggtgctctaggcaatgatggtatgtaatccctcagctccatgtccttcactgggaagttaactgtggcataggaaaaaattggcattagggatccttatacaacatgaacgtcacaaaaattccaaatagactcacccaaggtagggttcttctctttgaagaagttattcttcttgaaccgaaccatatggaacatcaagtaacgaggagatttgattacacggtatctcattctggccagcttaggccgaaccacctctgtcacagtttctccatcaaacttcttcaataaatcaaatagagcaacctgacccaaacatcaaagaaattagtttctgctaacctcactttgcaaactaaacactctaagacgcatatacgaggtagcaagccataaaggctacaggagctccaaacaaccaaggactcagagaattctacactttcccaagtcataaactagattcgaaaaagacagtttactccaggacagtaaatttgcaatggcactatttaagaatccctttattgtatctcaaccaaatgtgacattattatattgagaattataagttttctagcacttcacgttatcttattgatcaaaatgttccccttactgaaatgcatttttcaaatggcacagagtagcaagacgttcaagatttgaaatagccatatacctgcggaataatgtttttctccatgacatctttgaaaagaggaggcggtggcaaatctagaccgagcatcagaaaagacatcctggagatttctttgttttcattgccttgaaactctttcacaacctccaactcaccctataatggttagaaggttacatgaagatgcagctttttgtaagcaattatatcaaactgcatttaggttgacatgtcaaaggactgacacatacctggaagcacttgtggatgatactgctggcgtcctttgaagttctaagatccatgtgcaaagtgttgaggagccacgacataaactctactggatctgattgttggccaatcctaaaccgtttcttgctggctttcatgacagcttgcaagaattcatgtggactcacctgttgatgcaaggtgacttaaattagcgaggtcctcaacaggtgagggcataacaaaaactaaaagtgagaggcataaattgagtcagacttgtcctttaaagtttcgagcatgccaaatcttgcgagttagttccccaaaacggtgaacaagaggagacttgcagtgctgataattttcaggaatgaggaagaaattccttagaggagtaactctcatcaacgactggattgtaacattcacaaactctgtcttttgtatgttgttcaaccccacctacatatttacaagcttaacctttaggagacattaatttcaagatcaagtgtaatcaaagagaaaggattaccattcctggaagatagtcggagccatcaagagccctagaccactgcctattcttgtcaagctcgtttacttgtgctctactaaacctgtaaatggataacaccgaagccttcataaaaaggaactgtaaaatcaaagaaaatttgacaagacatgaaagaagagtaatatgttcaagctatcaagaataaaaatataaatagatggtagatgatacagagaactagcaagaagaaactgattgagataatagtcaaagcaattttgttgttgttaactacgtgcaaaggctcacatgttcacaaatcaatacacaaaatgcagtaagaactatgaagtagtagtcacaagatctaatataccttgggtttaaaacatggcgaatgtcatccaaagaagggtcattgatctcgtaactatcaggaagacaataaaccttctctgtcagaagattgatgtaaacgtggtgtcctgcttccaagctatgtgtataagcatgagacttctggcttcttccttggaagtacttcccacaaacaagacacgcatacacattcagatttgacaaggacacagagcaaaacctctcaaaatcaaaatccaacacctgaaattcaacatacaacatgagtttagatactcaacaccaaaaacgattatacaatgaagacagcagaaacataaccattgatcaaagattacaatcaagaaattaattacctgacgattaacggtatcaagataaggacaatcacggcgaacttcaacatggcgtgaatgctttcccttacccttcgagacatcatcatcttcgtcgtcatcgacctcttcttgagcttctcctttcactttgttaccatttccctcccctttcgcaactccattaccacgagcttgcgatttcttctgctcgttctcctcttcctcatcatcatcatcgtaagtattagccaacggcagaagaggattgttgaaacctagtggtggaggtggtgaatcagaccgttccatcactctcttcctcttcacttctctctcttcctcagaaacaccattcttaacttctctttcacctttcattctcaaaattttccttatgctacagcttgcttcaaaaaccctagaagtctagaacacaaaatcccagcgtttcacaaagatcctcaaccaaagaagcaatgattcttccaaacaaacgccctagaattcaaatcagaagagatctgatagaccgttgattctatccatccttttgccaaatcctaataaacctttcaggcgtgatcaatctgaataagagatctccagcatcaacaacaccaaagaagataatcacacactgcaaacaaaacaaaaaagccactgtgagataagtaaacatgagtaaaactgaaaagatacttccatcagaaaaagaatgaaacttggacaaaccaaccagctgaaatcaatgcagaatctaagataaagtacactcctttacaaagaaaggatggatcctagctcagaaccataattctcaatttcattacataacaaaaaaagagtgaaatttggacaaacccatcagctaacatcaatgaaagcagatagagaatctaacataaagtgttgtgctttactaaaaaaacaaagaattcaatcccaaacccataattgataattcaattcattactatcaaaacatgtgagcctataagggggatgagatcaaccaataatcgatattaatcggtcatacggtgagcataaaactgaccagaggggacgagactcgagagtggagggagacagagaagcgtgcatccgccttcgtagagagagtttggggttttgtgttttcgctattcacaagcagagtgagagaccgtaaattaaatgggtaagttttgggctgtcttttattttccacatttgggctttaagttttaagtttccactatggaaaccaatcaaaggcttctacatgggctttgttgtcatcagcttctctgcggctttcatgcttacttgtttactagcacaacattgcatgcacctattgcagagatgcctaaggtttccttggtggataagaatagtggataggacataataattattttaacagaaaagagcatttacactttggggctctatgtacacaaacataaaccccatacaaggggcaaaaaaaaaaaacagaattaagaaagaaaaacaaaagctaataaggtaaaaggcaaagcctatttggttttctttttgaaccaatttggctgtcctctcattccctctcttctcttctcttctcttccttccttcagtctcgtgagcctaactgtttaagcatttttatatttgaatatcgggcaaaagaagcattacatacatattggtttcagacaggaatgacatcagcgttttgattatcgtcgcaggttatgattaagccatctgcgtaggttgggaagaggcagtgccaccaccggcacccactggagactgcttctgccggaggaactatcatcagaacgttgtcgtgccttcttaccatccccatcacgctcactgtgcttccttcttttatgtatctgttgcatcacacacaatcaaatatgattttaaatcagtaacaaagggattctctttgacagcaaaagtgaaaccaatgagctttcttgtgtactaaaaacgatcatttgtactagaaacggtgacttttgggtctcattagctttagacttaattcaaacttctaagccctttaacttcagacttatcatgcactgatgtgagatgtttaagccgttaacgttgacaatagttgctggatttcttcctacaatacatgtctcatcacatctttttccattactgtgacttttaatgtggaagaataaccaacggtaccagtcaaagtaaacgcctacatcaacagtttaatacttcccattctactaaagaaatcagggtttaaaaggttgtaatttgggtaaaataaggatccaaggtttggatagtgactctaataacgttatttttagattttggctaagatacttcgtgcaacccgaagaacagtttaagatgcgtgttgaatataacatacccttctttgagacgcataacacggtcatcagctgagaggttgcgatctgacagccactttaagaagctgggagataaatctttgttctgcgttgttacattagccactgtcgccggtttgacaaaaggagaaacttttgatccatatcctgcttttactagtgctcgcaatccagattggaaatccgagatgtaaaaatccgacacatatttctgccaaagaaatataaccacaacaagaatcatcaaacttcaccatcttttcttgtcatataagatctgaaaactttgaccaaatcactgagacaaatggtccttttgcaagaggagaaaaagaaactaacctctgcatgtctagatccccaagaaaagcatcgatgttttgggtttgcggatttcccaccaaaacctttgtattcatacaactccgtggatacataaacgcatcttggtgttctttggaacgaagattccaaaggaatgcttccacatgtcacaacctacaaaaacataacaaaagttttaacatttccagcaaataaaagacacaccagtgaccacactaccatatctacatcaacattgttaattcagacaatataaatggtctgtccaacgcattaagctagctgttgacgactgtaatccaatcgacaatacaaaaatacccgtgactccaatttgtcgaattataaatggtctaatttcactaaagactcttataaaatctatactaaacacaagcagcaaactttagtttggtgagataatataaaatgtcaaagacagacaaaagcaaaaatcatcataaagcacccagaaacataatgaagcaaaactaaatgaagttaattaacactaaaacagagagatccaagagtataacatccataagaaaagccaatgatgataatgacattctaacttcaccaaagttgaaaatgatcaaaagctaaatatggaagcaatttactttaatcagaacaattaaagttacttactaaaactggaaatattaacatctgaaaattaggttttaacttacccctgtaaccttaacgaattgtccatcaatggcacctctaagctcagcatctggatactttttgataaaactcaacaacccttttcttctccaaacgcaattccaaaccaaaaccacgattgcaggacaaactgctgctaaaaccgcagcaatcaccaccggtttcttcaccgccacagtaagaaaagctcccacaagcaatcccatcgccgccactatcaaaaccgcccaaaccattgcttttggtactttaaacccgacccgaaccgggtctacgttaagactcgtcaccgacgacccgtatttaggcttgctcgacgctagattactcaattggtgatccaattgacccgaccttctagacccggacaaaattggacccgaagaaccaagagaaccggaggtaattaaaccggttggctgaagctgagagagtggacctgagaatttcttaaccgaaccagagttgggaccagatcgaacggatccactgttagggtttgaagaagaaccggagacacgtggcggcgcctgaagccttgacgtacctccgctgctattaccaccgacgattaacggcggtggtccttgaaaagaagctgaatcgacgacggagatgtcgaacatccttccgagctcgccggatttcttgatgtcgcctccggtgtaaggcacagctcgagccgccattgtcggtggtcgctcttttggttgctcaagctttcccgatacgtagagtccatttggtagctggtgggattggatccgacccgccatttctacagagagaagagagagagaagctgaaatgcagagaaactttactctttgagtgcttcagaagagagagaagtcgcgcgtgtaggtgtgagtggcagtgaaggtggagagaagaagaaagacgaaggatgtgaaatgacgaaagagatcactctggactacgttattacgagtgtgccactgtgtcctaaaaacaggcgattgcgtaatctttgaagtagccaagttagttagaggttttggtctttgattggttcatttgtaacagtaatcgcctacttggcgcttttttattttacagttttttcctgtttgtttcaagaatttgctaaattacccttatacttttgttttgttttaattttcgatttgaaactaatttacttcaaatttattctgaaaattttatacagtagtatgaataaaaactatgtattatataacacaactgaaaactgttcatgcacagactgcaatccaaatataatgatttcaatttgaccaatgcaagaagaaaaaaaccatcacatgtgatattttaagaattactattttggactatggtctttgtatatatttcaaaaaagagtatcaatatccaatatctttgcctcgataattgtcacgagaaagttaaactttgacccttgttacaatacaaccttggacttcaaattgaaagatcgaaatttttgttagtatttggtttgtttcaaaagaagatgattagagttttgttgttggagtcacaagaattgatagattcgattgatattaacaaagtaatagacttctctttggtaggaccatcaccaacggcccaatgccagcatttcaataatcataacaagttcatgcacgtataattgttatttatctttcccttgttactatattgtctaaaattgcaaattttaatttacattacacgtgatctatataatcaaattcctaatgattgcactaattgaaagcactataaaaatatacagtacagtacaaatattagcgggctagatcaaatcaaatttgaatatttctttggactcagattctttatttctagctgtcactatagtgtcaagattctgtaatatttgagatggtgaaagggtaattcttgaaaatcacttatagtcggtgggtgcttggggagagaatccaaagagataatatgggcgcaaatgggaaattatgtgttttgacgaaaataaccctgtactatcaacagaccatgcaaactcatttggatttttttggtcggatctaataatatttaactatttatatggtttcaaacttagatgtcgaccatatatatgctaaaacttcattattcagaatctcagatcgttgtttgtatatggtgacttattatgatatgattctttgtcttcttttctacgataaataattgaatttttatagttacggaaacaccatttcacaaaaatttgtaaacaattgtcattggtaactatttacccgacaaaaactgtaaatttgagtgaacatatgcaggttttgttttggtcagattttgcattttgaacacaattcgagttatgtagtcacttgatttgttgactaaataaaagaattctagtgttgacatataatttttcaaatcaatgcaaagtacgcaaaatgttgtagttaacaaaagtaacggtttacataaccaaacaagattggttcaaccagaaccggttttcatgatagagaaacttggaccagagatgagctgatgttatcatttttcttctaatcttgataggtactaggatgttgttaccttgagtacaaagttgcctttaaaaaccattttatgaagaagaagaagagctctgcatccgttgttttaaccatgactccagatactgcagctcctcattactgattgagtgtccaagacccggataagcctgcagataaacgaactctctttagatatacatttccaagaatcggtttctaagatctttccatgtgatcagtattgactgctctgttatatgagcaaatatatgagtgtttgatttgagttcttattgttataccttgaattcacaagtcacacccgcttgttgaagaaaaggaagagctgcttgaccagcttcgaatagtacagtcttgtcatcaatgccatgagaccacaagattggtgtctgcatatgcaaaatttagagactcagatacccaaaaaacagtgacaggaaaatcaacatttaccctttacaagaaaccgaaaaacgaatgaacaacctttttagcatcttcggtaaactgattggtgatcgaagaattgaatggaatccatccgctaaagactgcacctcctccaatagttttagggtaaagaagaacactcgccaaggttaatgcacctgcagaaaatcttattcaggagtcgcaatacaaataaatcaacacattgtagctttgcagtttaaagaaaaattggaaggtgtaaatccatgaaaatgggtaactatggagggtgctaagagaaatcacctccttggctaaatccacagatatacacattttctggattgattcctcctgcaatctccttatctataatggcatgaacgttcttaactgctttaagcaaactgctttcatctttcggagatccctaacacataaaaacttacttacttgatgacttaaaatatctctagaacagaacaaactccttaataagctaaagcagcctgttctttgtacattataaaccttaaaatctactaaacaagtactgatgaccccaaactatattagaaaatctgaagctacaaatttagaaagtattgaacaagaagtgttaccgcagtaagaggaagctcagggatgtcaaaccaagaaggcatcactgcaccatctgcacaagacaaattaagaggcaaaggcacaatatttagcaagtacataagatttctcatgaaaaagtatgaatctttactcaattttgtccactgcatttaccaatgagggaggatttagatgactaagccataatttgataaatgaatcacacatcaaagcactaaatccaaaagaaagacacactagtatcattcctatagtaaggactagacctaaaagttcgaattatttaggagaatgcaaatttgttcagctcaatcaattcaaaaacgatgatcaaagtcaacgcctagagaagaaagaaacgaacaacaccaaaatcagaaagtaaagggcaatcatacaattgcaagagactggatttggtggagcagaagggaagagccacttagtgtttctaaactcctgggacctgaaaagtgttttgatgggttcgttggcaggtccggaatcacctagcccgtgaagccataagatgaaggttcgagccatggagtctcggttccgtaaagcagaggtagatgatacgtcagatttgtttaggaagaagaatgcgaagaagaagacagagctcaatagtgcgatagtgagaagaacaatcggcttcttcagtctacttgttcgcatgccttcaccattttctctcgagatcgatctctcaaaaaatgttttgttttggagaatgtctaaatgactaaaatgccctcaatgttaaaagattatcaaatttgttggctatgttttatgttctcatgttcacactcaagattgcaaatgtattccaatgcttgcatatacataattcaaatcgatacaatcatactagaaggacacagcaaacaaaaccatacgaggagcttagaattgtcaatcttcttcttcttgtcttcatagacgacatgtaggtattattattaccttcagtggaacatttctttaagacaattaagttggagacaagtagacgacgaacctttcaaccgtctcttgatccatgactctatatacttcagctccttattgctgatcgagtgcccgagaccaggatatgcctgcagataaacaaatcaccttagaagtataaataattgtacattggagttctatcatgcatttgtctcgaaaaagagttttgatttgaatataccttgaattcacaggtaacaccggcttctttgagaaaaggaagagcagcttgaccagcttcaaagagtaccattctgtcatcagtgccatgagaccacaagattggtgtctgcatattgcaaagtctgaagactcagaaacacaaaaacattgatcaacgtttataagaaaacataagtgaggaaccttcttagcctcttcgggaaactgactgatgattgaagaagtgaatggaacccatccacttaggacggcacctcctccaagagtttttgggtaaagcagaacactagccaaggttaatgctcctacaagaaaattcttattaggcgccacaatgcaaggttcttaagacataagtggattcagaccgatataaaaaggtctctctacaaagaatattgaaaagacaaagaattcatgaaaagagaaacaacctccttggcttaatccacagataaacacgttttctggattagttccttctgcaatctcctggtctataatggcatgaacattcttaactgcttcaagcacgctgctttcatcaattggagagccctaacatacataaaagttgcacacttattgtgatttcataaaatctcttgaaaatgcaagagtgctctgctctttacacaatctgctgaacaagtgttgattctagataatgcgtcataaggtttaacaaaccaaaaggtgctaacttggagctaccagcccattaactatttgccaattcatactataagaggcgttagatagatcaagagtgaagtgaagtaataccactttaaaaggaagttcaggaacgtcaaaccaagaacgcatcaccgcaccatctgcacaagaaagtatagaaagacataagcttttttcagacacatatggattaagagacatgacaccaacagataccacagagaaatcaaagataatcaaattgtgtacatttgactaaatgtctttcaaattaacagaatgtgacaaatctccttcacatcacagaggcaaataataacgctaaatcaaaatggcatgaagtggagaccgaaccctgtagcccaaatcaaaccataaaccatgaacaacgaaatcaatgaatgcaaatcgaaaatagaaaaggaagaacgtactgttgcaggtaaccggattgaatggagcagaagggaagagccaactagcgttacttaactccgaggatttgaattgagtttggatgggttcattagcaggtccagaatctcccaacccgtgaagccacaagatgaaagttcgagccatcgtgcttgagttccgtgaagaagaagaaagaaagataaagaagatgaaaagtgctcactatcgataggcttcgtctgtgtattccttcgcatgttaaaatcgcctgaaactttgccatttcaatggcgattttgtctctcaaagtcttcgcgacgactttcaaagtagaaactacaaagtccactaggacaagagtgaaaagtaccaaaataccctcggttgtcgttttatgtccgaaacgacatcgtacatagctgcagcccttttttgttagtgttttaagccagacagggagagagaagggagaagaatctcgcgagagacagaaagggacgattattggttggtgaaatttagagcatttttgggaattgggtaaacttttcgatggcgacttcgaagcttcaagctatttggaatcaccctgccggacctaaaaccagtgagtcaattccacgatgattagctttcctcatcgatttcgatgattcattttttttttgttggttcatgtaaaattgacgattcaattatggataattgagcaatctacatctccttggaatctgttgttagttttgtcttttataagttccactttctcgtcttttcgatttttctggtgaatcctgatttgtttctactaaaaaaaaaacaaacactttttgatgaattttgactttcgattagttctcgaggatggattgatttgttgcttatggtccaggagaatcactctttgctttataatgggtttcataagtgatagattccgttaccaattcacgtcactcgtgtctcagaacatcaaacaataagactctcattttgtgttttctcagttcatttctgggcaccaacgttcaagtggggtattagcattgccaacattgcagactttgccaaacctccagagaaactttcctatcctcaacaaatcggtatgtattattctatcatcttcttaatctgcagaaggttactcctctgttttgaattgtggacttttataggcttatcatattccccatagttgtcattgttccttgatcagtttcattgtgttgcactgccttcaatgtactttcaaatattctctgatatttcttgcatcagcggttacatgcactggtgttatttggtctcgttacagcatggtaatcaatccggtaagtttccttacattccctttcaaaattcaatctatttttagtattgtaagactctcttatcatgatcttctcccttgcgtttgcgatgagatgttagtgattgtattcatggttgatctgacttctttgattccgactcttgtttacagaaaaactggaacctcttcagtgttaatgttgctatggcagggacaggcatataccagcttgctcgtaaaataaagtaagatcgagagaacatctgattttcttcttacttttacatgttatgtacatcttaagacacgacttagtcaaataagcatttggttgattagttgaagttttctcccttgccaaactgatacacttgctttgatctacagacacgattatgcaaccgaagctgagcctgccgttgcgagcgaatgattatgatgacgaagctgagatttctaaaggaaactggatatcatcttgcttctgtttgaaaatctagtctcaagatatatgattttctttaaattccaagatcttctgatcggatcacgattatcatttccaaggttttttaagtattcctgtttgacatttgttcaaatgataaaggaggtcaaaaagttcccttcatatgctgcttttaaagtaaatcatcaagtactccacagacaaattaaatgttctgaatgttgaatcaaaataaaattcagacaaaaagacaagaatctcctatgaattgaatgatcagtctgaatcaatgagtcatttccattaacatcaaaaggaataagccatggggttacagaccaaatcaaggatctgcgtccatatctaatgactgctttgttctttctgtaatgtctttcttcctaattgatattgagagttgagggtgaggaaccaaaacaatgcacccagtttatcattcttctaatggcttgtcctctttcgggtcgttttctgcatcagcatcgtttgcatttaagttcagtcctaaatccacagtgctttcgttcaaatcttgtcgcactactttttcttcatcatcctgtactattttttcttcaacctgctatataagaacagatgagaggttcagtatttacttttcgtagtaacaaaagatcacaaagcattctttattcaaattggaggcaattcaacacaatgacaagggaaattatgcaagattgcaaattatagctggcattagaacaaagtctagaaaccacaaattcaagtacgcatgatgctatgataaagtatcagtttttgaaaatcctaccaaaagaaacgcagctaggctccaagtaataagtcaggaatccatgaatgaacaatggagttatcaacagaaacattgatgaagcagataatagtacatgttgaatgctttacctgaatatcttccatcggaacatcattgatgtcaggcttttcctccacttccacttccgctttcttctcgctcgactcctctacagttttgtcctcatcaaccttgtcttcctgctcaaccttattatcctcatcaatcttgtcatcctcctcaatcttatcatcttcctcaatttctgtaatttccttcttctgttcctcaagtactgctatctgcaccattttaatcacacttcacttcaaatgaatcactaataatcaaaactaaactagatatacaaagtttcaaattccaaatttataatccaacacgattcaatgatactgaaaacagcttcttaagcaaagatcatctacttcaaccagtgataaaccttatgattccatcttacaaatcattcccaaatcacagctactaaaaacactaatccagtccagttactccaaggaatcaaaatggcaaaacagagacataagcactccttcaacaatgctcaaaactgaccctttttttgtcaatattaatacggtgattaaatccctaatcactgtaacaatcacctaatcaaacttctagcaaaaaccttatagctcaatccaatgcaacaagaacattgaaccaaaaaccaaaaactaaccggaacgtatttgaatctccgccgtggaggatcttctgccaccgttgccaccgtatcctcgctcggagaattactctcacttttaccatcttcattgccgttaccattctgagacaatggtgcccacttatacagcaacaaatgcgatccattactaccgtcagaattcgaaccaccgttaacgacggaagctgcagcagcggcggaaccggaggagctattattattgtctttcttagaggaaggagagacgtgtacccacttcttcttccacttcctcaccggtccggtgaaaaccgttgccggtccgtaccgtgtcgaggacctacctaaccgtgcaccaactccttccataacgacgaatcgtttatcgttgattcactgatcaaaattcaaatttaaaatcccaccaatctgtttaatgaaactttgttttcaaatttcttaaaagtaaaatttgctctttccaccgaaggaagaactcagatctcagtttttgcgaagcgaccaattttattggtttttgcttcaagtagaagactcttgttgagcaagaaggtttgactattgacacgtgtgtgatagttataggctaatctaattatacttaacaataattgcttttgtttgagaaagagaaagactctgtctaaaccagagggtctcggctaatcgttttgacctagtagcgtcatcatagagagtttagtggaaaagactctgatacccctgaagttctctcctatataaacatcgcttcaacctttcagctacatcatctctttcattacgacgcctaggtttagggttttcaacatcaatttttttgaatcagattagtttttttttttttaaattggggctacattgtaccgagagaagggctcgatttcgatacctttactcttgaatttgccaaaaaaacggctgtagctagattgaataagaagctatctggccggtggtcgcgagagggatttagatctctccggtcgattcatctgcttaccgagtttcttacattttctttttgattttcttaacatcttttgattcgttttattgaatgattggatatagtgaatagggaatagcagattttaaaataccattttcgatagttctttctcgtgtattaaacttagggttcctttccaggcgttctgtgctctcttcatgaacagttgtgtcttattggtacctacatatgtattttttttacattgatcgcatttaaccaaaagtataacagtcgataaagatgaaagtgatttagtatggccctgaataacttatgtgatttaattcgaccaaaaaattgttccattgaattgtcataatgaagattgaattgttttggacctaatcaaaggaataaacatttgtcatttggacctaatcaaaagaaatatatttgaattgaaccaactcaaaggaaaatgttagttttgttttgaccgaaactaatcgttaattgtcgctgtcgcatatgaaacagagtacttgcaaatgaattaagaaaacgagaagcctgggaatgagtttgtgatattggtttgaaatagtagatgtgaacaataaccattttcagctccagaaattagactgaatggacctcttgttgtatattagaattcataaaacaagatatgtatattacccccaaaaattagagaagtgtttgttctcgatgaaacgttagatcttgtaaaccaaactaagtatttagatctggtagagtaaaccttctaatacactgcaatcaagtcccaagcaaacaagatttgaatttgaaaacacaaatttaaaagcgttctcatcttgcaaagctgaaaaatgaaaatccatagtaagggaaaacaatttcagtttatgtactacacaattatatagagttcacacaattgaccattccttaggttggttatacccaatctcaaaagccgccataacctttgcgcattggaatgtgttcaatcgtcaaaagaaaaattagccctgggcatgtgggtattcgggtcgggtcgggtcgggtcctttcgggttcggatttttcgggttttgaaattttggacccgtatggttatatcaacaatttcgggtcgggttctatccgggttcacttcgggtccggataattcgggtattgcccataagtaaccaaaactatctcgggtttgagtactacttacccaaactttatttaaatatacccaaaaatacataaaagtattcataaaacccgaaaaaaccgcaattataacaagtttttccttaagagaataatataaaacaagaaataaaccttattttgagcttattccataactcatatcattagacaagtcacaaattcaagctattaatgcatatataccatcatatgtatatatatgttcgggtagtaaaaaatacccacgagtatcgcgttcggttcgggtaatacccgatacccttggttatttgaaaacagaacccgatcgggtaattagccggaaccgaagtagaatgggttcgggtatttcgggtcggattcggttcgattcttcgggttcggatattatgcccagacctaaaaaaaatcttaatgtccaaaaggtccatccgcttttgttataatccatgatacagcatcttacttcactaataaaaacactcaagtctcaaattttccaataaattgttttaccgggccacttggtcgtgaaaattccaactgtaaacgcatttgctcataatgtgtttcttctttgtaccaccaatgaagatctaacatgctcggaagagtgctcaatgtttgttaatcatccccaaaatagtcaaacaatccttcatacatataacttgtttagcaatatacattagtaatcatcaataaaaaaaaagaaaaacgaatatagtactatcactatctaacaatgtacagttaaggttaactgtctgaatatggtttcttctctttcgttaagaaacagtctcatgttaaatacatctagtcatagtaaatgattggttggtaaagttcattccctaaatccgtgcgaacttttatgtctctgactctaataagtaccaaaaaccattaaagtaaagtggatttacacgagttttctagttatattattaatccacattaagtaaaaacaggaacaaagaaggatgaccttaaacagaaattactgattcaccaaattttaccgaatcccatgtcgacggaagtgtgcgccgctcttaggtttttaatttcaattttaatattcttttacaatatccaaaattccggcaggtgataagacgggaatacccctcaattggcgaaattcagaaaaggaccaagagagagaagaagacgaaacgatcgtcagagatagagagagagaaaggtcatcacccattctcactcgcagaatatttgttctcatctgattcctccgatctgccatgtctcggcttttctaacgctaagaagtttcacagacgcggcgaaggagagggaggaaggagatagatctctttttccgtcgcgataataataaaaaataaacggtttgtttttcgttctcttgctgttcatgtggatcggatttttgttttcgtgctagattccattagttttttggtttcgggatcgactagtttcgtaatggatctgatttttctattggatctccctagttttgacctgagcaagcgtttgtgaggacttcatgttcttatgacctagattcgttgttttagatgtggaatttggtgtttcactaatcgatttattcgatttctctggtttttggtgatgattgatcaacgtgatgatttgaagatattcattgttcatgtgcattgttgtaaagatgttttcaagtttccagtgtcttgattaatcaatcactgtgttatgggaaaagtttggaatcttaactgctaccattagcgtgttggtttgttaaatcactactttatatacttattatggtatgttgcttgtttctgcaacttaactcttattggttactgttggagccttgagaaacaatcagttaataaagtcaattagcagagataatcttgttctttcttttgcgttatttcatttcatgaataaatcagatgttagtgttgtctttccctcttctgtttggtcttctcagatggtttttgactgttttgtggcttttattttggatctctagtgtctagaggctgttactgaagagttgattcatacggagagaggatagaaatggcagatgggatatcgagcttttggggtcctgtgacttctactatagagtgttgtgagatgaactacgcctactcatcctacattgctgagttctacaacactatatccaatgtccctggaatcctattggctctcattggtcttgtcaatgcattaaggcaacggtttgagaagaggtttagcattcttcacatttcgaatatgatacttgctatcggcagcatgctctaccatgccactttgcaacacgtgtaagtaccagtcagcttccacttaattgctatcttgacttatatgtacttgtttgattcatgcatatatgtttctagactgttagcatactgatccaaatttcggattataatttgcaacaagtataagtacctgtcagtttctgctgctattcttcctattttgatttttacaggcatgttgaattcatcatgacttatatgtagttgtttgattgatgcatagaacttttcaaattgttattagtattctggtctaaatttcggattaaaactctcggtttcttgatttcaatcaggcaacaacagagtgatgagaccccaatggtgtgggagatacttctatacatgtacatcctttactcaccagattggcattaccgaagtacaatgcccacttttctcttcctctacggtgctgcctttgccatagtccatgcttacctcaggtttggaattggtttcaaggtccactacgtgatactttgccttctatgcatccctcggatgtacaagtactacattcacacagaggacacagcagccaaaaggattgcgaaatggtatgttgctacgatcttagtgggaagcatatgctggttctgtgaccgtgtcttctgcaagacgatatctcagtggcctgtgaatcctcagggacatgctctgtggcatgtgttcatgagtttcaactcttactgcgcaaacacattcttgatgttctgcagagctcagcaacgtggatggaacccaaaggtaaaatactttctgggagttctcccttatgtcaagatcgagaagccaaaaacacaatgagaagaaaattggggataaaaaagcccagatgaagaagaagaagatcataaatatagtttttgttcatcgttttgtcagaatctcgacatggtttttttcttaattttattttttgaaagtgaaactctctagatacagtctagatttttttttttttttctcatctctgtattagctattgggaatgctcttaagaagaattgatttttaacttgctaaaaaagctcttgtaccttttggttttcctgtgtttggtgtgtgacatcatttcttcaactataactcgtgtaccataatacttaatgccattcttctatttctcttaacactgtttacagcttaatcaggtctaaaactttttgattcaagatcttggttttgataacaccttaagagaataggttccattgtaagagaattgtagtgagcttcttttctttcataaagcatgtaccagtactatacagaggaattccacaatgagaaaaacaaaaaaacttataaatctacttttttttttcttttctctttcttttgaataattttcagacgtaacacggaagcagagtaatatggtatacaatgacgggttgtgatgatctaagatccaataaccttttcctgcaacatttggccaagcttcacgagtagcgcttgttgttcttccaatgtcaggcttgtgattatctgtaatgagtataaatcactacaagtcaaataagagatcttacttaatgtacattgtgttggttcttctactagtaaacttttacctggtctaagagcttatccacagagaggacttcaggtacaacaaacgattgatgatatatataggcaaaaacagccatcaccatctagaaacccaaaagacatatcatatcagatctaatacagttctaaaccatagtgatgtttgaaagtctttaagaaagtaataagaatgtattgaagtcaatgcgcctatatacctgacaatccattctatctgtaattccgccatgtccgggaatactatcaccaaagtcctgcaaggttggagaacatttaacagtgaatcaatgttgcatagatattgtggttttatactgaatatcatctgaaacccaccttgattttgaatgctcttttgaaaccactggcaaagaagccaccaaaaggagctattatagaggcgaacaatccaagacatagagcatgccactggactggtagaatcgaaatttccttccaagggagctgtaaagtaaacgcctcacgttaagaagcaataaagttgctcgagtaattgtttagtattgtacaattcaattctagactttacccaatcagaaatccatcctggtaaagcatgtgtctcttgcttgaacagtggaccagggtcacagaggagccagcctgtcgatagatcctgtattcataaccccaataacataatggttagtaaataattgtaaaggttcttgtatgaaaaaaggcaggacatgacttaaactttcaagtacctctctgggacatgtcagccacaggaaacgacccattatatttgcaagctacaaaaacaagcaagattattaatcaattactactcgtcaaaaaacatatacttattagcccataaaacaagcttaccaggaatgcagaaatcactgtggtaatagaagctccaatgaaaccctcccatgttttctttggtgataacttgatcaacggtgttcttccaaagaagaaaccacagatatatgcaaatatgtcattgatgacgataagtgatgcaggaagaagaaacctgcaccagcaaccagtatagtaaatagacttttagtcaggtcataaccaagatacaagagaaaataacacaagaactaaacacggagcaaacaagtaagaagcgttaaaaggaataggtgactaccagaagattccttcaaagatgttggcgacagtgaatgaggactgagtaaacaccacaattaatatcatatgtgtccatgcatattggctaaactgatatttgtacatcttctttttcagcgtgagaataaaccaaacaaagcctacaattccacagcaaaaaaaggagagattatgttaagtaaaactagtgaacaaaaatcattgctctcctcacagtaatcagtaaacccaaaaggtcatataacaactaaccagaaatatacaaggagtaacagattgccatgtggtatttgatgaggcttgtgaccagtcgatataggactttgtctggagtcacagtgttgactagccgttgactaagtattcgaccatatacaaagagcattgctgtaaaaaagaagtgcctgcagaaacaaaatcagtagtcaaatgcaaaatcgtttcaacaaatagaaaagtactaagaatatgataccatttcagcataattcacataaaagcaaaacaaaaaataactcagaatgttgagagaagtgagacagtataattaccaattcagtaatctaaaaccagggagctgtttatcttcatgagtttttctcagcaaattaaaaagttctcgtgccatgaatatctgaataacaaccaccatggctgtaatgtagagatgacccaggtaaactataagagcaaaaccacctatcatccagaaagtggagtatgctcgaatgagaaacgatttgtattttttgctgtcattgacaagtaaatggtttccatttggtttgcctgcccctgcaccaacctaaaaagccagaaatttgattgaatttacaaccaaaatgaagcaaataagtagcttatgtactcttagaatagcttctacatcacataagtagaaaaggaccaaataaatccttatacaacaaaagcaacttaactaagccaaaaacaatgtgaattccgatttaatttgacagctaaaatattgaataatggcaaacatacatcgctgtttcgcttccgatgccgaacacgagtggttggtgctgatggagcatcaccagcaatttccttctgcatgttggaagagttcgaaacaaaaacactgactacctgtgaaaatttaaaattgaacttgagtacatctagcatcaccttagtctaacgtcagaatacaaaaaaaagatagaaagactctggcaactaaaaatcattgataagccaaaaaaaaagtcgagtaaatttagaatcaatttgcaaatataagtagaaaactcatctgaatcaatcaatgacatgtacttatatcaataacatgtactccaaactctctcaccaataaatgcttttattaaaacacggaaacaaaatcaccagcattctaaacaatttgaagcttgtactctcataggtagttgagcaacccaaacaaaaaaccatccaattgattcattgaaactctttaataacactcaatatacaacaattcaaacttgaacttgataaattccccataagtaaacgctctcagtaggatttttcactcaaaattttattgaatctaaagcaatgaacataagtgattcacagagaaatacaattaaacaggaaaaatgggacaaatacgagtaaaatcgggaataaaacccaaatttaagcagccgaaatacttatggaaatactggaaatcttcactaatggtgtcagtaatcacacgagctaaggagaataacaaagaggaaccaatactagtttctcgtggagatctgaggattgaggagacgaaacacatatctaaacaaaactatgtacatatgattcaggaatgaggtaaataaggaagagacgtgaaacctgctttcgtgagctcagtttctactgtgccagagcgagagagaatgagaagacgaggaagaagatggagcagagaaatcgagttgaagaaaactaagtagaagacgaaaatgattctccttatttctcgaatcttttaacttttgattctagaagccacaattaataaagggatataatattttaattaaaggtaaaggtcctcctctatattaacttgaaatgacaattaaaaattcgagaatattatgaactcttttctacaaagttgcaaattgttaccttgttatgttcaatgctcataatcttccagaattggttaatgaaaacaaaaaaagaatcaattctttttttggacgatggaatagaatagaatcgccaaaagtagagatagtgaattagattctattcctctttcattgttacaaataaattcgaaaaacagccacttctatattaagggaactcacatgtgttttttactacaaaatttcaaaagtttgagaatttgaagaggtcgctttctttcaatatgcgtttttagtttttaccaaaagctcttcccaaaactcatatatgtgtttttttaccaaaggtttttcactatgatacaacaggctctctatcctttaaaggggtccaaaaatctttttccaaaagagttgtgaaacaaatctctaatctcattccaagataaaactggtcacttttactcttaaaccaaatgaagtcagtttctttccagggctctattcttcctgctgctcatatatctgcatgtatgcttccgatagttctaccatctggggaagtgtctctgcaacatgaagatcctgcatctcgtacctgcaatggacattatcccccaaatgaatttatatctttcttatgcacagatctagatcatgcatttgtgaacatgaaacacaataatagttaatgattgagaaagcttaccatagttcttgtgacttgcgctgcacaaagactctgaagtacccgtcctcaggcttaccatcatgtacaatgttagcgattagattatactttgaacacacattctccccttctggtgctctaggcaatgatggtatgtaatccctcagctccatgtccttcactgggaagttaactgtggcatagaaaaagaaattgtatcaaattaaccaggtattaggggatccttatacagcattaacgtcacaaaaatttcaaacagactcacccaatgtagggttcttctctttgaagaagttattcttcttgaaccgaaccatatggaacatcaagtaacgaggagatttgattacacggtatctcattctggccagcttaggccgaaccacctctgtcaccgtttctccatcaaacttcttcaataaatcgaatagagcaacctgacccaaaaatcaaagaaattagattccactaacctcactttgcaaactaaacactctaagacgcatatacgaggtagcaagccataaaggctacaggagctccaaacaaccaatgagtcagagaattctacactttcgcaagtcatgaactagattcgaaaaagaaagtttactccaggacattaaattggcaatggcactatttaagaatcccttaattgtatctcaaccaaatgtgacattatttatgtagctgtatattgagaatcataagttttctagcactccacgttatcatttttctgaaatgcatttttttaatggcacaaagtagcaagactttcaagatttgaaatagccatatacctgcggaataatgtttttctccatgacatctttgaaaagaggaggcggtggcaaatctagcccaagcatcagaaacggcatcctggagatttctttgttttcattgccttgatactctttcacaacctccaactcaccctgtaatggttaacaggttacatgagatacagcttttttgtaagaaattatatcaaactgcattatgttgacatttcaaaggacggacacatacctggaagcacttgtggatgatactgctagcgtcctttgaagttctaagatccatgtgcaaagtgttgaggagccacgacataaactctactggatctgattgttggccaatcctaaagcgtttcttgctggctttcatgacagcttgcaagaactcatgtggactcacctgttgatgcaaggtaacttaaattagcgaggtcctcaataggtgagtgcataacaaaaactaaaaaagtgagaggcataaattgagtcagacttgtcctttaaagtttcgagcatgccaaatcttgcgagttagttccccaaaacggtgaccaagaggagacttgcagtgctgataattttcaggaatgaggaagaaattccttagaggagtaactctcatcaacgactggattgtaacattcacaaactctgtcttttgtatgttgttcaaccccacctacatatttacaagcttaacctttaggagacattaatttcaagatcaagtgtaatcaaagagaaaggattaccattcctggaagatagtcggagccatcaagagccctagaccactgcctattcttgtcaagctcgtttacttgtgctctactaaacctgtaaatggatagcaccgaagccttcatacaaaggaactgaaaaatcaaagaaaaattgacaaaacatgaaagaagagtaatatgttcaagctatcatgcaaaaaaatataaatagatggtagatgatacagagaactagtaagaagaaactgattgagataatagtcaaagcaattttgttgttgttaactacgtgcaaaggctcacatgttcacaaatcaatacccaaaatgcagtaagaactatgatgtagttagtcacaagatctaatataccttgggtttaaaacatggcgaatgtcatccaaagaagggtcattgatctcgtaactatcaggaagacaataaaccttctctgtcagaagattgatgtaaacgtggtgtcctgcttccaagctatgtgtataagcatgagacttctggcttcttccttgaaagtacttcccacaaacaagacacgcatacacattcagatttgacaatgagacagagcaaaacctctcgaaatcaaaatccaacacctgaaatcaaccataagatatgagtttaaacgctaatctcaaaccagcaatataatgaacctagcagaagcttaaagatccaccatagattagatacattacaagtaccaaacacaagaaattggtcaatgatatacctgacgattaacagtatcaagataaggacaatcacgacgaacttcaacatggcgtgaatgctttcctctccccttcgaagcatcatcatcatcatcttcgtcgtcatcgacctctacttgagcttctcctttcactttgttaccatttccctctcctttcgcaactacattacaacgagtttgcgatttattctgctggttattatcatcatcgtaagcattagcaaacggcaaaagaggattgttgaaacctagtggtggaggtggcgaatcagaccgttccatcactctcttcctcttcacctctctctcttcctcagaaacaccattcttcacttctctttcacctttcattctcaaaattttccctaagctaaagcttgcttcaaaaaccttagaacacaaaatcccagcgattcacgaagaatcctcaaccaaagaagcaatgaactcttccaaaaaacgccaaatacttcaaatcagaagcgtcgacagtcgcgaatctactcgaacttatctctcgttcccaattttctcgagaaacttcaaaatccgccacaacgcagacgttaaacaaacaacctattaaagcttcaagagccgactcaagtctcacccagattgattaactcggttaaaaggccgaatatttattattgggccacactgttatagcccaataacaatctgttccatttatattacttctgtcagcagtattcagtaattgatctgtattcacgatccgatacttatcgaataaccattaataccctcaagcttctcgaagcaaactataaacgcgtgaaaatctacaaggacgtattcgacattccacgagtaaagagatgagttctgaagttaaagccagctggcgaagaagtaaaaaagcaaatagattagccaaaatacgacaacaccctctacctacaagccatagataccatgactcataagggcaacaccgacatttgtcatcatttgataaatctaaccaaccctgaagggcatattcgtctttccaaatagttataaagagacagagacgaagaaggagagagagaaagagacaagattagagaagaggataagagagagaaagatatagagaatttgttgtctttttttctttttcttttgtggggtatttgtttttttttttctccttaaaaagtttttttttttgtgtgtatgaaaaaaaaagctttgaaattctctctcgacaatggtgtcggaccaggatctagcgaaaggagtcgagactttgcttcgacaatccgaccctagctctctcacatcgttaagcagtattgttcagcagcttgaagctaagttagggttagacctcacggagaagacgactttcatcagagatcagatcaatatcctcctccgtgctcaccaaaacccttctgcctccgtcgcctccgcttcatccgtacaacaatctcaccctcctcctccgccgtcttctcaccagcagcagaatttgcattccggcgtcaatgttcctccgatggcgaaagggcatttcacacttagccatccttcgcaattctctgtttcttctcaatcacaacaatatccttcacatttcgctcttcagcctccttatcactcttatgacctaaatttccggcagccttatccggtttacatgccgccgcaacagcaccagcatcagcagcagtctccgcgacaacaacaatcctctgtgatgctctcacatggcgggaatgcttctctatctgttaatcaagccccaaaagaaaggtagggtttgcaacatatttcaaatgttggtacgtaattttgctcaaggttgttccaatttcagtaatttagggcttttgctactttcatggaaaacatgattttccattttaggaatgtctaaatcttttgtcaattttgttcatttacgggtttttaggttttacatgctcatgtttagaattatcatcctgtgatatttttagcacattgattcatacaacgttctattatagtgtgattatttctttctgatctacctaaatttggcacatcaacgaaatttgtcaacttttcctttgcagtgctccggctggaactaaaagaaagggtggtcctggaggactaaacaaagtctgtagggtttctccagaacttgaagtagttgttggtgaacctgctcttcctagaactgaggttatcattgtctttcatttatgattataatgtgtataagcaattgtggttgttatttatgtgttgctgtgtttggcttttggttttagattgtgaggcaattgtgggcttatataaggaagaataaccttcaagacccgagtaacaagcggaagatcatctgtgatgatgcgttgcgtgtggtttttgagactgattgcactgacatgttcaagatgaataagttgcttgctaagcatattctcccgcttgatccatcaagtaatggttaaacacaagcgttttttgctgagttccaactgtgcttggtttgttcaaggttactgactgtttgagtcacttttggcagaggactctggtcaagcaaaaaaggcaaaaactgaggtggagactaagactgagaccaccgagcctattagttcaactgctattagttcaactgttacattatctgagccacttggtaagttctttggcactggtgagacggagatggcagacgaagagattattcgccgtgtttgggaatacataaaactcaacaatttagaggtaatgattttaatcttgaaatcctctggtttctccttattgcttcgaatttttttcctgtttgctgctaactaaagctggtattgtggtttactctataagataatttacagtataggatttcacataactttatgttatagagcatagtgaatggccataaacaagaaaattaagatttgtttattctgcttttcaattttctttcaggacccagtaaatccaatggctattcagtgtgatgaaaagctccgagatcttcttggatgtgaaagcatttcagctgtggggataaatgagatgctgaggcgccatatgtacaagcagtcgtgatatcttctggtctgacttaattaactaggaactactagtgtaagtgaagtttgatttaacagattatgatacttatatatcagcattgtccaaatatggtaattgacttctgtatcacaactctcttgcaggtgtgtatctagggaacctacttatgactccttgctgtagaactctgatagggaagaaaagatccttttcacttttaacttcctttaatgctattttaatcttccgttgggttctttgttttagttggttgtgtatcgacatgcttaggttgatgttgtatttagtattgtaccgaaactctagtgttaagggtgaaacggcgcagatgttttgtattaaacgccattcacccatgaatgtcttaggaaaaaaaaactcatgtgtttaactatgttttccctgttggaaatatttgcatcctactgatagaaaaatcttattccctatgctatggttttttttcctgctatcttccatgttatttgctgtgtttttatcagaatctcagacgtgtgacgtagaaagcggctgcagcaagcagcagaagaacaagtagcaggagtgccattgcttgtctccttgtgttttctgcttgtctcaagaaagtgactatcttctcagcaatactcactgcaaacgccatagttctctgcatcagaagacaaatgagaaaccacaataggtaagtaagtgaatcacatgatgacataaatcttatgaacatgacagactcactagtcttaggtgctctatgtggaaaattggttccatgaacatctccacattcctgcattgtttggtttaaatatggtcatgattcacgggttataattgttatgataactgaatttagagtggaacgaatactgactttatcaatagctttccctggtacatatggcaaatgtggaaactgaatcccttccccaattggatgtgtgacttgtcacattctgcacattacaggtaaaccgtcatgagaacaatcatttcaattggatttgtcaatttttatttggtcttgatcctggtctggtgaaaggaaggcttattccggtttggtattctggagtgtttgaaggttttgactttccggtttccttgactgacccaaataggatcggttgcgtataaggttatcagttattcggattaggatatagggactaggggactaaccgagttgccattgaactccaacggtcatgccatctttgaacgttggtttaacaataatcttgatatcctttcccagcttcatgatcaaccagtagaagaaagccataacttgctgcatgtataaaaccatatttacccttataacataaggatttcaaaaataaagatttgtgaaagaaaagttattgttaccattacaacatatgctaaccttcttcccttgcaagagtcgatacttagataaaaagttggaaaagaattggcattcatctccaataacttctgaaattccttcgatgtttcggtccttgatatcggaatatagttttagaactgtctcctccgcccgatagtctttctccatgatgtttcggtccttgatatcagtgtatagttttagaattgtctccttcgctcgatagtcttccttcttatcgtcattctcttcatcttcgctctcttcctgatctgatttctcttcatctatgctctcttcccaatctgattccgattttcttacccttgtgtaatgcttcaaagtgcttcgatgtgagtgtgatagatccagatgaaaactcgtattggtagaaccctttcgaattgacacgcgagaattcttcgtgtaaattgagcatgagctaaagctatttatccctgaacatagtttagatgaaaacattgtttgcgtaattgacatatatgaggatgccattgcttgtaaaatggaggatggttttgctgactacataagattgcaatactttataaaaagctttgtgaagaacatagattttcatttgtataagtgaagtctggaacaaacgaataaaagaatgtgtttgtttgtggacaaagcaaagcgatgaaaaatgtagcaagtgttggaagataagaataattttcgattttttcgtaatgggacttaaggatagatcgttagtgtaataaatagacagttaaagaaccatgacggctctttacctgttatgtctcaatacaaaccaagcagtgcttggcaagcaccaaaataaaaatctaagaaactcaattgtacaaatgagcgatgatgatccacatactaagcattaacaccagtcacaatacattcttcaaataggtaaatcacacaaactaacttcagtcagagccattccacattgcagagactcttcatactgagcagaaatccttagatcaggagcttctcaattgcatccttgagatgctgaatctgcgatttcaactggcttgcctcattcgatgtcactgaacaagcaataacaggtcttgttactccacatgctcttcccaatgcttgtttcgaaggtacaaacacatatggcacattctgcatttagatggagagtacaaaaaagcgttagttcaaaatcagaccacgtaataattgcttgtatagtaatgaagctt

SEQ ID NO: 612 - DNA, 106702 bp, Arabidopsis thaliana
gcctcattcgatgtcactgaacaagcaataacaggtcttgttactccacatgctcttcccaatgcttgtttcgaaggtacaaacacatatggcacattctgcatttagatggagagtacaaaaaagcgttagttcaaaatcagaccacgtaataattgcttgtatagtaatgaagcttgttcaaataggataaactatagctatgatgaatcatgtcttcctcaagagtgaactcaaagctacaatttttaaacataaactaggagaaactatagctatgatgaatcatgtcttcctcaagagtaaatttgaagcatacaccaataattacatagatacaatgattcaattgaagaccaaaacagagtaaacagagaaagtttcctgaaagaactcaacagagaaaagtatgttcaacacaaaattgcataaagctaagaatggcttcttaagcttctaacaaccaccaaaatctgagaaacactaacctaacgatacacagcctcaaaaattgcaacctaatagctctctattctacacgagttgaattaaaattgcaaccaaatcatcgagagagagaaagagatggtaaccttatcttcggcaagcaaaggaagatgaagaagaatctcaagtggttcagcatcagcagccataacaacgaactcagagattccacggttcaatgttttggtagcttcattagctcccttcttaagctgcttgtagttagtagcttgttgaacaagatccattattgttatcgaaagctgagaatctgctaacggatacgccttagggttcactacctctcccgtcatcttcttcgttctcaataagctcacagaaagaaattagggtttttgaaggatttgagaatgtttacaaatctgtccttaacccaaaaaaagaagaaggtatatatatagaaacatgactcgggtcgggttttcgggtttcgcttcggattggtgaatctgggaccaaaccgacctttgatgtcggttatttctgtcttatttcaattatttcggtttagttcggtttatgtttgtccaatttggactatttgacatctcttttaaataaacgatgttgtgtttaggtttagctatagacgatttacgttcataacattgcgttctctaaactctagtagatcctcttcatcaacaatatttgcgactagatttacttttgattgagattgatagtttcaagtcatatcaaattgcaaaagaccatactgataagagttttacatataaatttcagtcgattacatatagaagaacactatcttattatttccttacgacatcatactacgtacatagggttaagcttattagtactaagatctcacatgggtttaggattttgccatatcctttccccctgccactgctactgttactgtacctgaaatcaaacacagatcaagattttcttctacatgtttcaaactcaaaaacacttgaaatagtcagattttagataaagctcctaagcttgtttatgttaaactatgataagattggaaatctcacatcgaaagaaaagaagatgccaacttaaggaaatactcaagatctttagatccatttcacttaccttaatctaatgtttgggctcagaagtttcccttgctttgctcatagcttcagcttgaatcccttggacagaaaaccatccctgagaatgtaacacaagatgtttaagcatgttgatacggttaaaccctttctacaattcttcatggaaacaaactgcgtaagaaaacactaactagagaagggcataccaccttttagtactctttggcatcatcttctgatctttactgcgctgagcttgagtaggatctcctttacatcccaaaacaaggctactcacgaggatgtctgcggtaaatgaactatcacactctattccggcagttgtaagactctgactttccaaatcaaaccacatgagattcgccgcattgttaatctccagcaaaatcttgctcctgtccttggaacagatcagaggtctaatgaactcaaccgattcaacactctctggtttcggcaccctatacagcttagtccaagatttataatcctcatactctttcaaaacccaaacatcaacatggctatactcgtcgtaacacatcaaacaaacgcagccatctaacacaccaatatccatgttatcttcaatgtaaagctcctgtgggaaactgaggactccaatgtcatcagaggcaagatcatatttgattatcgcgttaaaggcaatgactccctgccttcgaggcaaaatccagtgaagatggttgttaacaaccacaccatagccacgacgaggcaagagatggtaatagtacgaaatccaaagaatctgaaactcgaacataagacacactctcttccacgaattcttcttcaagctgaaaactttgacttcaacagggcaaggaaatttctttttaccttctttaagcttacactgaacaatcctcacaactttaaagtcatcgcccacagaatcataacccaaaccgtaaaacacatactcacgagtgatgtcacgttctgggaaatcaattggctcaattggtaaacggtgaatcttcctagtcgaaggattaaagatcgctagatcaacaggagagttacataaccctatgacaccgttaaatgaaccaaaaacctctgtaaaacctccggcttgtaaaggatgagggatgtcggagacgttctcaggcgagtctagctccaccgtgcgtagaagacgaggtcctcggagtaagatcatgagatgttctcccgtttcgagtctgcgacggagatgagatgagacgaactcgggactgtcgatcaaagagaagcaaggctttgagaggacgcgacactttacgagcgtagttgctctgagacggagaaacatttcgttgatgagatccgtcggacattccgccatttctgttctccggaagaaaattgacgttagagaggaattagggtttcagaggatttgagagatgaattttcgagtccagctctcgagtgttgagacatgagaagtctttagctgtaaatgtttccgggtttttgttggttcgggttgataaaattgatccgaaccgaaattaattcggtttatttctatcgaattctgattcttcggtttaagttcggttcttttggtccaatttggttgtgtctcgatttgatattggattgaggtaagagaccgttaaaagagacttatcaatggcgggagatctggtgcttgacacggcgatctgagactgggttttgatccctctctccgtcgtgtggttcttataggaattctccgagacttcgtttctaagctcatgcgatcttctccgactactttttatctttcacctctcacatcttatttctttgtctacatcaacttcacaaacatcttccctcgaatcacaccattattattaataatttcgttaaacttacaaactagaactaaaaatttttataaattgttgcttgggttccttattttctcttagggtttaatttttttctaattaaaaataatcaaaatcttataggatttgaatgtatttttattcataaaagatgaaaaaacaatccaaacattttatcaagtatttcaaaatgtacgtaaaacattgaactttaaaatcaaacccacatattatcaagccaattcaagtccattaaaaacctcaatctaataacaactccttaatctctctttacgtacatttaagagaaaagtagtactagatctgttacttaactggcatgcatcatcaacattaatcttatgtttgttttgttgttgaatgagatatttcccatccaccaagggtttgttgtatacttgtatgtgcaagagatatgttgactagactatcagaagaattcatacgaaatgtttttgtagatagagtaaagcagatataaatgtgagtgtcaaacaaaacttaacttgtgaaggtatgttattccaaatttcccaattcaacctttacttttgtgtccttacgtctccaaaaaattattaccgtctttggtaacttgataacgtgacgagcatggactatagggtacgtggaaaaagaagagaaagtgtaacaaacttaaaaattgacggctatgataaagtcttaattattaaagtttgttacttaatacaggattacttggaaatatggtggcgggagagcgcgtcaccatggtgaatgagataaaaagcacgaaatcataatcatattttttctttctagttttttttgttaatttaattttagtaaagtgtgtgttaatgtatttctgacgaaaataattcactaggctaacctctaacttgaagttattgtttagttcttctataaaacatggattctcttcattcgatcttcccacacaacactcatttattatatttatcaaacgaaatttctctcttcaaacaaaaatcaatcactaaaagaggactgctcgatctcttcaaaatgtatgtatctaaaccaactaccctcttccattctttttctatcatagtttgtgttatcactgtgattcctctcacaatgttaattatattctcgctatcatttcactaactcatttcttgcaaggattttctttttaaaaatgtagctagcaacaaaaaaaacaatcttccatttttttatttgttaattcttttaatttatgctgtcatctcacttgtctcaaatttgtttctcttgcagggatccattgggaaatttgcctgcagatctcatcagaaaatgtacagatttgatggacttgaactttgccgaaggtcagagactaagaaccctcaacaagaactggaagctagcgttaccttctttccgtaagggagcttacagagaggaaaggccttggttgctttaccgtgaaaggggttccggagagacccgtttctttgaccctgtgagagagagggtacatcgtgggaacgacccacgtcttgcagatgcaagattcttgggatcaacattgggttggcttgttatgtccgagtccttggacttaaacccacgcaaaacccaccaaactttcctgtacaacccgttcatttcagaactgcagcaactacccgaactcacccttgatagcccatatcccacgggtgtactccgttacggtgtactcaccggaaatccaagtgacaacaacacttatgcttgcctcataacagattacttgcacgaaattggtaatcggagggatacttatacgctactaatttactatgtagccaagacgagcggacgatgggagcagaattggtccgtggcttctatgctagtcgttggcattttcgatacttggtatatagagtccatctccccatctccggacaaaatatcaattgaaatatggcccaaacgttatgacttcaccttccaaacccaagagtggaatgtctcaaactttattccagtggatcctatccaatgggatcctttccacgaccaatctttatatcatgtgaaacatcgacttcagttaccagaaaatccctctactctagccataattatcggcacttcaactgatcgcacgagagtgcgcaacaagattataggtgatcaatctgatgatgatgatcctagggcttctgatcacattattgacggagtttgggttgaggttcgcccttagcctgatgttcttctctttataagtatatatatctacctcatgactagttaattatttcttcgtttaagtatccttttactttgtgtaagtttaagatttgtggtatttactattttattattttgttgcaaactctacttattctggtttatgtaataactctactttactttgttaataaaaatgctgatcttttattaatttatttttacgttaaaatctaatagacaaacaaagaagaacacaccttctccccttctggtgctctaggcaatgatggtatgtaatccctaagctccatgtccttcactgggaagttaactgtggcatagaaaaagaaattgggtcaaattaaccaggcattagggaatccatctacaacattaacgtcacaaaaatttcaaacagactcacccaatgtagggttcttctctttgaagaagttattcttcttgaaccgaaccatatggaacatcaagtaacgaggagatttgattacacggtatctcattctggccagcttaggccgaaccacctctgtcacagtttctccatcaaacttcttcaataaatcaaatagagcaacctgacccaaacatcaaagaaattagtttctgctaacctcactttgcaaactaaacactctaagacgcatatacgaggtagcaagccaataaaggctacaggagctccaaacaaccaaggactcagagaattctacactttcccaagtcataaactagattcgaaaaagacagtttactccaggacagtaaatttgcaatggcactatttaagaatccctttattgtatctcaaccaaatgtgacattattatattgagaattataagttttctagcacttcacgttatcttattgatcaaaatgttccccttactgaaatgcatttttcaaatggcacagagtagcaagacgttcaagatttgaaatagccatatacctgcggaataatgtttttctccatgacatctttgaaaagaggaggcggtggcaaatctagaccgagcatcagaaaagacatcctggagatttctttgttttcattgccttgaaactctttcacaacctccaactcaccctataatggttagaaggttacatgaagatgcagctttttgtaagcaattatatcaaactgcatttaggttgacatgtcaaaggactgacacatacctggaagcacttgtggatgatactgctggcgtcctttgaagttctaagatccatgtgcaaagtgttgaggagccacgacataaactctactggatctgattgttggccaatccgaaagcgtttcttgctggctttcatgacagcttgcaagaactcatgtggactcacctgttgatgcaaggtaacttaaattagtgaggtcttcaataggtgagagcataacaaaaactaaaaaagtaagaggcaaaattgagtcagacctgtcctttaaagtttcgagcatgccaaatcttgcgagttagttccccaaaacagtgaacaagaggagacttgcagtgctgataattttcaggaatgtggaagaaattccttaaaggagtaactctcatcaacgactggattgtaacattcacaaactctgtcttttgtatgttgttcaaccccacctacatatttacaagctaaaccgttaggagacaaattaatttaaagatcaagtgtaatcaaagagaaaggattaccattcctggaagatagtcggagccatcaagagccctagaccactgcctattcttgtcaagctcgtttacttgtgctctactaaacctgtaaatggatagcaccgaagccttcataaaaaggaactgaaaaatcaaagaaaaattgagaaaacatgaaagaagagtaatatgaaaaaatataaatagatggtagatgatatagagaactagcaagaagaaactgattgagattatagtcaaagcaattttgttgtttttaactacgtgcaaaggctcacatgttcacaaatcaatacccaaaatgcagtaagaactatgatgtagttagtcacaagatctaatataccttgggtttaaaacatggcgaatgtcatccaaagaagggtcattgatctcgtaactatcaggaagacaataaaccttctctgtcagaagattgatgtaaacgtggtgtcctgcttctaagctatgcgtataagcatgagacttctggcttcttccttggaagtactttccacaaacaaggcatgcatatacattcagattggacaaggacacagagcaaaacctctcaaaatgaaaatccaacacctgaaattcaaccataagatatgagtttaaacgctaatctgatagatatggactcaacggatactaagaacaagagtaaaaacagagtaaactaattctattgcgccgtttttgacggagaacaagatgagaagagaattaataactttaatgttataagttttgatgattgtttttggtaaggttgccctaaagaggcaaagacctttaaatacaactcgaaatagacaaaatgctgagtttaataaaagatagagagatggtgaaagactctagatgaacaagagtctttctatgccttcttctttccttcgtctcttagccacttttcttcaagacctttttcaaatacttctccatagctttagcttttctcccgccagttctcattctctttctcatagtagctagtggaacccttagcctatcaatgctccctcgcagaagaccgatcttgtcctcaagatcgaagctcgggaattgcttcactagagtcactaatggctcccacgttgcctccaaagctgacatgccactccattgaaccaagacgtcggcaccgtctgttgttctactctgtctgatatccagaagcttttctggctccgtcgcccactctaaagaaggagtcacaatcttgggcagttcttgagcagtgaaagagggaggaaccgctggtttcagctgggacacatggaacaccggatgaatttgactgtaatccggtagcctgagtttgtatgcgaccttaccaatcttgctaatcacctggtagggtccatagtatcgctgcgagagcttctcgttttttctgtgtaccaacgacccttgtcgatacggcctcagttttaagtagaccaaatcgccctccttgaactcaacatctctcctgtgtttgtccgcgactttcttcatttgtttctgagctagctccaagttttctctcagctctagcaacaacccatctctgtccttgagtaattcttcgacgactgcatttgctgtaggtgtgtccccatatctgagaattgctgggggctctcttccataaaccgccatgaatggggtcgtctttgttgcagtgtgataagaggtgttataccagtactcggcccaaggtagccattgcatccaagaagagggtcgtcggcctgcaaagcatctcaaaaatgactccaagcacctattaacaacttctgtctgcccatccgtttgggggtggtaggcagtactctttctcaattcagtgccgtgtatcttgaataattcagaccagaaggtgctgaggaagaccttgtctctatcagacaccattgtagttggaaacccatgcaacttaacaacatctcttataaaggcctctgctaccacctttgcagtaaacgggtgcttcaacggaataaagtgactgtatttgcttagcctatccacgaccaccaagatgcagttgaatcctttcgaagacggtaatccttgtacaaaatccaagctaatatcgctccaaatctgttgtggaatggggaatggggagagcaaacccgcgggtgacaaggtggagtacttgttctcttgacagatttggcatcctcgaatgtattccactgtatcttttcgcatgcccttccaatagacctcactagtgagtctcttgaaagtcttcaacgctccttcgtggccacccattgcactagtgtgaaacttctctagtagctttggaatgaagggagatcctgtagggataaccaaggctcccttcctgtaaaccaacccagctttcactgaaaattcagattctgtactctgcccttgttgccaagtatcaaccaactgacgcaactctttatcagccatgatttcttcttttaaagcgccaatatctattgtttgtggagccgttaaggtgaactgagcaaacctttcctgcggtggtttcctagagagagcatcggccactttgttgtcgactccaggtttgtattctatgcgatacttcaacccacttagcttagaagcccaacgttgttgaatagttgatacagacttttgttccaagagatgccttagacttctctgatctgtcttaataacaaactccttgctggacagataatgtttccacttagtcattgctctcacaatcgccaacaattctctttcatacacagatttaatccgaccttgacttgaaaatgcctggctcaagaacgctataggccttctgttttgggacaacacagcccctattccaaccccagaagcgtccgtctccactgtaaactcttgattaaagtcaggtaagaccaatactggcagattcgtgactgcttccttcagtgcctgaaacgcttttgtggctgcctcattccattggaacccgctcttcttaagctgatccgttagtggccttgctatctgcccgtagttcttgacaaaccgacgatagtagcctgtaaggcctagaaatccacgcaactctgtgactgatttaggcaatggccaacacaacattgcctccaccttttcaggatcagcagagacaccttcagctgagattatatggcctaagtatgcgatctgtgtactgccaaaagagcatttcttcaagtttgcgtagagtcggtggagtttaagcagttgcagaactatctctaaatgtttcaggtgagactccatatccgggctatagacaagaatgtcgtcgaagaaaactaacacgaacttccttaagtatggcctaaagaggtcattcataacactatgaaaggtagagggggcattggttaatccaaagggcattaccaagaattcataatgcccttgatgagtcttgaaagctgttttctccacgtcactcatcttcattctgatttggtgatatccagatttcaaatccaatttggagaaaactgtggctccctttagctcatctagaagctcttctattaccggaattgggtatctgtctggtatggttgcttcattcagcgccctgtaatctacgcaaaacgtccagcccccatccttcttcttaaccaacaacactggacttgaaaaagggctgacactaggtctgatcacttgacttctcagcatctcagtgacaagcttctcaatctcatccttttggtcaaaggaatacctgtatggcctgagattaaccggagaggtaccttcctttaacgtgattgcgtgttccttgttacgtgtaggaggcaaggcctgtggcatctgaaatacatgttgatagtggtccaagatttgttgaatcataggagtgatggaagtctgttcctcttgcgcttggttatcaaacagggaagctagctcaagaagataagcaactcctgtatacttcaccactcgtttcatggctctcatcgaaacctgatgagtactcaaatccggatctccatacagcgaaacccatgttctgcctatctgccagctgagcctcaactatccccaattggctcttgtttctcccaactttgctaaccaagagaacccaagtactacatctaactcccccaaatcaaacaagtagaaatcttctctgaattcgatgccctggacctctagtctgacatccacacatttgccactacttctaattatcctgccacctcccgctcgcacaccaaaactacgggtaggagtgattatccagtctctagctctcaccaaatcttcgctaatgaagttacaagtggcgcgagaatcaataagtatcactactttagttctgcctatgtagcctctcattctcatggagtgttctttttcttttttcagtcaggcaacctaatgacattacctgaaaaccttcttcaggttcacctttttcttctgttaatggctcattgagctcttcaatgaggggactttcctcttgttcctcttctgtaacctctaggctcttgagtctttgctgcttgcagcgatgccctgtaaaccatcggtcaccacaatgacgacatgggttactattgcctccagaagtaccgctacccgaagctttgtttgtgtctttagtaggcacaaaagatggtctagattgtgctctttcaaacggccttgccactgcagtggttgggttaggaggcaaggtgactcgcggttgagtcctcacctggtagctcgggttgttaccctcctgtgcctcaatgagtcttgcgatctccacaatatcggtgaggtttacaggtctgcaacggacaacttggtccttgaggcttctcctcaacccattcaagaaggcagattccaagatatcagctgtcacatgaggtaagtctaccacaagctcttcaaatctttcacgatactcatcgacactccctgtctgccttatgttcaataggtgatcaatagccgaactgcctctacttggtctgaaacgcactctgaatttctcctgaaaatctctccaagtatagatctgttctcgctcctttgagcatctccaccaagtcactgctgctcctgtcaaacaagatatggccttttctaacttgtcctcctctagggtctgattggaaaggaaacactgctccaaacgaaagagccaatcttctgcgttaccaccctcataagcaggcaactccaccgtcctttgtggtgtctctgttcgaagacgtggtgaaggacactgctgttgtaacggaggtgtctggaagggaacaggttactggaactgtagtccggtctgcaagcctggttgatgttgaaacgggggtgttgagaaggccggtggttccgaagaagacgcctgaaagcggagaggctccgaaggagaagcctgaaatcgcggttggtctaagggtggaggacgaaaacgagtttcgcgcagccggaggtgtgtctctgggttttgacccacacacataaagtcgcggttttgaatgtcgtgacttggagtttgagaagcaggaaactgtactcccggaacaggggatgaaaaacccatcggagtgttgtggccttcacgaggaacgccgaagatctggtttcggaggatctgggtgactgcgtcacgcagatagagcatctctttctcagcagctgtcattcgcgtcgccaaggaagtcaccgaaggaggttctggcaacggcggagctatcgcgtcactgagttcggccgactctggtagagaatcgtttgcggcggcttggtttaccggaggagccatcgcactcatcaaaatgaaagcaccaatgatagatatggactcaacggatactaagaacaagagtaaaaacagagtaaactaattctattgcgccgtttttgacggagaacaagatgagaagagaattaataactttaatgttataagttttgatgattgtttttggtaaggttgccctaaagaggcaaagacctttaaatacaactcgaaatagacaaaacgctgagtttaataaaagatagagagatggtgaaagactctagatgaacaagagtctttctatgccttcttctttccttcgtctcttagccacttttcttcaagacctttttcaaatacttctccatagctttagcttttcttccgccagttctcattctctttctcatagtagctagtggaacccttagcctatcataatcccaaaccagtaacataatgaacctagcagaagcttaaagatccaccaacgattagattacaagtaccaaacataagaaattggtcaatgatgattacctgacgattaacagtgtcaagataaggacaatcacgacgaacttcaacatggcgtgaatgctttcctctccccttggaagcatcatcatcatcatcttcttcgtcatcgacctcttcttgagcttctccgttcactttgttaccatttccctctcctttcgcaactccattacgacgagcttgcgatttcttcagctcgttcccctcttcctcatcatcatcatcgtacgcattagccaacggcagaagatgattgttgaaacccagtggtggaggtggcgaatcagaccgttcaatcactctcttcctatgacaccgttaaatgaaccaaaaacctctgcaaaacctccggcttgtaaaggatgagggatgtcggagacgttctcaggcgagtctagctccaccgtacgtagaaaacgaggtcctcggagtaagatcatgagatgttctcccgtttcgagtctgcgacggagatgagatgagacgaactcgggactgtcgatcaaagagaagcaaggctttgagaggacgcgacactttttgagcgtagttgctctaagacggagaaacatttcgttgatgagatccgtcggacattccgccatttctgttttccggaagaaaattgacagagagaggaattagggtttcagaggatttgagagatgaattttcgactccagctcttgagtgttgagacatgagaagtctttagctgtaaatttttatttataaaattaattgggttaacttgttgtagatttaatattttttgttggattatattagaatatatatttgatgggggtcaataaaattttgggaaaggggtcaatttgtaaaaattaacaaaacctaaactaattttctaaaatccatggggtcaattgaccccatgattatacactccctccacccagtggcggacctattaagaagagaggtggttcagttgactcaggttaaatatacaaataacttttaatgcatatgaggtgtttgaagagatactagttcagttggtcaaattcttgataacttggtttcgagcctactcagtgacactttttttagtaattttagtaattttatatgttttaaaaaatcattgaccaggtaaaaaacaattctgggtccgccactgcctccaccactgcttgatgatgtccatcagctggttgttggaatctgcatcttcatgatttggtttagtctgtaatttatatgatttgtagaggtcttgacttacttttggtttagctccggttatatccgattctcgtgatccaatacactttgaattaattaaataggatcacaaacaaaaaaaacctttatagttttagtatattgacaaatgtacctattaaatctttcattattttaattagatttaatatatacaagttgtgatattgtgccacttcatatttgattgtctctttcttcatacaatttcagattttcttcttctatcttttccttaaacatcatttttgtttctaatcattctttcatattaatttttttttcttaaactgataagatttgacagaaaatctacagggtaatttaataatttaatttagtacaataatagttaaaacaattaatactaaggtagtttgtaatatatatgtcgcaattcatgaattcaagtttggcttttaattttcacaagattttatctctaaaactagtgaaaactattatgagaagtaaataaatatagatattatatttttgaaaagccacttttgataaatttgttttacgtctctgttcaatatatatatgtttgtatctctcgttacactctccataacccaatttccaatggaaaaaccaaacaacaccatcacagatgttttagaggggatagtgacggagatactagtgaggttaccattgagaagcatctccagattcaaatcagtgagtcaaacatggaaatcggcaatagaatctgtgtatttccgacgtctctttgtgtctctgcaccaaaacacctcttcaagttggtcactactgctccgaaaagaagaattcatagacttccatggatgcgggacatggggtctcccaaagtcgttaggttcttatattcaatgtatggaactagacggtaaattcgaatatatgtggttttccggttccaatggattgattttgatgcatagaaagttgggtacttggaaaaattatgtgggtaatccagtattacaacagtgggttgaaatccctgcctgtccaggttcatatactttcttttgtggtgtggtgacgggtgttgacgaggtgggtgttgttttgagcttcaaagtggttaagagtggtaatatgtttcttaataaaggtgaaatgtatatgcctttatatgtgtattcgtctgagacaggcttttggattcacaaagaagttgtatgccctgttcgcttacccaacttctatgaccctattagtttgaatgggacgctttatttttcgcaacggggggattcttataatcgtaggccaggacttatggttctcgatttctatggtaaacccaaagattgtcactttataccgctccccgatcatgctttgaatcgcaacaaaacatgtttggctacatccagcggttttgtcatgtatatcaaaacattagctcaaccgggaggtaatcttttgaaggtttggaggttgattgatgattcagcttggcaacttatgtgggaagtcagcatcccatttattggatgttatgcacccatgtcaatgcatccgtttgatcgcaatattgtctatttatggagccatgataactgttatttaatgtcatttaacttgcagacacaaaactacaaaatcttcggagatgagtcaaaacatcatgattgctatatcaaccatcgtacttgtgagaaacatatgtataagatttctagaccatactcggtttcagagtatgaaggtcctatcatcttacaacaatgggtgctctcaaggtggatgcaatcagtgcctcgtcctcccgaagttgagatgatagatacaacttcactactttctcttgtagtaaagaatgaagaataaagatgaagaaaaatagtaattagaattgtaaaagtaaaaattatatcttaatatctatagtaattctttatttttgttttctatagcatggaatggattcatgattttttttggtttcttaatacttttagacttccttgaatcatccaacattttgcattctgatcttggcccaagcctgattttgtatcgttgcatttgttatattgtatcgcacatttttaaattgaatattagctttctgacgccaaatatcacaaaagatgggccatctcttggaagaccttgaataaacaactttaaaataaacgtcgtgaggaaccgatattatctcttggaagccttgaataaactgacacttgatcttttatagctgtcacatagagattctctattctcatattgatgtaactctctcggttctcaaaggtaactgccatatatgcacattcttcgcataattatctcaatttctcttccaagtacgtcctcatagtctacactaaaagtcagaccaaggtcagcttcatcgaattctgctcgactcaattttaatacgttcaaacaacgtaactgttgtaatctctctcatccgtgtgtttgatgtcgtctaaggaaacactttttccgactcatagcaatgcatacgattgatcacaatattgtctatatatgaagtcaaaagtaacaaagatgagaaaatttttgaaaccataaaaaatgcgagatctaatcattgatcaacttgaactaattttgtacttgaatttcatatatttaagagacaactggatatttgactttaacaaaaaattttagtcgatgttccatttcagaaaagatatatgaatatgttagcagaatttctgaaagtgagatagtaactccataaatatattctttgttaattaataatataaaggatatgtggaggttttctggaataatggagtattagttaacaagaacaccttcgtcaaaatgttagcaaaaaagtttcggtataggaatatgttagcaaaaaaaagtttaagtgaaatagtatatttttatttcattataagatgcattcctagttcaaagtattacctaaaacatcatttattaaatagatattattaattttagaaatagatatctatcaccacatattggaacactttggttatttgatatgttaaaaataatcaatttttttttgtcatctttaaaaataatcaattagttaattaatatattagacatgtatcgagattttatggaatagtggcgtattagttaataaagtgagcacttttcggaaatatttgacacataaataaagtaatataaccattaatgtgtccacattttatccaaggctttcttatactcccactatattccatttttttttcttttaacatctactccttatattccatattattagatattttagaaattctcacttgttacattttatttgattttctaaaacattatgaataatttatatttgtttactctgttatgatcatttatattctacaatttatttttattgggtagttttttaaaataaatgctaaataatatattttatgttagaaaaataaaattccttatttttaaatagaaaatcttataaaatggaatagaatagtaaatgtttagtttttgtagtttatagttaactagtgtgtgtagttcaaggttctcaaaagcttctcataatgacacatcataccatttttgtgaaccattatctttttcttgtgagtaatattttttgatattttctcttcgtctcattcttatattatatcgagaatctcagtatctttaaaatattgatacatagctacgattccgaactaaaaaaaatgtttaatttcgaattggattggaaccgaaatcacatagccggtcggtttttataaattcgattatattttctttcgtattcggttatctcgggtttagttcggttatattggtccaatttgagttagttgattgtaatttcttcaacggatcgatgaagctcaaagaggaagtagagagaaacttacttatcaatggttggtgctctacatggcgatcagagattgggtttagattcctctcttcttcgtgatggttcttattggaattatccgttacttcgtctctaagctcaagcgatattctccgacaccaaagaaaggtgagtcgtttctctccttattggtcgccacctatatgtgtatagattgtttgtcgaattcatataaaattttcggagtctaaaatacttttgctatttgatcttggtccaagcctgatttttatatcattgcatttgaggaatgtcctgagaggacaagatccttgtcttgtgcaagaagccattgattgaatagaagctatttaaagcgttttgtacaattgcatttgcaaattgtcaagaactcaagtatgaagactggataaaaacctgctcctactttatttgtgtggactcatatatccatatgaaatgttagtcttcttttcctcatattacattttatttaaagtatttctattttgcaggcttgtgagacgctcaagttgtggtccaaggcatcatggagatgtgttgaattacattcttagatgtttctaaatcaatctagttcaccggtcagaagatgccattatagattttgtgggcaaagcatgtaataggtgtgcatgctaatatactccacaaatgtagcaattgtaagaccagacaaactacgatgcagattcaagagaattggttttcagcagagcatatatatgattagaaggttaccaggtcatgtggcaattgtaaaacagtggattaaggtactaggacctacctactgtaagtgaagttttgtttttcaaagtcctttgatttgagtgtgatctatacatgtgaaaactcggatttatctaacccttgtaaactgttgataacacataaggattctttgcatattcttagcattgaccggtttgggaaagctttgttggaagcatggttgtaagagaggtcagattcttctatagagggtggttgcagccagtgtgagtcactagctaatgaactttgcgctcatgaatctaaaagacagcaacaccatgaagaggtcaacgaaagtaccttttgtccagctcaagcaaatgctgataggttatagaagattgagtgcaaaccactatcattgatgttttgtttctaggcttgtagccacgactcgagaagagtgtaccttgccacatttgattggggctgccccggtctgttattgtgtaccaactggcattgatgctcttcgtccatctttcttcttcttgttagtttggttagagcatcgtatttcttaataacaattttgagggatatatattgtcaaaagtttttaggagtttggggcttcaaatcagagatcttatgacaacacaagaaatatcatcttatttatttatatatatatatatatatatatatatatatataacaatctttgtgtgtttctgagtttatttatttatgtgttaatcataaaactgcagagatagcaatttatttacataatgtcaaacataatgtcaaacataatgtcaaacataacaaaagaacaaaagaacaaagcgcaaaagtgagacatgaacatgtctaatgtactaaaaactaacacttgtctacactatatgaaaactagatgtgtgtttcttatatcctttctacacttgtcagtgatgatatgtaagaattaatatcactaaatgtacctctaaagtcgaccaaaactagaactcacatctttatcaacaacatagagaaccttacgttttttggtttcataggtaggtacaatggtaagtcagtcgcaaggagcaagtgctttattttgggagagaatttacagcagccttggttgtcttgcagatggtaagtgtatcagacaaatctttgaaatcgtcccttgacaagtacacaccgtagtccaaaagtctagtaatctgagcctttcttcattgtccatttcatctaccgtttgccaaaatcagatgataacgtcatcgttcttatcaaatccatcatagaatgtatgcgctctccactagtctggacatatattttctcataaaatcaaacgactctacactctttggtttcgatacacttttagtacaatcatcttcttcattaggacacgaaggaattgtcattctagttgatcgtatgcttactcatatctgtttttattgccataaacttctttttgcatgtcatggctaatatgtgaacattagtacaatcatttaagttctttttttcctacactgataaccaatttattagtctttagccaaattaaataaaatataataactaattttgaaacatgtaatgactgaaaatgcaaagaaagaagacaaagatggtatacaataatagccttttaacaatttggaattttgatgataagaatgtttggatttctatatgggaactgtgctggcctagcagacataaatatagttaagatatttttcaaaataaaaaaataaaatgaagatccttatttcgaaagtaaatgtaataaagaaatttattttaatttgattttaatttaattttaactatcaaatttttataagacgaagaaaaaattgagaaattagcatttgtccctgtgctaggtttgaaaacatttttaaaatctggatccgacgtttaaaattctgattttttttatttatagatatgaaatatttaactcatttaagttctacttctagcaaagaaaaaaaaaaaaaagtttctacttctagcgaatcagttcacttgaaaatgccaaattgagttcacgggaccatgcacatgtatgtatatagtttacgtgacaattaaaaaaaacaaattaaactatattgatgtgaatgatttactatataactaccacattcacatcaattcaaatctgaattactacaaaacaattgattaactagggattatctgctaacaagaaagaattataacaagctaatgacagttcatcgcaagaatgatgtaaaatttcactgtactagtgcatgatgtaaaatgatagtatgatatttctgttgggtaatgggtctatcagttagaaagcagaaacaaaatgttttggagatcagaattgagagagtacgttcattttgagacaaactccaaacttggaaatccaaattaaggtcctgtttgtttgtccatttggatgaaccatctcaatgaaaatgaaaattgttgtttgtttttcatgttttaatagatcatttgaatgattcagttgaatgcttttatctaaactcatccaaaaaataaaaaaaatctgactgagtttgatttgttcattctgctgaagctgatttagccaaaattataaaatgtcaataataccctaatctaatatatggaattacacccaaaaaccacatctcttcttcaccctctcctcgacacaaaacactcaaaattgagattcatagccgtcaatgatgctgattcttcgccggtgatctcgccgtcgccgattcttcactggagactcgtcggatccatcgccggagtgtagcaggtttgtgtttctctctctctctctctccctctcttgcttcctctctctcgctccatgtctctctcgttgtttctctttgtatccttgttgcaatcacttgttcttgggtttgatccaccatggttacattgtttaattgtgggtttgctttactttgctttgtgttgcttttgattcttcgattagctttagtttacggcttgtgttccttatattgctttgtgttgctttgcttgctttgtgttgcttttgagtcttcgatttgctcttaagaggctttgttgtctctacattaggagcaacagaaccatttggtgctgcgactttagcatctgcactttagccctctttagattgaccatccatagttacaaacctcagctgcctccttgacgtgttcaattgcatccaaagtggaattgtttttgtgtttataggtcttttgtatttttgatgcagaaagctaggatccagattgtgttatctgatttgttttgagatacaatgattgatgatgttgtgactcgtgtatagctcattgatgaaaaactttgcattagtctctatttagtctcgaagaacaagtttggctctgagttttgttgattgatgatgttgtgactcgtgtatagcttataactgcttatttataagggagaatttcatcttataaaagattttttctcttcagtccttgtttcagcaagttttgtctccaagtaagaaagctttggtttctcaggtatgtcctctataaatatattgctttcgatattcaatagtattaattagtggttgcatttggctttctgtagtagtagcatgagttcgtctaaggtttgagttcaaatactgtagaaatagtcaagaataatatctcatgattgttcaatatcaaatagtttttctttgctttgctttgttatctctgatctttgtacacgttttatttgctttgctttgttatcataagttgtgtattgtttgctttgttatctctgatctttgttttatttgtttggtatctttgatcttgttctaacacaactacaaaacgtttgttttcattgtgtgctacagatgacaactatcaatggtaccgatgtgagtatattctcctctaaacttagatttactataacattttctgtaatttagactgattttgtacaaaaacacatgatcaactaagaatcttgtgtggaatgatgagcaaactcgtttctaccttgaactaagaattgaggagaagcttaaaggaaatattaggaatcagaatgtcaatgatgttgggagacagactattatagatagattttatgaggtttatggggaaagacatacatggagaaaatttggggtcaagtttactacttgtaagaagcagtatgaaggttttaagaagctgactcacaacagaaccggtcttggttactatccaaatgggagcataagaatgtctgatgattggtggaatgaacggtgtaaggtatatagattcttaaacttcttctgtcctttgtttgttctagatcaagttctcattgtttgtttattctcattgtttgttaggaattgcgtggagctcggaaatttaaagataagccagtggcaaatgtggatttgatggaaaaggtatttggtacagtgcatatcagtggagccgagggctgggctcctaaacaaggtgaagagaaattagactcaatgcatcaagatgatgatggtgattcaacgcagatccctataactcaagatgatgatggtgaatcaaggcagatccctctaaatctagatgatgatgaagcaacgcatatccttcctactcagagcaatgttggcaatggtccctcatattcaagtaagtcaaagagtagtaagaaaagatcaaggtctgtacaagatgaacaaggtgtagcagaggtgattaaggatagtatcaagtcacgggataaaattctttcccacaagaaccaactaatagagatgcaccctaagtttagttgctgtcagcttcgagccatgcagattctacactcgctgcctgctataagggtgtggtctcccttatacaaagcagcaattcaacatcttaagaaagatatcaccaatcgtcagacattcttgttttatgaagatgatgagaacaaggttctctacttggagtttgaaactggtgtaagcaggaatgcatgagaaagaagacagtgtcttgcattgttgttcttaagaattcttgtatttcaatggtttttatgaactctattgtctgttatcatcttgtgtatgagaaacaagttttttttagagtgagaataaaattggctgctttctattatcttgtgtatgagaaacaagttttttatcttgtatatgttctgttgctcaggtctgcttaggtcagaggagtgtgaggtgaaaacaagattcttgtcggtattgtaagtttatcatttccttgttatgcttctgattgtatcattttagtatatcatctgatttgagttttttatttgtttcaggctgatttagattcttcaaagcaatcaacttcacagtcagttgtgcttcaagaggtacatttctgagatctatagcttgtacatttctgattaatggaatctataagctttatcacagatttctacttcgtgtttggttttggttgtcactgtattttagtttcagattgattaatggaatctataagctttatttgcttgagaaattagtactatagaatgtttctttaatgctgtttaatagaggaggtcctccgacaaacagcagagaattgtttaatcgtagacattctagtttgagatctgtaatcgaaagaacatttggtgtgtggaaagctaaatggagaatacttgataggaagcacccaaagtatgaagtgaagaagtggattaagattgtgacatcaacgatggctttacataattatatacgagattcacaacaagaagatagtgattttaggcattgggaaatagttgaatcatatgagcaacatggtgatgaaaatgatgcgcatgttccatatgtgcctactggtgacagagtaatggagaatatacgagattccatcactacagagatggccaaaggaacaagactcccatattaacaggttccatctctctgtcttatgctattgactgtctctgtcttatgctattgtctgtctctgtcttggttttaaattttgtgactagtagtgacagctgaatggtcacgtcactacataagttggttgattacacacgttttaaattttgtgactagtagtgacagctgacaagtaattcgttgaacatagtgttcattagtttggattagacttgattcaattgaatagcttgacataatgacagctgagtggtctatgtttctggttttagctcattgttgaatagtctctctctcaatctagttgttgtattcttgagcagctgcaattctagtgtctcttgatgttgtttgctttagtgttgtggtttggtaatatgcataagaccatactttggtttctgattctagtttgtgtcacgattgaatcacttttgagaatgtgtcatggttgaatcgttaggtaagtactagccaatatgcatgcttgctcttattggagaattggtgatgattcaggttattgcttttattgctcttctttacaggtttagtaatctgaaatgcgtttacaggtttacaggtagaatctagatgcgtttacaaccatttactgtgtcttctttatcattgatattgtagcatcattgtgaatgttgcaacacccgtgcaggttgagaagtctcccataaatgctgagtactcattcgggctagggaactgcagagcataagaaggaacttagaaaatggaaacagagaactctctttttaagactctactttgattatttgttacttaacagagggcatttttgtcatttatatatatatgagaatgtgattgattcatccaaatgatcaaacaaataaagcttcatctaaataatgcatttagatgaattagcaaaagattagcaaatgataaaaaaaacatcattaagatgaatcattcaaatggattatttggatgcaaattccaaatgatcaaacaaacagggcctaaatcgttgataataatatttatctcgtaataaattttgcccaagtttatgtttcttaatttcacatgtacgtattactattaggtagtaattcttcttattacggaataattcttcttatattttcattaaatccgagagtgtgcaacaacaatacatatatactcacgggccaaacatatgaattaatttgttattcatttttttattattaaaagatgaattaattatcttatcttataatactaaatcgaggaaagttctaaatttataatagactgataactaaataaaagttatgttgagaaaaaaaaaacaaatcatcgatattttattcaataggagaaatgaacaaattatttgcgatacaacaaaaagtaaacaacacaaacccattgatgttcttcatgaaattgaccaattcaattaaacgagcacaaaagaaaacgtataaggataaaacattcaagatttttcatggtacgtaacttatatatcaacgtattgattttaagggaattggaagtcacgtgatgcctctctgttgcaaatattgagaagcaagctgaggttgatgggaagggtaaggttgatgccaagaacactagccttgagagcagtgcaaagacaaatcgcagcttcaagatctaccaaaccctcgataaggctgcaacatggagtcacaggaggagttccgggggtcaaaccgtttaacaagttgagtgcgttaacacaaacaccgacctttaaggcatctttaggacaagtcccggtagtgggtgttgggctaggtttttgtttgttgtgttttcctggtggaggaggacaattggtactgcgagtggcagtagtgagagtgaagaaaaggatgttgaagagaaggaggagcgcaagagagtctttaagagccattgatttttgagggaacacaaacaaagccctaaagaaactctttaaagttgagaagatcgtagagagttgtggtggagaaaagtaacacgagtgttaagggaatatagcttgggtagaaaattagatgatatatattaatatgcaagctaaatgattcgattaataatagtggcttttctaaatatttacttggaccgaccacgttctagtcctagggaatttagctggcgataggcatatgtttggaactaagtatatagttgttatactaaaattgagtttttttgttaattgtatttaactggtaattttatacatcttctttgtttgtattaaactattaaaaaatttattttgatcaaaaatctcatcggtataagaagatatatactcattcattttattcatatatttatacatttatgacttgttacaaacttccatctagtaagtacatagactgtattagtttatgatgtacaataattaatttcatttgcttatcatgagtcattgtcctatcggatttctgatttacggcggttcttgatgttgggttacggtctagtatagagcatgcaaaggttactcacatggtttatttgtaagataaggaaaattgatacaaaggtacaatataatttcattggtaatttattacattgttggaacccaaaaaaaatcacaaggctgtctttgtatatttaagactagagagaatgaggagaatgtgtgtggtgcaagaaaatggtcatcatgggcagctaaagccttgtggaatcctgcgaccacaaaccttaaagaagatgccaaaattgggagagagggaaaaacgtcttgctcctaccgacttacaaaaacaagtaactgcatcaagatcagacacattacgtacgatggaacaacatggctctgccctaccagtggttagaaggccgtcactaattgctagaattccggcacatatctttagttcggtatcattcttggagcatatgccaactagaggaggtgatagtggtggtgtaatagctggtggaggaggtggtgttgtttgtggcggaggcggttttaaagtttgtggaggaagtggtggtggtgagattgttggtgatggaccgggacagctaaagccttgtggaatcctacgaccacaaactttaaagaagatgccgaaattgggagagagggaaaaacgtggtgctcctaccgatttacaaaaacaagtaactgcatcaagatcagacacatttcggatgatggaacaacatggttctgctcttccagtggttagaagaccgtcactaattgctagaattccggcacatatctttagttcggtatcattcttggaacatattccaaccagaggaggtgatagtggtggtgtgattgctggtggaggaggtggcgtggtttgtggaggagacaacggtggcggtaagggttttggaggaagtgccggtggtgtggtcgctagtggaggtggtggtgtaatagctggtggaggaggtgatagtggaggtgtaatagctggtggaggtggtggtgtaatagctggtggaggaggtggtgtggtttgcggaggagacaacggtggcggtaagggttttggaggaagtgctggtggtgtggtcgctactggaggtggtgatgtgctctgtggtggaggcggtggttggtcattggctggcggtgctggttgaaatgttggtggagttggcggttggggatcgggttgcggcggaggtggtcccggattacaaatacaaatacaaggtggtggtggagggcagtaaacggaatggttatctgctctaacgatggtgagtaatggaatgatgctgaatgagaggaaaaggattatagtagttgaggccattcttgattgcatatttttttgtttggttttgcatttgcgaaatttggactatttatgaacgatggatttgaggatgaagttagagttatcaagttggtagcttcatagtaggagaacgtgttgacaaaaatgtttgcgtaaatcttgcgtttagattgaagcttggagttttggtttcaatagggtttggtttcgccgtgttgactatgatttatgatatttttatgaaatgaaaatgtcaatcatattttgtagtttactaatcagtccaagcacgcatggagagaatcattatctatattcgggttcacgtcatcacgtgttgtttcagaattcgaagatcttttgcattttgtgatcacgagaaggcaaatcttaagttgaaacaaagaagaactacgcaaatctgaaatctaagaataaaggtctttttaaattttaacactcatttcgtccgaccaaaaaaaaaaaaaagcatttaactcatttcgagttttaccgtgtaaccaaagcaattacgagtaccaattttcgcgcgttctaataatatgatccgttatttaaaccaatgaacaaagagcctcatattttttccagctctaatctcttggctttttgttccatgtgcatctcatctttgctcattcatcactctttgactctttaactctttgacttttgtagtcataaaattaactaaaatacaaaaaaataatataatttagatatttacatatattgccaaatttctaattatttatttccataatcacaaaatattaatggttgttccaatacgcacaaaatattaatggttgttccaatacgtaaaaagtatattaatttgattgataaattgactactaacaccatatattatagtatctaatacatacatattacatgatcatttttaaagtctaatgttaaactcttttttggcaattatttctgactaaattttgactactatttttttttttattgtgcaacatcaaaaatcgattcacaataaactcaaatatcatatagtacgaatggcactgtggcagtaaactggtcttattcgaatttcaatattgtcaaggagaagttcaagatactaatttgcttttcaaagtaattaggatcggataaaataatatgaacaattagggaaactttttcaaaaccaaaaatcaatcttttttggcgatatttatattagattgactaaaacaaacaaatgctgaagaacactatttacatatcacttatacaaataagttatattattattatgtaatcacttataaatgtgtttgcagagtttattaccgtgacttatggatcacatttggtagtttatatatgtatagttcttaggaaaaaataaatattatataaattatgggtcactgaataaaaataacgtgactaaaaaatatacattaaaatccataacaaagatgtacgataagtaaatcattatattttagaaaattaattttacaaataaaaaactaaactatgattatttactactattgctcttaattttgttcttctgcaaagagtcaatccattataaatacagaagtcaactttgcaagcttctccaaacgccgccaaattttgattgtgatcaacattgcaagcgtctttaatttgttttctttcttcttgtcaagcttgacaatagggaagagaggtaatttttataactataaatttgaccacaacatgcaacaaaccatatatcacagttcacagatgaaactgatttctgggaggggaaaagagcatggctcgatttcatcagcacccaaagcccatagcttgagagagggatttcgaaagcttgagctctaacttcccacaattgagtgaagctgtcgtcgattaaatagtgaagtgttgttaattaatagtacgttgtcttgctatcacgagatgtcaacgatagtatagtgtttttggggattaaaaaaatgttcgtacatataattaatttctttgctaaccctctttttctctagacgcgcgaggtttggatatcgttaagagtttatatatttgggtagctaaatgtagagggaccaaaaagttaacaaatagtttggtgattcattattaattacacattacataaatatattactcactttattagttagaagtaagagaaatcttaatcatataaatttggtgattttgtttttggtgaggatatatatttgtgcttaactaagcataaatttatcccaaaacactatcaacttaataaatacaaaccttaagggttgatctgttcctcagactctgccgtgtgttccgcttaatttgttttttttaaactaattttcaaggtgcacacggactaattgctacaaacttaagatttagtattaaacttttctaagacggattgagatagattttctttattgttttcaagtgtctaatcataaaacataaaaactaaggaaaagtaaaatcatacaagaacatgcacttgcgaatagctagcaattaacttaaagaaacaaaattattaaccaaccaactaacgaagtaaagaaaaaatatgtaaagtgagatattgaagcattttaattaagatcgacaagccgatgaagtgggagcgataggacgacgagttttgtttttcgttgattaacgtttgaattctgaaacaattacttgaaaagagtcttctattataattgctttatttaccaaagtcaccaaaagcttaaaaaaacataaacataaaataatgatgtagaagaaagctaaaaagtatatattaaattataacatatgtggtattttcatttgtaacgattacatatttttgtgttccatattttttgggacaatttcagacgtagaaatttccaatatatatggtttatctagtgtgcttagaaacaaaaataataaagacacaatgtaaaagttacacaaaatttattgatgtttggttacattattattggtggaaagtaaaaacgtcatatattagacttaagttgtcgtttaggtggcaagtaagttttagaaagggaacagggaaatgattatgggcaggtaaaacctctgggaatcctgcggccacaagccctacagaggatgatgatattgggagaaagagtggaacgtcgtgctctcaccaaatcacataagcaagcagctgcttccgcgtcagatagattgcgaatgagcgtacagcagggctgtgccagtctaaaatctaagaagttgccaaaaaatcttaggacattggaacatgtccttatttggttggcattcctgggacatgtgccacgtggaggaggtggtggttggaatctcggaggagggggtggtggttgggatttcggaggagggggtgatggtgagttgttcggtggagatgttggtgaagaaggcggcagtgttgttgttggtggaggcgacggtggtgtagttggaggacgcactggtggagtcacgggtggtgtgtttggtggaaccgttggtggagtttgtggtggtgtgtttggaggagtttccggtggtgtgtttggaggtgtctgtggaggtgtgtttggtggaagcgttggtggaatttgtggtggtgtgtttggtggaagcgttggtggagattgtggtggtgtgtttggaagagcttccggtggtgtgtttggtggaatcgttggtagagtctctggtggtgagtttggaggagtttgcggtggtgtctccggtggtgtgtttggtggaagcgttggtggaatctgtggtgattggtttggaggagttcccggtggtgtgtttggaagtgtctccggtggtgtgtttggaggcgtttccggtggagtgtctggaggactttgtgggggtgtgtttggtggagtttccggttgtgtggttggaggagtttccgggggtgtgtttggaggagtttctggtggtgtggttggaggtgtctttggtgtgtttggaggagttcccggtggtgtgtttggaggtgtttctggtggagtatttggaggactttgtgggggggtgtttggtggagtttctggtggtgtgattggaggagtttctggtggtgtggttggaggtgtctccggtggtgtgtttggaggagttcctggtggtgtgtttggaagtgtctctggtggtgtgtttggaggagttcccggtggtgtgtttggaggtgtttctggtggagtatttggaggactttgtgggggggtgtttggtggagtttctggtggtgtgattggaggagtttctggtggtgttgttggaggtgtctccggtggtgtgtttggaggagttcctggtggtgtgtttggaagtgtctccggtggtgtgtttggaggagttcccggtggtgtgtttggaggtgtttctggtggagtatttggaggactttgtgggggtgtgtttggtggaatttccggtggtgtggttggagaagtttccggtggtgtgtttggagaagtttctggtggtgtggttggaggtgtctccggtggtgtggttggaggtgtctccggtggtgtgtttggaggagttcccggtggtgtgtttggaggtatttccggtggagtgtttggaggactttctgggggcgtgtttggtggagtttctggtggtgttgttggaggtgtctccggtggcgtgtttggtggaagcgttggtggagtctgtggtggtgtgttaggaggtatttccggtggtatggtcggaggtgtctgtggtggtagggttggtggacctgttggtaaaacttccgtaggtggtgtggctggtggacccgtcggtggagtctccggtggtatggttggaggcagtgttggtggaatctgtggggtcacagttggtggaggcggtggcgatggttctggacaagtacatactggacatggtggcgggggaatgcgtggtggaggtgggcggagatagggacggttttgggcttgggtttggccgaggagaagaatgctgatcagtgtaaggaagagagctaaggtttttgttgaaccctttggggccattttgttcttaggcaatctttgtcctcacaaaagagaaactgtacggaaacttgtgaattgaggtgtagtggaactatgggtatttatatggccttttggagatttactagatatgtaaattgccatatgtttacgtacattgccaaacctattttcccagtcaagtctcagaggtagtttcccttcgattcacagctcaaaaagtttcggtgcttaggctgaagctagtctgtggttaggcgctacaatttttacttaaatatcactactatcattttataatattgtgataacatattagctgatttaatatttaggactatattagaacacaccgcatgttttaatttgcaacttacgttggttgatatgtatcagagtcaataattacagttgttatctaaagtgacaatgtcgagttgaactagcattcccatgaattaacaggcttattttggactaaataatttgtttattggttcttcatttaaccaataaaaaaaacataaaaaaaaaaatcaaattttgataaccctttttgattttatgttaacaaatcagtttggtctattcgatgacttattgtggtctgatttgtagaaaatctttagccaagttacgttcattccagaaaatttgttcggttactgttagttttgttttgtaacgttcaattttatacaatatttgtgatcgattaagtaatctgttggtttggttgcttgagtaaatgagtgggcatacttcattaatttcatcttccaaaactttcttcaaattaattggttttagggttaggcgtgagggcattctaagttaccttggccttcaagtctctaatagttaggctaaacatagtttgaccattttgttgttgtacttgttaggtacaagcaattaaattggaatccataaaactccacatattttttataatcgagtccactctgggtttatttttccatacttatttaaaagttcggctgagcttaagcatcattaattgtaggataagcatttgtttttcgggacaatagaaattatagacgttcatacgtcaatgtttttaaaaacatatcatcaaccgataccatttccttttactaattcaagataactaaaatgcgaaaatgatgtgtttcggacaactttctctactaaaaacacttggaatcacacgcgcacaatatctaacaaagttgattggtacaaaggggtctggttcgtacaagccacaccaaaatatgctttttgcatgtgagtagcagtccaaaatcggctctcaactgtagacataatgcttcaattggacatgggagtgaatgcaacgtgtgtcttgtacaaatatgagcgaccacattttcttctcatgtgattaagctaaagaagtttgggcatctctggcgaaaaacatatacaaatcgagttactccacagtctggcaaattaactatcctcaaccacgcatcaaatcactggcacaatcgcctcgaaggctttctcgctcgatacgtcctgcaagtctcggtttactctatttggagagagcaaaacgggggcaaacatgacaaagttccaaacccaccaaaccgcctcatcgattggattgatagacacatgcgaaaccaactttcggcaatctaaataagtggagatcagagttactacaagggactccaagcttggtttgaatcaagagtgataagctaaggaagatttttttttttttttaagattttttaagataaaccgtaaacgttatactagttgtactatgttacttataaatctaatttaatattacaataaataaaataaagaaaaatactaaatcttattaaattctataacatccagatcataatacttgaaatgaaaccagttgaaactgcattaacatatttaaaatcatcaccaccatcaaaatttgtatataaaagtgaaaatgtataaatttagcctttgatgtcattgatgaagttatcaccaccatcaacttcattgatgatttttttaccaaaaaaaaaaaaaaatcattgatgatgttttgtttcattagtattggaagaaagtaaaaaagtttgaagcgctttaagatattgtacttatatttacaagtgactttatcatctttggtaaaaaaactaccgatttcgattagatgaatataatacatgtacaagtaaaacgaccgcctgaagtcaagggtcttgtagcatgggtaaatgggtgggaaatgttccgtgaattagtcatatagatgtttaaggatatccgattgagacaatctaagttaccttggcaactacgtctctaaagttaggctctatattgaacatatatgtaattatcaactatctctagttagacgttatagagaacccttcaaaatgggccatataaattttgtggccacatgaaaacagttttaaatggtgatctttagctccattacaaattttttagctaatccatggctctttagcaacggatttgctacagaacaaaaaaaaaaaccatgacatcaagccaaaaaccaaaaacgtggtcatatggcatgggttataagagctacacacgtcaaatcgccatattttcatagagcctaagttaggcctggttaaaaaaacgtacttgttaagcttgtagggttttcaaataatcacaagattgaatatgcactgcaaatcggaccatgcactgaaaatagatatcattatctttcttcttttttttttttttggaccagatgcatttactttatgaaatgaatacttcttttattatttttggaaaatagaactaaacaccatgatgcctatagtggcttctgctggttttgagctagtggtcactggaccccgaaaaattgaagtaaaaccaagttttttatgaatgaattcagagtatggaatcacatacttctgaccatcactttacaagacaatgacgagtaacctcatataaacaataaatatgtataattaattaactatatatagattttggataacacttctatatattgatctttttattgggttattatttgtaaaaatgttttaattttgttattaagtaatagtttttgttagttttgatgatttttatgtcgaataaacctgtaaattaataaaataatacgttgtcgaaaatgtatatatgtttggatcatatttcgcaattttctttttcatttcaacatatcatatgggagacaggaagagacacaaagtgttatactttatttaatattattcttcatagacattaatagatatgcttaacaactttttagtaagcatcgatagtccttataattacgttctaatcaacaacgaaacacacaccaacactgtaaaacattaatagataaacccatacttttggtaccagcaaacttatagtgcaaggaaacaccggatagggctcttatttaggggaattaagtagtagttactgtggtggtggacactggaaaccgataggaaaaaccctattgcaagcaaaaaagatttctctaacggccacatcaataccgaaaaccaacggaatcggcctgaagataaagcagagacaatcggttacttgaacattagtgaggccattgagggcagtgcaacactgtcgtgctctggggtcgccagctgtaacattggctaggccaaggacgttggcacatacgcctagttgcaatgggtttctgggacatgagccaaagttgttggtcggtgtaggcgagcttaagaggtttgcttctgcgaggctgatgaggaggatgatgatgagggaaatggtggttgagctctttgaggccatttttttattttattttgtggatatgaaagtgtggatgctttcgatgatgttgtgtagtatgtatttatagagccaagagatgccttggaatcacaaacacttgtgtatcatttattttttttgcctaacattactcttttttaattaatgaggttttagagatttaggcaagttgttggttctctctcttatgtacaactttacgctcaaaatgtctagtttggcttccaaggagttttttcttttgttttcagatttgttttttctttctttcatatattcaagagttcaacacaaattataaccagtatatacggtttaaatctaaggtcatgaatgtatgcatttttttatgaattgaatggatgtaattttggtttttttaacacttgatatatgaaccaacttgaaattacatatttacagaagtagatatagaccatcaattgatatagatgttacaaggaacacaatacacacaataaacattaataaataatttttcacaagtgcgtcttcaatactaattttatttcccggatttcatgtcttctaaataattaaaatttatcttccacattcagcctccaataaaattctatgtcttcgtaatctaacgaaatgaaaacttctaaaatctccatccccgtctttgtatggaacaataacttgatgtgtcaattgaaattctatgttctacttatagaaaccgatgccatgcatgatctagttttagaaggaaaatctttgattactgagggttctttcattgtctaagaatgaatatacttgaggtttaccgaagcggggatcaaacagaatgcaatcattttgtttgagatttgaatttacgtatgtaagttcttcaattacttttttttccagtaatatttgtaaactccaacgtgattcaaaatctaaaataaagacaatcaacactcccgtacaaactttattttattttttattacattattggaacaaagtatatatttagaaacaaaagaaaatcacggttaagtgtatagtaagtaggttttttagtttattgtggggaaaggaggtggtcatgggcaagtgaagcctgggggaatgctacgaccacaagtcataaagaggttgatgatattacgaggaagactgcgacttggtgctctcactgattcacaaaggcaggcaagtgcgtcagcatcagaaagaccacgaatgagagaacaacatggttgcgccgttcctaatcctaggaaaccatcgaacatatttaggatagtgctacatatttgtagtgggataccattcctagggcatctaccactcgggggaggcggtggtggagtcctcggcggcggtggtactgaaggtgtccctgggggcgttggtggtgcacgtgggggagaaattggtggagttattggcggtgattgtggtggtgcacgtggaggagaagttggtggagttatgggaggagacatcggtggtctctttggaggagaatttgggggaactattggcggagataccggtggtgtttgtgggggagcggttggtggagcccttggaggagtaactggtggtgtccgtgaaggagaagttggtggggacacagggggtgtacgtgtaggaggcattggtggacttcttggcggaggagatagaggtgaaagcgggggagaagttggtggagttcttggtgggggcattggtggtgcacgaggaggagaactcggtggagttcttgggggagatattggtggtgcacgcggaggagaagttggtggagttcttggcggggatagaggtggtgcacgcggaggagaagttggtggagttatagggggagatagcggtggtgtacgtggaggagaagttggtggagttcttggcggggatagtggtggggcacgtggaggagctgtcggtgaaattcttggaggaggaactggtggtgctcgtggaggagaagttggtggagttcttggaggagaatttggtggagttcttggcggggatagtggtggtgcacgaggaggagaagtcggtggagtattaggaggaggaaccggtggtgcacgtggaggagaagttggtggagttcttggcggggatagtggtggtgcacggggaggagaagtcgatggagttcttggaggaggaattggtggtgcacgtggaggagaagttggtggagttcttggaggagatagtggtggtacacgcggaggagatttggtggagttcttggtggagaaagtggtggtgcacgcggaggagaatttgggggactctttggtggagaaaccggtggtgtttgtgggggagcggttggtggagtctttggaggaagaattggtggtatccgcggagaaactggtggcgtacgtggaggagctgttggtggagttcttggggtccttggtggaggaggtggtggagttcttggggttcgtggtggaggaggtggtggagttcttggggttcgtggtggaggaggtggtggagtttttggggttcgtggtggaggaggtgatggagttcttggggttcgtggtggaggtggtgttctagggcggggacggctattagattcagcgtggccaatgaggaggatggtgaatgcgaagaagagggctagggttgtttttgaacattttggattcattttgtccgaggttatatatatatgtccttaaagaaggactatattgtacggatactggtgaactgaaatgaagtgaggtttgtggataatttataggattttaagatgttcactacgatggttttgtaccacatgttccattgccaaacttctccattttaggcttaaaggtgggattcactctacgtaataagtaataaccttgatcgtcaagtcttttgattaatggcctcctaattctttcttcttcttttgattccatttacatgcctatattactttttgtattgtgtacacgtttgatagacgattttaagtttcatgatctagtagaataaagcataatggagaccaaagtcttaaaactgtcttttcataaaaccgtaagtgggcatgcaagaatatagcaatgcaattccttggttagcaatgcaagatatagattggtctggtatggtcaagaaaacctttggtgtcattttgtacattcatttgctgataaaatttacaattggagggaccatttaaaccgaagtagaccaaatattaaccatttgacattgaacgaaagtcttaaataggcaaattggttggttcaaccaaaaataccccaattctctgtctatatttttattttttagtgaataatatgattccattgattattttcatcggtattaactataaattaatttatttctggatattttactttaaatttacaccaaaaccctaataaagttttgggaaatggaaaaaataaaacaagaaagaagtatggcaaattggcaatcttaagttattagaaatgtttagttttcttttagaaatgttaagttagtagaaataatttaaaatattaaaataataatgtgtctttttctaggataagaaattccatatattcaactagtgatgcattaatgtgaaaaacaaattcaaacaccaaaatgcaatatgcaatctttatacgtgtacggtgaatcggtgatacaacgacatcatcaacacaaatcagtatattatgtattttgattgtattaatatcatattcttttaatatgagatgtcaactttataatagttacaccaaaaaaaaaaactttataatagagttttggggcttcacgaaatgtttattggcatgcatctctaaatttacttgccaaacattctcctgatctagaataactgaaatgcaacttagagggaccaaaagctacaattgtggctacgtatatcattaatatatgtttaggtctcaatgaatttacagaatttgtgaatggattagtctgtttctgataagagtttttagttgaatcatttttttcattaaccaataattctgtaaaactatatatataacactgcggccaaatttttgcagatacaattcaattaaacaaaaaaacaattctcacttattagagcatctgcattgcatatcaaagtgaaatgtctttagttagaataaaaatttaattgataaattgaaaaagtatgaaatccaataagaaggtaacatgtaggtagaatgtatctttaagagatgtctttgtgtcttcctgaagacattttcctcttctctcttttcacaagtgtctcaaatttatattaaaaaaatagtaaagacaaattaatatcaccaatggaggtgctcttacattcttcaaaattatttcattttccacatggttctgaacttgaaattgtgtcaattaactttttgttagactttatcaaaaaaaaaaaaagaaggtctttacgttatagtcgcaatattctacgtataccaaactaattaaagcttctaaacactataaatacaaagcttcacctccaaccctaatacaactcacactccttaatttactacaatcatcaaaagcttatttagcattttcacaatatggcttcaaagaacatgacaacaatcatggctctcttcctcaccttcaacctcgtcttcttgggcttcacctcagcccaacctgtgtgtcctcttaaccagtctgaattggggatttgcgtcaacgtacttggtctcatctccataaccaccagcaacgcggcccaatgttgttctatcttagctggtcttaataatgtttctcttgtgtctgtatgtgcatgcgaggccgtaagactcaatattcttaatcttctcggtatcaccgtcaacctcaatttgaggcttaatgggctccttggtctctgtcgtttgccggtacaacctggcttcaactgccttttataagtaaacaacatgcagaatctttatatgtattaggatcacttaaataagcaaacacgttccgtagtatcggttcatggtgcaactatgtggtttttaaagtaatcatgtctttatcttatgtttgaaataaataaaacttggatgttgtttcactacctcttcggctgttccagtactatgttcttcaagttttgctgaactaaatgcccaccacacaaaagaacaccaatataataacctagctcatagaccccttatgagttgacagttttttatatgattaagtccaacaaattgctaatatcccgacgaatgtaaacaaattactatcctgtctcatctactaagtgatggaatttcagagaaaataatgagctgaaaaagctagtctccgcgagaattacattgctgatgagagcagtgaaaaaggcatagacactcatgtccttttggggaagtaatgtagggaataaaccttttatgtcgtgcatgtgctttgtttcatattcggcaactaggatgcacgtatttgtttgttggtgtataatttagtacttttgcatgtagcttgagatgtcgaactcagttaaaatgagaaagagaatgaaaacatgtagatttcttagaaactactcgaacatgaagatgcattagaacataagtagagttagttgaaattattaaagtaaaactgaatttcatcaaaacaaacctagaaataaattttggttttcggtaaaaaaaaaaagaatataagatattctttagagtttaaaaatatgtcagtaatattttatcatatcaataacagtgttggttagagataatttgcatttcagaacgaacgaaccagaaacaaaacaaaagttgatctaaaaccaaaccaaaatttagctgaaccagatatattggctctataaggatcacccttaaccaaaaagaatgaacaactaatgcggattctagttcaaggaaccggatatattgataattttgtagacctaagcatatataaataatgatatacctagccacagttgtagcttttggtccctctacatacatgtggcccaagttgcagtttcagacattctagaggaaaaggttcggctagtaaatttaatgatgcgagcaaacatttcgtatcaatctgactcaattaacagaatgaatgaatttgtgattccgcatgtctttttttctgatcacaatttttattaattcatatttttcattaattaatcaatttcacaatcctgtataagtaaaaaataaatacgatctgtaaccaaatgttttttgagaatttttgagaaatatctcttttggtgtgcctcattttccacgatttcgctattctacgtttgaaccgtacttgcaattatgtcaattaactttttgttagaatttatcaaaaaaaaaaaaaatgactttacgttagagaacttataatagtcacaatattctacgtaaaccaactaaagcttctaaacagtataaatacaaaccctcacctccaagactaatataactcacacatctcaatctctccaactacaataatcatcaaattcttatttagcatttacacaatatggcttcaaagaatatgacaacaatcatggctctcttcctcaccttcaacctcgtcttcttgggtttcacctcagcccaacctgtgtgtcctcttaaccggtctgacttggggatttgcgtcaacgtacttggtctcatctccctcaccaccagcaacgtggcccgatgttgttctatcttagctggtcttaataatactcctcttgtgtctgtatgtgcatgcgaggctgtaagactcaatattcttaaccttctcggcatcaccgtcaacctcaatttgaggcttaatgggctccttggtctctgtcgtttgccggtacaacctggtttcaactgccttttataagtaaacaatatgcagaatcttatatgtaataagatcactaaaataagtatacaagttccgtaatatcggttcatggtgcaactatatgtgtttaaaaaaaaaagtaattatgtctttatgttatgtttgaaataaatgaatcttggattgtgtttcacatgctcggctgttctagctattactatctttttcatgtttgattgaaccaaatgcctaccacaaacaaacatcactgtaccagccgaacgtcgaaaattgctctacatgctagcatctaccaagtgtcataattaatgagctcaaaaagctagtcaccgagaattacattctctggagcaatgagagaagtggaaaaggcaaaaaatacatgtttccactaggttgtctctggagcaattttgattggtaatatcaattagaacatatacctcttcctagagattgcttcccacattaaatgtaagtaagaaactgaataatcccatgctaagagctttttttagcagatttacagcaatgagttcaacaaagattttaaagagatgaatgtaaattgtatcctttataaagtcctgattaggggtagtatcgtagggaataaatgttttaattcaacaaaactcattcgtcaacaaaaccctgagttatgaaaaaaaacaaaggaagaagaattgacgttggccagtgttaattgtttattttgttcaatcacaataagagtagacagttagcatctataacaatttttaactaatcagaattaaaaataataatactgagatgttcatccatatatattatagaaatttactaaattatcgactaaatgggactttggatatgactcatatgagtaaatttattcatattcaatagaactttggatatgaatatgagtaaatcactaattctattgcaaattttgatgaccgattaagtacgttatggaatgtggaatttgactttatttgggtagacgttttacattaatttcatcgccaaaccttttattcgtagacttggcaaattttcaaattacaccttggtcaccaaaactctattgtaagacatttgttaaattaatactaatagtgtgcgttcagcaagaataacaactttgatagagtttgtattgttttgggcattgacaaattgttccttgcctaacctcttctctagatgagtagataaggtttaaatatcttgagagttgattatatagtatcttcttcttctttttttacttttggctaaaatgcgaaattcaaattaattttccgaaaagttggcattattttttatttttgtaaactttcatccaaaagaaatatcaaacagtaatctaaccaaatgttctaacaactataaatacaaactctcacctcccaaactaaatactcaatactcctctcagaactaaacaaaagagagagagcataattaacattttcaaaacatggcttcaaagaacatgatgaaaaacgctatagctctcttcctcaccattaacctcgtcttccttgtcttcacaaaggcccaagctcctccacctcaagctccggtgtgtcccagagactcgacccaattcctatcttgtactaacgtgcttaacctcagcttaatcctcatcaacaatcaatcagtattgccatgttgcactctagtgactgggcttgacgctgctacggcatctgcctgcatctgcaatgccgttagaatcacaatctttaatttcttgactatcaatgtgagagttaaccaagttcttagactctgccgtataattcccccacttggtttcagatgcccttaatcttctcataagactaaataagcaaaccagttcagtaatatatatcggtgcaaagtatgtttctctaataatcatatgcgtctttatcacaatctatgtttgttgaaataaagcgaaaacattacaaacgttttcacatgttcgttttgatgttcgatgaaaaggtaaaataaactttttatgtttatcctgtttttgttatttcatgaggtttcaaatacccttaagatatcaagtttcagacttagccataccaaattaaaaagaagctagtttctaaggaacggttcctgcgagcataaacgtcttgtaaacaatggttcgaaccagctcataaccaccccaagccgtctcgagctctttgactacattgtccgacaataagtctactcctttttctttagcagcaccaacggcagaccacgatcttagcatccgcaagaatccttcaaacgacaccgttttcttcatctccagttccatgggctttccctctgagcccaaacccacgctctcaaacggaaacggcaacgtcttatatccgtccaaaaaatactgactctctgggaatttacaatacggcaacgtttcagcgatgaaccgagtcatcaccgagtcgaactcgggattcaccaccatgtcagtgttgtagctccacacggcgatgattcctcctggtttacggaggagacgattcgcgatcgcgtagaatctcgggagatcgaaccagtgtacggcggtagccaccgttatcaaatccacagagttctctcctccaataagatctaccatttcatcttccgtcatcgacgagggcgtgtggtggtacgttactttcggatgcggttttccgagattcaacatcgtctcgctaacgtccgtcgcaacgactctttcgtagtgttccgcgatctaagcaacaagtcgtaaaaaatcagagattcgcgttacgagatttcagatcgggaaatgtaagaaagaagaaagagagggaggagaaaatacatactccgatggcagcttggccgtttccggttccggcgtcccaagcgagattgtgacggtgggagagagcggcgagcttggagtaccaatcggcgggataagtaggtcgtgcgtctaagtagatatcagcttgactatcgtaaactcctgacatttttgtgatttgcttcttcgattcaaatttctgatcaaattggtttcgaattctggtgagctttaataatagaggagagtgacgagtgacgacagattgcgaaatccgattttgctatttcctcgttgactttgacgggttttttggtcagctaaaattggttttggattttgtttcggtttaaatctattttgttttgatttagtatatgtcagtataactaactcactctatacgagtatacgtacatggagaaatagtatttttttggatggttgttaatcaaagatgctaaattttattgcaagaggagtaatgtgaaagagtctttgtcgggatttatttttattgctgacatatatttttttaataattaaatacaaatggattacaaggaacttgtccaatgtaagaccaacctactacattaatctcaactatttgacgagggagatagagaattgaagagaaggatataagactttacagtgacactctaagactcaaaaggaggacgtcttttaggagatagaaccaaagcctccttctgatatttgttctatgccctctttcaagcagaaaactgaaaccatggtcgaaagatgggtgctgccgtgtaaacaactccaatatggtccgaatgaagatcttctgttaggcagattcgatgcaagaaacgaaatacttaatataaaaaattgattttttttttttcgaaaccaagataatttgggtggttcgggttttctattgtaacattcaaggggcaatttattattttgctggtacgagagctggtaggatgagttatattacctggaatgaagtcaagaagctttctaagcggcgtccgctagctcttctgtgaactccccgaagatgtcggggcaatcatcccagttcctatgccctcgtgcttcccaataaccacccgtgtacttgaaggtgtcgctttcaccttgtctctcaaaccatctcggtctccaaccgctttcttgaagttgccgcgactgcagagaaaccgagcaattgtagttcttagaacataacttcaccacataaccatcaaaaatttttcaaaaatgtaacagactaacaacagtagttcaaggtagaagatcagcctaatgattatagtaccacaaaagcgataaacgaatatgccagagatcaaatcatgcaaaattctagacagaagctcattctatgtattagtcctcatgttctctgaaagttaattcattcagggcttacatatgcatggaccagtgaaatgtataggtgacgtaccattctttgccttctttctaaccgttgtttctctaagttcgccttctcatattcaccattctcaagatgccgttgatctggtctgagcctagagtctgtgggaggaagtatctcctacatccatcatcaagttaacacaagatcagacaagtctatatgaaaagatagtatagcaatccataaacagaataaaaacaagattaaaccatctgaacatacctgtaacccaggtgttagctcgttcagagtaatggcaaatgaggttaagttgtatctagttacattaggcggtggcttggtccttttccacagtaacgaggcatttgatgcaggatcactgactttcgacttgttgattccatcaccagcaacatagtaaaggctatcatcccatttaccaaatattgttgctgctttttgccctgctacgtcttctacaaaaccgtttacctatatgtatatttgatcatgttttatttcaagtattcagtttccacatacattcaaaagtataaaattcatttttacatatacagagcatttctatgtgactcacctggtggggatttctctcaagaatggattgctccttaaacttgagcgtacaagaatattggcggttcccacggatttgcatcacaccatgatgatcacagtagagtttacctagtatgatattgtatatagttgatgttacctaagaacaaagatgaagtataaagttacttcagggacaaatgaaaaatctgcaaaagtaacttgaaagcagtagttaatactttgtatataccttgctccactgaaatacttctccatcatcgaactccagagtcaaaactccaacaggttcgacttgaatcgacctcccccaaaactttgacctgaggttagtgtcaccccaaaacttccaccctttaccttcacagtggcaggcgataacagttggatggtgactgacctattataaccaaaagaatgatattctctagtcttggtaaagattctaacaattatgttcatcacattctaaatttgagttaaaatttgtgtgacataccttctcagagaagaaacggattcccttttcaggaaagtcggcttcataggtttctccaagcaaaggattgaagggcttacaatgcctgccttcagtggaagcatatccagagaccgcaaaagcagcaacatttaaggctcttaagagaccattcccctgattatccaataggctttaagtcaatataagataaacagaatgtagtaatgtacaagataagtaagagactttggtgtcacttacagattttccatgttcatatgctcggtccaaaagatacgaatactccaagtcttcaaaacatttttggagggatgatattggttcattgaaatacacagggaggcaaactcgggtgagatcctttccaacgttgtctttgatcatagaccaaagactaacacctttctctttttcagctggatcaggaagttttgttcttctcttgatatccgtgtgtccagaaatagctaaatttgattcagaaccaatgttaggttcgttaaagaactcctttgtgtcgtggaaggaaggttcatcttcctcagacacatcctcaaactcttgtttaccatcagatgaagcagttgtgctgcattctagaaaccaaataatgtcaaccaaacacacaaatcctgattaagaaaacatttcaaagcaaagcaattcttgagcgttaagactatgtaccactatactttccacgtcctaggcttgaaaactcatgcttccctgatgcaccaacttcgagattagctgcctgaataaaagaatactctcatcaatcagtatccaacatggataaactgctgacaagtgacatgagagatgtcactccaattgcatatcacacaatggtccatactttcacattcaagacatggataaatgacacatgaacacgttttatgcttttattgagatgtatcaaattcatagttttgtcaacaccatggtccacacatccacgtgaaagatggacataagaaatgtgaaacagacactcgacatcaaactcatacttgtccacaacttttgtaatcccttctctgtgtacctatagttatacaaggtgatgtgactatgaccagttttgagttttctactactgactttccaaggggacaatagggactcctattaaattcttgaacaataatacaaattcacccgcccacctctctcaaacaatagcacaagggtttaacaagaaagaaagagccagcatcaaaagatcaaacaaaccaaaaaagaaaaagcatgaaggaaataaagtaagtttacctcaagctgcctcaatgcatcaagcaaattagtccgttcttcgtgtaaaagtttaacttgtccgtgcatttcagaaaattctgagagcatgatctgttcgcactctttgacgagattctcattcataccctcttcgtgcaaccgtttctttagtctctcagttgatatggacaaatcctttggtggtatgaaggagaaatccccattaagtgaccgcagaggaaagatacattttgtagatgctaatgcttgtaaccaagctgctctatcagttatagaatcagtcctcaaatgaagggtctttgttgctgtgaatatatagaactttctatcatcagacttgctttctctgaaagaagaaacctgctgaaacaaaaacatagttacaagctcaagtacttaatcaaaacagcaagttttcattttcaaccacaaaagcaaaaaagaaagttgtgaccacaaatatcatcaaactagaaaaagaaaacttaccagaaatcagattctggatcaaagatctaaagttccatgctataaaaagcaaaaatggaccctaagaactcaaaagaatatcctgaacttggaaaaaagtttggagatgcagatttggaactagaacaaatcaagctgggcccatgaaggatttaactttaagactggataaggcacgtaagatctataggttgagaaagacaaaagtttattatctgtaagcaaaacaaaaaaatatctaaagtttatgtctggatcagctttggtgtattttgggattaagcaaatgtaattttgaaagttcaacacagaattatgcttgtaaaaacatcgttttctcattgtcaagcatgtcaacacaagtcctttttataattggtaagaccccaccccctccattatttccaacaaaactaattcttctactcaccaaacttgtccaaaatccaaaaaaaaacttatataattgaatccatagaataatactatacacacaagcccatttgtgtgaaaacacttatagatatagatatagttagctagacttcttagctaaagagaaatccaaagtaaaagatgacaatgaaaaagttaaaagcgtatacccattcacttacgttgccaacaagacaaatcaaagcaagcacatgcaaaggcaagaatcaccaaagaacaaattgtcaaaagtgtccaaaattcaaaagacttgttttagttatgcaactgaaaaagttcttagttctagcaaccaaaaattgacatatctatagccttctttggctttttctcccaaagaaaaaaaaaactaagagaatccaatttttttgacaattggcaaatgtattaaatcttgaaaccaatagaaaaatatattttttaaaaaactgaatacactaagaaaccaacttgaaagaaaaaaaaaaaaacaatgtgaccactgaacaaaaccctaaacctacaaaaagaagccagattgttgcaaccaacacacaaaagattttaaattttgaaaaacaaacaagcacctgttgatgtgacccactagagattcacagcaagttaaaagctgggaaaataccagcaagattaatagtattattattacacaaagaccaaaatcaaagtggtcaagaagaaagtaagtgatgaatctgatgatgaaaggtcattcatagaaacgaaacaagagagtaaatttcacatttagggtttatctttttcaccaagaacacaacaaacaaatctataaaccactggttatttcctctaactatgagtgataaaaggcgtttcatttccccagaaacaaatctgtatccatgatagtcaaaatttaataatgaatcaacaagaccagaaatcaataaatcataaaaactgataatctcaggtgaatttttttttttttctccctaaaaccaaaatcaaaaaatttcagaaatcaaactttttgtaaataccttaagatgaacaatgccgacggttttttgttgtttccggcgaccactacaactatccattctcgaaagacgttcaccggaaatatctccgattaacctcacatcatcatccggagaaagtagattcaaattctccggtctccggatcttagaataagataagattccgttacggagtaagaaccatctagatctccatcctttaccaaaattagtccatttatataagatcccagctacagtctccgattccgatccaccggtcaacgatttcgccggtaaactccttgacctagttaaagccgttgtcaccggttcttccggtgactggctattaatcccgtgaggactctccaaagtaatacaacaaagtggatgtaactctttaacccgcattttcgtctccggtgacggatttgttaaaatttgatctcagatcataaaactacaaagcaacattcgtaagatccagagcatgcagatttgggggatgaaatcgaagaagaagaagaataaaagaacctgagagctctgagaaactgagatttttctcagagaaagagagaatcagagagagagaggttgcttaaatgtgagactgagtaagcttgaatatttgtaaatggctttatgtggaaaaacttagatatatacattgtatgtgtaatgtgtgatatattatatagttgtgtgatggtgaatcagaaagaggttgggaacgaagttgggaaaatttaagacgatggcttttgattgtaattttgttatgtttaagaggttataaatggaattatgtgtggtgatctttgattttgtgcttaatttagatactcttacaaagaggattgtttttgtttattttaagtagagaaaggtccactacattaattaactatatagcttgattttcaagctcatttgagagttatataacatactagctcttattgtcatagaattaaagattttacgaaacagaagctcttttttacatccattgagcattcctatcactccttgaatctctggagcagcatcaaggcaagacattagatcattgatgaatctgattatctctagccattgttcaaactcttgttagtacgcaaatcaggttgtgatcaccttgttagactgtgtttttgttgttgtagtctcttgttttctatagtttatactttatatatgcattgataatagtgtttatagactacataaacttttccggttgttacaaattgacgtcgattcgttgtaaagacgtgttcaagttagattcagatgttaggttgtcactttgtgaaaaaaattgagaattgattacagcatataaagtcttatctaattattctgacgtgtagacaaatttcatgtttcgaaaaaatcttaaaagaaatgaatattcaatcagtagtgtgatgtgattcagaaatttctaaatttcgagacatttcatttacttatttttcacagcaacattgttaatagctcactttgattctttctatatttaaatcttaaattatgagattgaaatagtttaaatctgaaattttaaatccaaatcatcaaatgtaaacttaaaccttaaaatcataaactcattaatcaaatctaaactttaaaccttgaattaaattaaactggtttagatatctaaactgatggtactataatactataacatttgcataaatctattataacatgatatcaaattatctagttaatcaaaagttaacaaatatatttatatgtaagcttagaagaaaattggtaggtccataggttaaacagggagacagattttccaagttaaaaaaggaacactataatcatttttctcgtattttgtttgacgaaaatgacttatcattgaggaaaaataaatcactaggttaaatagttaatacaaaccgtacatcaaggaaaagcccacttttgtttttggaataacatgccactattctggtgatagacgaaaacaaacaaatatgttagattagtaactcattcaaattattaatagttctctccaatgaatttttaagatggcaaaacaaataattaacaagtcattagattaatgtttttggtttctgaagtttttcgtgaactttattggtatgaggtcatatccaatagcgagaaaaagaataacaatcttaccaaaaatcggtctcctacaacatatatgaaatagttgtagatcgtgcaaatggatttcgaaaagttctttatatttggtatcataccagatcgaacatcaaactatatatcgtttaaatgtacgagtaatttgtctagtcaatgtgagtatatttttcgcattatttacaagaaaagagtagccatagatttgaaaagagtaataaaagctgtggagtcaacaaaatgtaataagacagtaaattataaatttgatgtcagatgtataaaagcataatgtttgttattctcatttattacaaaaatagcatggaccgtgggatgtttgaggcagtggaccggcgtggcgtggcgtggaggacccggtactggcttgttgtcccactgtctcacacgggccagagttcaattttttctttctctattctcttgcagccaacataacttagataccattgtaatattatataatcttatccaacataacttagattcgtttggtttccggtaatattaaaactactaattagattttttattacagcttcattattgtcattcaaaaataattattagaattaatactatttattgaaaatttaatataaattactaaaactatagccaataattatttcaatcttaaattacaagagatgattgatattattttgtctagtaaccaaattgatatatgcacttttcatagttatgataagaaatcacaaattaaatctaaataagattatcataacctaaagtatcgtatcaaacaaaattaacattaaagtaaacaaaccagtccattttaaaaatatttggtcaataccaaaaacttatactataatatattgtcattttccataaatgcagatatatatttcaggtagtgtattttttttgtcatctatttcaggtagtgaatgttacctcaaaagctcattccagacacgatatttctgaaaaaaaataatctaaactcataaaattcactagaatttagatgtccatatttagaggtttgtgaaagtattgaaaaacaaacaaaaagtgtgaaactatatgatgaatgtaattgttcaaagaagtctatatttagaagtacacttgggtctatgtaattctgtgaggctcggctttccactccccacgctttcttgtttttgtcactagctttgagcctctgtctatcagtcagtcgccacgataatttatttttttcttaactaagacctgtttaacgcattattataatcaatgtcgtagctactagttaaaaattaaaattaaaatgtttttgtcttctctagatatatgtactgcccattaattttgcatttttcaaaataaacatataaaaaggttttcattgtcacaatcgtaacattcatcttaccagaaaagaatatcaatcttcacaacaatgcttgaacttattaatatccgagatagatttttcttttatatttgagataattgtcattatatcaaggatttgtttgtcgacaatcctttttgatctacagaaatattgatgatatccaaaattacggacgaatatttatatattaagttaaaagaaaatacaaagaacaaattgtcatcctaatacgaaaccaatagctcccaaaaaaataaataataatggtaaaccattcgtgtctttgtgtctgtgaccaaaatgatctttagattacatcacaaaatgtgttccttatatgtggtcttgttcccaaatagtgtgtccactctttataaattattaaggtagttagtctcactcacacgtctagtctaattaaattcttagtattagatgacctcgattgatagtaaaaatcatatatagatccgttgttacaatgctaaaactatatggagttttaatgtaatcaacattcaaaaatgatgatattttgtgtctgggttgcatatatgcggatatagatagactctatatcatttgggtatatatagtcgtatataatatctctttaacattattattattttattttatttcctcttttaacattttttcccactgttttgggtataatatataggtgcagcaactaattagtaacaaacatttgtcattggtataccatcttattatataaagtacggtttcgaaaattactaactcgcgagatcatcacacatggtaattttatcgatcttagatgttgacacgtgtcaaacaaaatatatagaaaaaactatatggaaaaaactatagtttaaactatatggaaatataagaaaactatatgtattttattaaagttaaaaatagaaattgaagacaaaaaaggccaaatgtaagttaccaattcttaagaaatatgggaaaaaatactattttaatttctccttaaaagataattatagaaatttattagaaaaaaactaaataagataattatacaaaaaattatatgtatctgattagataaaaatagaaattagaaaagctgtcttactatataattctaattaaatttaccaaccaataaaaaaagggaaagtttacaattatttatcaattatagaagaaaaatgattatatacataattctacaaaacaaaaagaatgtttaggattatatacagaattctataaaaaaaaaaatgtaaacatccatctctatataaacaaagagataatctcttattttttcacaaaaaaaaccctcaaaattactatttttgcctcaatgttttgctttttgtttttccttggtaagtcaaacattaaacttttttctggatggttgactataatacatgtacatttatcatatttattttctaggtttaccctgttcttatgctattagagtattattatatcatgcttgccttagaaaatattattcttcgttgcttttcttggtacgtaaaaacttttttctcggttaattagttaatatttacttatacgttgactataatatgtatagatctgttatatttattttctaagttgacactgttcttacgctattagaatattatataatgcttaccttagaaacaattattaagcgttgttgtttacatttacttatcttcaattctttaaaaaaaaagtcagaatagctatcatcaaagataacatgaaaacacaagttcaagaaagtgggaacaaagaaaaaaaaaaatgaactcataataataaattttctcctacttgatgaaaaggtaaattttaatactttaatcctcaatattctccaatttattaatctttttttaaaacagaaaaaaataattcaaggttctatccatcattatcttattgaaaagtttggagctcaattatgtgaaggaaaccttattgaaatttgcaacttccatgtgcaatatgttgaaataagaattacaagatctccgatcataaatttcagatgatactaatagaaaaaaccacgattccatccataaaattatagtataaataggcggccttatgtggatcaccacataaactaatttcttcataaatactcacaattgattcaaaataattatgaaaatatcatttaaacaatgtcatttaataaaatagcatgtcatactaaaaaatataggagtaacatatgattgttatgcaggtgacgatatatagttattgttcatggttacgaaagtggtgacagaaaaaattagtataagggaaatatatcttattatataattagtatgatatattttagtttttcaaagttagtaattaatattatcatgaatagttatcaatcaaagattttacgatatatcatgatttaaagggatttagttaacgttgatcgattatctctatatttttaacgtgtataatttaaaaccattttgaaatcattcgctaactttatgatgaataattttaattttagttttttatataagtatatcaaaagttattgctatttgatatacttttcattcaaataatttgagcaattgctatatgatatatttttcattcaaatcattttttattcaatgattttagtggtgaagaaacaatacaacattaaaaaaaaaaaattacttttaaaagataatttatacttacaatattgttaattattattttttattaaatttgattttatttataaaaaataaacccgtccatcggacaggtctttatctagttaatatataaagtatgatcatatctaattttaaagcattttttaaaatggacggttggtaattatttaaatatatacgtaacataatgtttagtaacattttaaaaccagtttatgtcattttcaactctattttgatcaagcatcttacaaatattggacttagtcggtttaacattttactcgaaatatccttaataatagaactttccctccttttttttgcgactagtagaaactttaacgtacgaaaatctacataaaatttcctaacttctaaattacgatattatattttaatgaactcctaaagtatgtaggggccaggacataaattatggtatcttagagcacctccaatatatacgattcatatagtttttaaaaaaacaaaaagtattaatattttactttcatataaaaaaaaaaaaaaaacgtataaaaatattattattttaattatatgtgtttctcctaaaacaaattaccgctgcagttggtcatagatatcacaaacatttatcatctctgcacgactcttcctactctactaattaagatacatgcctatgaattgttattaggtactcctaactttcataaatctgatatgtcatatttggaagtgcaaaagaatgtagctagagttgtacattttagtaaatggatgtggtaataagactaatcttcaatttttatatcagttctatgatttttgtagtaacaaaattacatttttatattaacgaactatttagacagtttaacgtttcagttcttttgatgtacgaatgtaaatagagaaaattaagtaggaatcaacgtcacgttaatattgaatcattgatatgaagctttcttttgggagaggtgctttttccatggaaagtgatggactcgatttaatgtgggaatccacatacagtatatatatgtatatgtggtaattagttgccatgtgcattatcctaaccaaaatgacaaaaggctataatttgattgcattagactttgctatgtgatgcattagcatataataacatttatttatattaattttggtggtaagttgatctgtcgtttattctaaatgtgttaaacacaatattttgtcatcacaatgcaatatgtttttataagatccaattatataattaatcaaaaaatataaaattagaaaaaattatataattaataatatgtgcatatgttaaatggtccaaacaatgtttagaaagatgaaattttataatcttcgaactaacaaaactactaaaaatagagttaaagacattaaattttccaaaccaaggaaataacaataatatatatcctcttaacttttttgatgtgaaggttaagatatttttaattttaagtactatccaactttatattagaagataaatgtctaatatatattattgctttcaataattgtatccagaaaagcctttgaccaaacgtccaaccatacttccatctaattgccaaactatgttggaaaataacggtgatctataagaattaggaccccatcttaacgactaaaatgaaatgtgtaaatatcaccttgaatttataatttttgagaaacgaaaagcttaagccttaaacaatttagaaaaacattaaatctaacaaagttcataatttatgataaaaacaaaatactctagtttcgataatttttcaacgataattaataaaatctgaaataaaatgtctgacttgtatattatatattaaaaatgtgaaaatatgttagtttcacattaaatgaccatcacttaggcaaaattatcatttcactataaaaatttcaacaaaataaaaacacttcagaaagacaaatgtttacttatggtagttatgcataaagcgaaaaactgctaatttttactgaacatatattataaaagtaaatttgttaggtactttaaaagtctaataacaaaatgtataacttaaaatcgtcatagacatgcaagctcacatccgttaactcgtatttggtttctcatttattatgagaattggaggaaactttttagtaagacctagctacataataactgtatatgaaaatatattgtatgatgtaagtgaagtccaaagcaagacatggaatgactaaagtgtcatagaatttgaatctgaaaaaaaaaaaaaaaggaatccaatgaagagtatatatgaattaaaatgtgaaattttatgagaaagttacaatgggaggaagagattactgaaataaataataagcaaaaacgtgggtcaagagaagaaaatgatatacaaagaaagcttgcaaatcaaatccatgtttcataagtactcaacattacacactcatccacccccactcaattatctaataaaaattcaataacctccaagttgtgaacagcatattgttgcaataatatacacataattgttttcaaaatagtttattattctttttaaatcatgcgcgttatgagttcttttctccaatgtaatgttctaccatcctattttcgttgtgaattacaacttccaagatgtaatattatatgatagacatgagaaatatataatcttataaataaactactaaaatagttaagaagttacaacaaagcagtagagaccatttttatttcttatttttttacaactcgcgaaagcttcacgtgaagcctttgcttcatttttcattcaaaagttctttaccttcgttttaattttcttaattcactcatgcatataatactactacatttgggaattggttatatattaatctttcgctttctgatattaatcttttacaagtccattagtatcatgcgtaaattggttatatattattatcacaattaatttttgtatgagtatatatataagcaacatcatgaaaacagatttacatgttcatacaattatacctaatttaaaattttaaaattatttgtctaacgtgggatgctaaaatctgcttttataatgttgcttatttagttttttactatatatttaacttcccaaccctcaataaattagattgccactgaatggtatattaaaataccagatgaagtatttgaatttgtgaaccgttttaattaaatttattttgttgaagcaaccaaaaaaaaagaaaagaatatgttcaaatcgtctaccaattaatccaatttcgaatttatttaagaatttaaaaataaacactgtcttttattactatgtaaaacgttaggagagcaaaaaaaagattctcatattcaatgttcacgtacggattgccacttgcgtgcctttgaagaagaagataaaactgacccatgagtaagaaattgttttgtagtaacccttttcttaaaaaatatgattaacatttcaaaaaacgataacctttaaagttctccagagcacttttcttaagaaatacgttacattttccaatattcaaatatgaaattatataatatgtactcgaatatattgaagaatatgcttttgaatcccaaaactataattactacattttcttattctccaattaatcgaccacacttatagtaaagttcattcattcacaacttatagatgaaatattgttataatttggcaaagatataacaagaaattaaagttaaagagaaatgtatatgtctgtcatcttatctgaccttttttctgtgcatcaggttctctttgctattgtaaaatccaatctctctctcagtggtcctttattaacaatatacacagtttatgagaacactagtgccatagaaactagaaagtggaggacaacccacaaataccaccaaaaaaaataaagacatttcagttttatgatatgttaccaaatgtaccagtatttgaatccatttcctgctgttaaaagctttaaagaaattcgatttaaatctaagaagtaaaaaatcaactttcacaaaagaatatcagacaaagacccaaaagaaaaaaagaccaaaacaaagttattttcttttaggagtgtgctgtttggtactatcctcttctattctttcagaatttctaaaaaaaaaaaaaagaactcacatgtgtgtaaatcaaattttcttttcaaacaaaaattcttccttttttgggatgttagtgcaggacatgataatgatgaactcagaaacagcatcagaccctctctctctatagcttcagatccactttttacctgagttaggtcacagtcacaggacttgcaaaatttagggcaaaaataagaaactctagtacaacaataattcacctcaaatatggtaacaaagagatgaccataccatacctctttcaactctctgccactctcagatgttaaagaagattcacactgccactaagttccatcaccacctctcaactcaaatctcaatccctttttttatattataactgtgtgattttattagtgttctctaatcactctcttttgctaatcacaaaaactggtgctctcgtcaaaaatctacgacgcctcgtgctctaaatggtggtagggtctgatgaggagacactaacatatgaaaagagggtttgtttggtagccacagaaaactaagtgtgatcattaaggttgaaacaaggtatgtccttgtttgatctacaggagataaccatgtgaactctcataatataaaagttttccaatggtgggcattgttcttcatgtaccatcctactctgtgtgcctctacttttgcagcatacattacaccaaagaaaacaacacataccaatcccataattctcataaatgatgcctaagaaccaatccaacaatgacaacacttaccaatcccataattcatgacacaaactcataaccggttggttctggtatctggtttatttggttaacaccaagaaccgggaacaatatggtggatggaaacatttaaaagagagattattaccgtgagaaggacatgtcaactgaattttgagatagggactttacacctccttggccatctaagcttgactgtgttttctcagtctaatcaacagagttttctgcaggaactgctgtagaaacagctgacacataacaaattctgtcagcgataattgagcaagtttatgatgtcacaatcaatcaatcacaataatacacaacttcatatgtagaaggtgaaaaaagataaatcaagaaagaaacaatcatggacctttctcactcaagcttcaattatagctgttttataaatactatctctcaacaaggtagctccacgagtgtagaagacagtctcttacaaattgcagatgtgggtccagtttcacagcatctcctgcaaccttaaacattctaagttactactgaacctttgatgtacttggattacatgttgaaactaatacctataaatataaacctatgcctagcagatgcataaccttagaaaaaagatgagattagcaaaccaaaggcaacataaagagacagagattcgagtgaaaacctgtaaccaagcttgcaaaagtatattcaaggcattggatgaatcaatcatttgattctggcaatttcagcaacggttatcttctctgacaacaaaggactctataacatagtacagaacatgctggctacactaagaaagagagcaaagatatagaaacctagttacaggtacgaaatattcccaaacgcagaggaaccacagatattggcaagcatagcatgttcacagtaacgaaaaacatctaatcaatcagtcaaggtctcattcccaacattccacatgccagtgtttattccttatcttttcgaagctccaaacaacgtagagaagttacatagaaagaacatggtaaaagatctagaaactacaaagtaaggtaagaagattagtagattacattcatccacaaccacaagttcactgtttcaaacaattagattgctcacagatgatctcaacctcaggtaacaatgacatcaatgtgaaaggtttagcctttcagttttcaagcctagctcgattacgatgcaagtgaataagatctctcattattcacactaacgattatgtaatacaacaagagccttgtagtgaaacaaaaggaacaatctttgattcatgaacaatacaattcttcttctcaatgtaatcgaaacaaaaattacagaacaatttgttaaaaacaacaacaatttggatacatttgttacctcccaaagatcatttcatcaaatctcagaaatcgaagagcaaagagagcttctacaatccctaaaaaagcaccagcagctacatcgagaacgtaatgtcttcctaaaagaatccttgaaattgcagtcactgttgcccagatccatacaacgaccacaacttctaccttcacatcgccatcgttatgatctctgatccatccatctaagaaggagtagcttggaccagtcatggaagcttcagcagcagcagagaagaagtgaacagatgcagcaacgaagaaaacgcgagaagcgtgacctgaggggaacgagtagtgatcagctgatacagcggcggacattgaagggtgattgtaagcgggacgagcacgacggaagattaattttacgattccgacgaagattagatcgaagaggaggccgaggaggaaagggacgaggaaagagcgtaatggaggggagaggaggaaggaaagggatacggggaaggagaatcggaaatcagctgagatttcgaggaggaggaggacaaatggtgggaggaatggtttcgccgccgtgtgaatcgcgtgagatacggcggcgtccaccgctaagatgggaccgatgaaaatcgtcgtcgtcgacggagacataactgtcgtaacagatctctgtcaaaaacaaaaccgtcgtcgtttaaagggacggtagtcaaagaaaaaaaaattaattgtgaagttgagtctaacaaaacgacgtcgctttctaagagaagaacactaatccattagaaaaatatgtgcatcttgggccttttttattaagcccataaagagaaaagatcagtcactttcctcgctaacataaccaccttagatttttaaggtccacttcgtttcgtagttattagtgaccagtaaaagcgactaaatcttgttatttttgttcttgttagttcatttataccactttgccaacaaatacatgttttaacgttttaaattttcatcatcaatataatattactattcgttagcgaccacaaaaccaaccaacacaatataattattgatcattgtcgctagcaactgcaaaacaaacataacttaatcgttggttactctagttgttgcaatcaatatccctaatttgttactatatgcttcattccgatgtttttcatacttgtaaaagtgtacaatatgacatcttaatacaagtttttttcctttttctctaccttttcttttgacaataatgggggtgtttttttagtttgtatgttcaaataaaacttaagaatcggtcctactgattcccttaccttattgttacactacagtaaagttactcggattcctatttatgattgtcaatatctcaataaataaaacccgacacaacacttaaatcattcaattcttgatatgttaaaaggaaacactgcgtcaatttgctttcctcattaaatgtaaagaaaattcttgctttcttcacctaacttctctcttatcactctgcctgttttaatcataaattcattcttcaataactttagtttcaagaaagaataaataaaaatccttatcaacaaaatcagtcgcttgaatacacacacacacaaaaaaaaaaatcagatacgaataataagtttggatttcataaaatatttgtttagaaacttataatcaatctattatacaatttgagtcaccacatcaaaccaaataagtatcatatttttctaggtattgattatgtaaaccatatgggccaggcccaggagaaaaattagagggtaaaatcgtaatatgaatgatcatatgataaaacgctcgcgggtattttttttgttcataacatacatatacataacttgttgaagagagaaagagagacaagaacaataaagatccggatccaagaacccgaacatgccaaatgggtggatcaaatcattgcaatgcaaatcaaaagcgttcgatgatgtctacaatttcaacagtaaatcactaatgtcgtcgtcgagttacaattgtagtcgaaagagctcacattgcgtcaaagacgtgatcgatacccggttaagcaagaaaaaccagaaacccgacccgaatctaaggcgtttcaagtcttgtcgaaccgaaacagagttacttaacccgccaaaccggacccgacgaagcaaatctgcccgaacatcagacgcactgaccgagctgcccgatggtcacccgtcaagaaacgtagtggagattatatttcattcaagctggagctccgacgagtttccgggtcggatcgagatgattttcaaagtggaacacgggtcaaggactgtaacccggttcgaggagtatagagaggttgtgaagtcacgtgcgggttttaacggaggcacgtgtgaagaagaggatgcacggtgtttggctgatggtaatgagatgatgaggttttatccggttcttgatgggtttaacggtggcgcgtgtgtttttgccggtgggaaaggtcaggctgtgtgtacgttttcgggtagtggtgaagcgtacgtgagtagtggaggtggcggaggaaggaaggcgatgatgatttgtagagtgatagcgggtcgggttgatgatgtaatcgggttcgggtcggactcggtagctggtcgtgacggcgagttgtttgtctttgatacacgtgcggtgttgccttgtttcttaatcatttttagattgtaaaatatatatttcttctattcacttttagacaatttttatattaaattttgaattattggattgaagaaaataaaattcatgaaaagtaagcaacatatgttatggacatcgttgacgttgagaattgaaagagttcatgagctagactcatgttcatgggacttggatatatgttcactaaagctttctggaggagtcaaactgatattatggcctccataactcttctcgcgtggtagcttaccacgtttcaaggcgtgaagggtttgggaggttagaccaatttgattggcctcttcaaatatgatgatgtcatgtttaggtgtcgcgatttgattaccctggtaaatttaagctatatgtgctttgaaaaaattatgttttcacagtaactttaaaattgtaaagtggtttttacataattaacttatgtaaatatgtagccactcatgtcttaagtttttacttggttaaaatagtgcaacatttaggtctttatacgcgtcgggccaattttttactctatttctttttgtgggattgatatatatgttttagtttgacttcagaaaaatgtgatcgggaaaacataatcatggcaaacgcaatctggtggaagactaaatatgatgatatataattacgatatcaatggagatcctaatcatggttcttgtcttcttggcctaagaaaatattttatttgtctcttgtaattatgtttcttaattatatgatcagatgatgcatgaatgtagaactcggcgtaaacaaatactaatgctcaatgttaatgtttgttcaaagaaagttaggtacatgaacatgagagtaatactatcttttagaggtattatatcggctaaatactcctttttcacattttatggttgaatgaaaactaaaagtgcctgtcaaaattttgtgtgttttttggttgtttgctagttcacatactatgtcgataacttctgtttttcagacaacacttattctcaaatgtattttgaaaatatgtagtccaccaacccatagattctcgaacccatagtgtaatgatgggtatataccgatagtgttatgattcacattgatcttaccttcgaagtatactctaaaattgataattgtttaactaattttagctgattagtataccggtaactagtactgcttttaaacagcaaagaactttggattatttgttccagctaatccgctagaatttaaatcaaaatattgtagaatccaataataagaagtctgcataatccgaattttcggagcataaattaattaaccgaataattttatccaaataagtaaagctaaaatcatcatcggtactccacaagcatacatagtggcttccccttaagtctctgccttccctgcaaaaaattaaatttcccacctcaaaaatattaaatgtcacaccaatacaaaacgatctcaatttattgttttcgaatattactactgtattgaattaaattccacgacaacgaacctttaattcgggtaactcgatcacacatgcacattccacaacttctgctccaaccctctctaacatggtccaaaaaccattcaaaaagggcaataaatatcttgtatcggttaggttggaaatttaaaactcaattggattttcatataggttagggattttaccgagcaagttaatggcagcgcagagagtaccaccagtcgcgataagatcatcaacgaccaaagctcgatcgccagcctcgacggctcctatgtgcatctctaggcggtcatttccatattccaactcgtattcctcaaatattgtttcacctagttggatttagtgttagtactacttcaaaaataaatcatatgaaaggtatgcaagtataagaaccaggtagtttcttgggtttgcgcagaggaacaaattttgctccaatggctagcgcgatcggtggaccgaataggaaaccacgagcctctattcctgaaatgatagccaacgcattgtttcatggttatgtcaattagggaataaagtctagttaagtagcgtaaatcacaacattttaaaagattctttgtatgaacgtacacaattatcaattatgtatgttgttattattacaagagtccaaataagaattcactggtatggaagaaaagctaaagaacgattctctgtcccaacaacgaacccaatagacagattctagagcagcactaaagatacggtttcggtgctacaagtagtagaattgtattgtgtatgggcttaataatatgaagtctattaaatattttctcttacgcacttttttttttgtacaaccataaaatatataaattttgttatgtaccatgtgctatgcacatataaactcttccttaaacacgggctttacaaaaatatcaaaaatagaataaactcgtgattcaaatgttttaacaacagcttttcatcgagttttaatgggttttggcagatacctatcaagtatggtaaatatatcaaatgagtttgtatggttttgatgattggttttcttttaaatctgtctagaaaagattctattaatttgaaaaggcaactgaaaaagtatacagatttgaaaaagtaaaaaagaaatgatgtacttcaccatactttatcctgcaacagtaacaaagttacaaagtctttgtacttcattacatagaagaagagagacatacagaaaaagtgggaagaaaagaattggccaaaacaatgatgatagaaaaagaaagaaaacccaaatcaagtttttttttggggccaactctttttaaaaggttacatccatcactcaactactcatctatccaaacattacccaccacacatacacacacacacaaacacttttcacataagtaataagatcaacaattataagcttttaaaaagtaaaagaatatagaaagcaaaaaaaaaaaactttttcttatatgatttgggaggaagaatgatcctggcaatcaatctcattcaatcactcagtcacaaagaaagattgggtttcagagataagagagagtcttgtctcaaccaaatttttatcgaatatatgacaataacgaaacgattcgattcgaatctttttttctacaaagtgtacgtgtgtatattgttaacgtcaaacactaaacaatacatatttgcatatgaacttcaaatttggatacatcatattaattgtttttgtacacataaatttattcgttcaattaaaacaagttttttcaataatctttatataaatgcaaaaaaaaaaatcacagaaaaaaacaaagaaaatagttctttccttcttttattaaaacaaccaatgataacaaagttaaaaaaaattttaaaaacaaatccaaattatcaagtaatttccatgaaagtataatgtacaaaataaatctatattccactaattaccatttgacatttttttttaaagactccactaattaccacacaccaacaaatcaactatttagggttcagaaattagcctatacggaatttcggtaatggattttttttcctatataaaaagaaaactaaacgtcactaaaaacatgacctacccacttatttccccggaaaatcatcaaaacaattaaaaaatcgagttcactgaaataagtcgaatcttttgaatagtaatcccatcgaaataacactatgtatagaaaattaattaacattatgaattgcaatgagagataatatttacctgcaaccactgagatgttcttgtctctgtacctctccacaaacagatcaattgtgtctttgaaggctttcggatccaacaacactgttgttatgtcttgaaacattattcctgcaattttaaccttgtttttagcaccctctctatgtaacaaactaacaattcttgtttttttcaagaaaaatctctgaatgtcaaattaccacttcatagcaaaccaacacagattcaagaccaagacaaaactgtaaaaaaaaatcctttaaccgaaatattattgtcggcaaaagattcagatgaaaaaatcagcattttcttagaaagtacttgttctttagacaaacaacattttctacgtgacgaaacagagtatgtaacgaagaacacacaaaaaaaaagcacttccataatgacaattccagaagaaggaagaaaaaaagttacctttcttgggaaaatctggaacgacacggatcttagttttgattccatggatacgaggatcctcttcttctttgtttcccgacattgtcgacgaagagaacaacaagatgatagattagtaataattcaaacagaacagagaatgaaaatcctctgttttgcttaaagggtgtcttcttcttctcttctctctcccaaactacttgaacaaaagagaaagagaaagtgaagcagtcatactactcttaccactatttatatctttaaaagaaaagaaaaaaattggttagattctctgttctttaaaatgtagtgtgctttaaaatgtgttaaaaatctctctgtacaactgtaaagttcaataagataattagtaataaataataaataaacttctataaatatgtcgtccaacaaaatcttccaaaatccaaaaagtatataattagaataggttttataagggggccattaaaataatttgtataagtttcataacttagaataggttttatattatttatgatactttatataaatgttcaatactataaccattatgattttttttggtgggtttcataatcttttggatgatttgcttttcatagtttatgcatgaaaatctaatagagtagtttaaaaattttcaacgtataaaaaatgtaatggagtaatttaaatatttaatcgtacaacacatttcaaagatctcatataaattcaaattatcaaatcgagtaacacataatagtagttaaaaatagaataatatcaattattaaaaaacgttaacaaaaaaaagagcaacataataaaatttaagataatttttttttgatgactagtacaagacatatctaatctatgtctcattaaaagacatgatcaaagctgttaaacgtgtcgttcaaacattggattatctcgattttttgtatccccaaataattctcatgttaattaaaataaatacaaaaagcttaaaagaagaagtgtcctcgttaaattatgagagctatagcattgcagagagacaagtggtctgtttcattatcttatcttgtagattagaaatttagaataagcttgaactcctttttctttatttgttgtttcagtttgtccttataattattaaaaagtaaacatgtggttagagtttctccgattatttggaaagaaatagtcaacaaacccaagttggagaatgaataagtgcgattttaagctttacaactttcgataacatttaccttagtaaattctaacttatactatttgattatatgtattgcatgctatgtgtttttacacaatatatgtaaacgaccctgctttttcgtgtatattaccttaacatgcaaaggtgggagatagttctacttaattatagctattaaatcaacgaatcaaaaaatgtgaacccatatccaaacccggtgatagatatttcaacaccaaactcgaattaggttcccgtcattcatttgttatacaaaaaatactggcttaaatgattgtctttttagaaaatcaatgatattatcgtcaaacataaaatctaaactaatatcatcaactagtttgagcaagaccaagaccaagaccctctagatttggcctaactctcgtatctaaaactcactttactgcacaaagtccgagtgggattttgagtgtggcaaatctctggttatagattgtgtttttggaacatttttttatttctaaaaagataaaaaaatattcaaaatatatgtaacgaaaactcatagaaaatgaaagcgatgtttctttctttactattttagattttattttatctattttatatttttatggagcttttaattagacctgtccatggcctagaataagataaaagttcaccaccttttgaattttgataggccactcttcaattggaatttgcatcttacctatttaaccttccaccggtcttttcgttttttattctgtctatttcttcaattattgcactaaatcgctcaaaatctaacttgggacaaaggtgtccaatacttagcgtgattcgtcttacatacatttaatggtatcttcataacctagaatcccattatactacaatatatcggttatagtatataacatcaatataatcaacaattatatatatatatatatatatacgagtagcatcaacaatgttattgctgcaaaagtaggcgaatctcttttattccgtgttttagatgatgtctagatttcatatgaccacttttggtaagcatattgtgactccacttttacttttgtactaaaatggtatatttgttatttctattattaagctagtctagctatttacatatgtaagaaacgaaagattgaaatgaacacattaagttctgaaatcgactttttagcagtagaaaattgaagttcacaaaaaactgattttgttgcttttaaaatggcctgatattaaaattctttagttaaaagcaaaaggtaatttggtaaaacatcactttaaaataaaaaaaatcataacctaacatttaaaggaaaaaaaactaacaaattttaatacttttatggacaacaaatcacttatacattttcttgttatttctagaataaaaggttaaatattattagcaagtaaaattttttaaaaatgttaatttttgaggaaaaaaaatccattaaattattggaaatgaggttaaagaaaataaggtatcgattaattaaagaagggacaaaaagaaagtagtaaaactgatagtaatagattgtggagtgtactataatcggtcgaatcaattggatttatctcataatattttgtggacgagtgttagttgtgctccattaaccatttttcttcccactaactcattttttttttgctcctctccttttcacatctttaaagtctttttccttaccaaaaaagtcattttccttaatatttttcctgttgtattcctctgttctgtcaatttctgccatatgatttatttaatttgataaaacaaatcaatttctctgtaaaattaatgactagttaatatatttgtcaggtacttgttttttctctacggaatccccataaactcaagtttataacagtgataaaaaaaattttacaaaataaaaactgtagaaaatgaaatatatgtttatactagatgatatgtgatttaaattattaaatagaagaaatttaaaaatatactttttcacactaaagtacttagacaaaactgtaagaaaaaatgaaaaagattggcaacgtaaacgtaaacataacaggcccaaatatgtgaatgggttcagtgttcgaatagtggatttagtgttacctaatagtcttcggcttacttggcttttaccgaaaacctcaagaatgtttcatatgtttaacaaaaatgggtttaagcataaggacgatgacttgggcctcaaattttgtatgcgtttgcattttaaaaaaatgaatctctagtctcaagtaattgaacaattcgttcttctttgctgctaactcagtctaaacgcaaatgcacaacacacaaaccaaaaaaaaaaaaaaaaactttagtttgcacttcatgttgtctcttcatgaatgcatttctacatgtagatgcatgcaaacgcaagaaattgatttttgtaattgtcccatgatagatgttgttattgtaatttttttttttcatccggattgaacaaccaatcatggagattggagattggagtctggagagtaatatcttaattttattagtgttattgacaaagctattctgttccgaatataggaaattttcaaacgtgtaatactaactttgatgcattcttagaaactgtattacttacctaaaagagtcgatttgtggttgtattgaaattccaatggctcttcttaacagataaacacacaaataaagaaaatcttcatagaagacaagcaaaaacattacaataatcactaatcattaccatgacttacaatgatacaaataaccatatcattacacaaatctcacctaaaccttaacattcattattaatgtaaccactatagtagtatattactaaccaaaaaatctcaatgagatttggcaaacatgaacaatcaaaaatgaattttgaagtataacaatttaaacaaacaacaacataatacatacctgtttaaaactgttgttagtaagaatcaaactctagatataatcctgtccaaaactccatcaatagcaatatcaacagcatctttcttattcatcaatcccattgaagctccatgtcttctatacataactctaggcatcatctctataactctttctctcattctagtaacttcttctttaggtatactcatcaacacatcttgtattctaactcctctaaacactacatcttccttcggaatcgtaaccgaaaactccgcgaattcggactccggtaaatgccatttgtactgcattttcgccgtttgatcctcgaaaaacaccggtatacatccggcgatgattccgtcgaatgtagctttccttgttggtgtatctcccggtggttgtaaacaaaacgatgattgtaacatcggtctcatgaatctaatcggatcatgctcacagattccgttagaacaatcgacgaaatcgcagattttattatccgattgtgttgcgtttatgctagtgcactctaagcggatactacgacggatgttaggagaagaggaggtaccaccaccgccggcgaatagcataagagaagttcgccgtgagcgacggacacgacggatccacgattccaaaaacggcaagctgtgtggatgaaacgacgtcggataaggaacggcttgttcttgccacggccagtaacgagattcgagagttaacgccgttagattgaaaaactcacggcgttctagaaacgacgttccccaaatcggagggtcaacggtcaacggctgagagaaatcccaagcgggtcgagccataacgaggaaatgatcatgaccggagcgacgagaccagatctcgggttgatcacgggtcaaaaactcgagaagatccgacccgtgatcagcgcttgagtttaaatcgggtccgtagagataacggagagaatcgatgccggcgtagtaagggaggtagattgcggaggcgagattcgggtcgggtgtgagacatggatattcgagaatccgacggtggaaaatgagttcgagaagtaacgggtcggttcgataccagcttcgggtacgggtatgggtttttgggccgagtccgtgattggctaagtaagggcaaagatcgtcggtgattgggtaacgattacaagttgagagaagatcgagattgaatcgtgatgggagtgttcggatgtgaatccaacggttggtgcattctgaatcaacggctgagatttgctgagactgaaccttaggctcgatgaagaagaagaagaagaagaagaagatggtcaatgttgtgacggtggatttggaagccattgttatggatgttgtcggagtgagagtggtagttttttttctctctgtttattaatggtaggaaagtttttggtaattgcatatagatccttaaatgtatatgtatattttaatgttgcctttattatttattaacaggaatacaaaccctgttaaagagtcaaaattggtgaatttgaggcaataactgaacgttggatctcttcttggctaaaaacataaaagttgattttgatatctagtgactagagaggagaatctaacggtgcttgtgcaattttgaacacaataaagtcggtgatcgtgtgagtgtactcgtggacgcggggaagatcaatcccattttccatttgtgtgttcaataattagttttccaattctaaaataagaaaacaaattataaaaggacattgggtttaaactggtatggctcttttatttcacttaaccgaattgaatttacgaaagatatggttttggtttccactaactaaaccgatttcattataaggccttctctccaaaagacagagaaaagataaaacactgatttatgaagacggactgggtagaaaaagctcatatttagcaaagcaaaaaaatggaaaatcccaagcttcggtccattatacataaaacttttgttagagatttatcaaatatttatttactgccgtcatggagaagaacataaaccctaatacatggtcggagcttcttctagaccaccgatgttagcttttgtagaaactaaaaaaagggtcggggaaaactctttattattgtgttcttgatttcaatagtattaatacaatatatatagaacctaatttagatttaatctaattagaaatggaaatagataaatatgaataagtaaatattctaaatcttttaatcattatcgtaatggatatctaaaatattttttgatattggtttcacgggcttggtccgttgtcttacttcccaagttacttccatagccttgttctccgctacttcgtactaaacaataccgctgatatcaaaacgatctcgcacctccttttctcttcctggcggaactcgttcgagaagccatttcttttcttgggcgataaccatccttatatactcaccaatctcgtctgatcccttattgttcaagaaaatcttgatgtcgatgtcaatccctctaagttgggttttacagatcttgatcattcgtggactaaaactaggtcgtggaaagatccatacgaggcgttgcttaacacattggaagagatcgagcaggagatgcagtagtcggtcctctctctacattatcgattaggtcaagcacatatggttttagtgagtggggtcgtcggtgagtggataaagtccaactatgcttaggacggaggaaaccagaagatggtgacggatacaacagcttcggtggcaatggatgaagcagcacaagaaggtatgatggagctagtgaacatggatatgtaaaacgttaaacacaatcattacatttgttttttccgtttgcacatgacttttaaattttgatatatcgtacgtactcttatttatatatatatatatatatgcatatactatttattccttcataagttctatatatcaaacctagattttagaaatcaaaattcaatcccgtcaaaaataaataaacacagtagtttttaatcggaacaacaaattgtgagcacaaagtagaaccaagttgatgagcgacctatttaaattttgatatatcctaccttttctttatgcatatatttattctttcataaaatacattttcaaaaatttaaattcaacctcaaaaccaaatagaagtttttaatcaaaaccaacaaactgaaccctgaacacaaagtagaacgaagttgatagctagctaattgagatgtacaatctaagtataatgtaaacaaagattttactaataactacacactatatactgttgttatctcctgatatattatttctgtcttattttataactctctttaatcattctttacacatatttctattttttttttatctatctaacaatttctaaagaacatatgtgaatgatcaaattaattacagctttatcacaaaccaaaatagattcaagcaagaccaagaaaacagtatacaaagttctctagtgataaaacacaaactagaagatattcttactacactaatcactaatcattacgaagacttaaaattatccaaataataaaccatatagattacagaaatttccaaacccataatacattcattattactaatgtaacaactagagtctatattactaaccaaaattgtctcattgtcttctccatttaagcttcatgtcttctatacacaaactatttaagcatcatttcaatcactctccctctttctcatgtaatcgagtgtttcaaccataattgtcttattggatagcaaagctaacccgtttacctgattaatcaaagcaaagtttttgattttgtaatcaaatctaaacaccatacattagaacgttcttcaacttttgatctcgtaatcaagtttttgattttgtttactttctttttttttaaaccccaaaattcatgaacaacttaattaacgttttataaaactcgcgaaatatggtgaaaaaaagccaaacaaaaataaatttataaaatatacctacattttaaacgtaaaaggccaaaaaataattcatataatgtagtatctctagtttgatgccgtaagccacatggctttgtgtttgtatccactttttcgaatgtatgatattgttaacgaaaactatctgattcgtttgtctacaattgtgaacatcgatgtgtaaaatgtcaagacaatcgttatattcttgtttttcccgtttgcttaatggataatatggaaaaatgataatatatagaagtacaaactttaaaaaaggaaaaaaaataagaaattaaaaagcagtgcagaatgaagcttctgattctcctacacaatcatcaaaaacttgtttttgaactttccatcttcccccatttcaccaaagtcttgagaaacttcttcacctgaaacaccattacggtgttaccgaccaaactcatacattacaaatttacatatataacatagcatagatgatgacttagataatataaaatttgtacctcggaagggtctctaagagagtaaaatgcattgctttcttttggtacagacgataccaatattccaaatcctctgttcccttccctcagtaccttgaatgcatcttcatcggtcttgtcatctccgatgaagattgggaggaactcatcgttgttgcttaatccgagagactctaacagaaactctactgcttttcctttgttccactcaatcacaggacgcacctctaaaacctgatcatatcaacaaaactatgttaaggtatttggatctaatatgagaaaccagagtgatgtttattccacaagtacctttctaccgtgagttatacgcaaacgagggtatcgtttcaggtggtcatgaacgcgttgagcaacaagtggccagtccttctcgtcaacattacggtaatgtacagaagtacaaaacttatggttctctacttttgcacctttgatacatttagttatctcaacgaggttattataaacctcttcaatgacgggtatgaactctttagcaggctgaaagaggtttacctcctcaccctattcataaagaaaagattagcatttacaaaagttgattcatatactgtttttaagacaaaatgaggtcatgatctctcacctgttggtcagtggtttttatacaattagggtcttcaggggatccatttggatttacaggagtcataatgtccatcccgtgactacccgcgtaatagagttcggttagccctaccaattggtaaacctgcattaacaaactcaaaatgtattagtgttttgactattggttggcttgtactgatacaatgttatggttaattgttcagaagtcttaccttgtcacggcttctaccactaattattgctgttgggaagtacttggcgacatctttcacagcagcacgcatctaagagagatatagaaaacaaacttagccatttacgttttgagatcagagagcaaaactaacaaaacagagattttagttctttaccgcatcagacatgatggcgcgatcagggtcatcgactattggagaaagtgttccatcataatctagaaacacagctatcttcttgttctttgcttgagctgcaatatgcgcaaacgaggtaatcgctgaaggatacttgagctgtcaagattaaagaatgaaatgagtaggactaagaaaacaaaagagagatcaaaacatttgtgaatgaaaccattagatattattaacataccatccaggcccgttgagaaaaatcatcttcaggagcaatctcaatattgaaatccttgacaagccttttacgcggtggagacgaagatatcatcgcgtccaaccaaccgttagatcgaacatcatcgagtttaggaatcttctttctagaattcatcatgaatctccctgaagggaaggatgatccaagtcttgttttacttactggtgtagtagggtcactaagaacaggggtcgtcttgtttatattcaaatccatcgaactctccaaacaataaaatgcttcaaactaagaaattcgacggcttcttctaaacacactttatccaactcttttgtcaatgaaaaaccacctctttagtgttttcttatcactgcttgttgttgaactgtccattaaaagtaggttacctgaaaactgaaagatgaccacaaaacagaacattcagcaaatttgaaaagcttttttcatgagaacttaaaagtgaccgcaaaaccaaaaagctgtttacattaccttatcatctctaaatcttcaaatgtacaaagcttttaccacaacaacgctatcacacacaaacctgtatatacgaccaaaatgaccacacaaaatacaagatttagtaacttttggggtttcataacaaaggcttttttaagaaacttgacatgtctttaaagcagaacagaacataaaaagtcaaaaagaaagtcatgtgttacccatcttgtagtttaatgatataaagaaaaaggagggagccactgattttgacaagtaccgaaattttcaaactgccttcgtctataggacatctaactatttatttattaaagtgcctaccgacaaaaaaacttgtagcatactcactcaatatttgaccacatcacgcgttttaacaaatcaaccaattctaaacatgtccaattagttcctattttcaattcaagtctgtttaacttcttatacaatgagttttgcctaaaccaatgctcaaaggtacgaaagaacagagcaggattcaataaataaaacaaaaacatcattttgatgaggcaaacaaaataaaacgacagagagatctagaaatctcaatgataaaacctaaaaacagatcagaaacttaaaaatgtgaaacagaacactaaatgatttgagagaaaacgtacctgattcaaaagagctgtgtaaaacacaaaacagagctagagaatcacgagaaaaaaatgcagattttctcggaatctcagggatctcgaaaggagaaatcactaagaggaagatcagggattttttttttctttattcgaagaaaaccctaaaaattgcaaagagctcactaaaaatccggaatttggaaagaggaggagaagagagaaaatgaaggagatgggctttcgtatttatagagtccgattctctcaaaaatacattacaaaataaagcacaattaaaattaaattgtccgtttctcaaggagacacagagagagacgtggttaacaaggatatcaggctgtttttattgaatcccgaaaatacctctcatgtttgatttatttaccaactttgccatcagacgaccaagaccacattataaactttcttattattgtatttagcgagttcgtcattagtcataatattcggttgttttcttacttgttttttttttgttttgtggaatctttgaacaagtagtattatttacgtttcaaatctttggtgttatatacttaatttgtagaaaaataatttcttgcttgaccaaacgaatgggtcgttaactaatgtgtcttaaacggcgtgaagcagccgtcataacggctctacattcccactttttctagaataattatatagaaagaaaaaaaaaaattaacgacaaatttagaaaccgtgttcacaaaaaccaaaaccttaataaaaagaaacaaaacaaaaccgtgaggcggacgttagttgttagctgattcattaacgtacacgtggctacgagtcaagagaagtgtaaaaatcgtaggatccacgtgttcaactaataatggtgacgtaaccacgtgttagttgggccttaatgggcccataaaggaggaacttgcttttctagttcccatgtcacatactcacatcatcgtttgattctcattgcctttggttacaattacaatgttggcttgacattcaaccaaattaagatatttattctactgcaaaatatcaaaggacaaataagatgacagaatgacgtggtcctgacgctaattgggtttaaaggtaacgtttattaacggagtttagatgatgaagagtcataatcacaggacccataataatttagtgaccaaccaaagttttaagttgtaacttgcaagtggacctcaatgctgaataaacggttgtgattagctctccgtgatcacttttgtttagcagtgcatgcttgttgcctttttcgtggtggagttaacaaaaaagcataatataattaatcaattttaaccatattttcaatgtagctaaatataattctttttccccaaagggagaaaatcgcatataagtagattttggttttgtctgtgcaccggctttggaaggttcaccacgtgtatcctacgctgacgattgacgagtcgcaacaataagctgacgcaatgatgacacagctttactttacaataaaggacgaattcatgatttcagatttttgacaaggttccaaggaaaaagaacatttgagtattttgacagctagttcaatctcataccttctcgagtctccatttgattacaatttttttttttgttaactcattttttctgacaactgttaaacatatgtgaatatatgaattatgaaacaggacaaacatggattcagtggtgacagtttcagatacttggcctccttactagttactcattccaaagttcaaatttaataaacctaccacatactaatgtaattctacggttaaaaagacaaccacagtcatttttctcctctctttatagtccttgcaatattatgataacgcagaaaaacagcctgtactagttaaccatttttgttttatagaaaaaaaaaactgttttgctgtgaagacagcttgatgtgaagaaaacattgattcaataatggaaaaaaaacatgtgtgccgaccactaactctaagctcattttgtcaatgtccacatgttatcagagtgataatgataagacatcattatatgtataatgttataagtcatctgcatatgtgtctccacgtatcttcagtcaagcatacatcgtattattatatcatatgtgtctcaaattacatgatccggctactaaactacgcgacaagttttgtaaaataataaaaaaaaacttgtcaacatgaataatgcaacaaattttgtgagtgaaaattattgttgctaatttagttatgcaaacaactaactgcgatttataactagtgacaaatcatgcataaatctaccataagaatatgtatgtatattagtatattacagcatatatatggtcgtctctcggaaattaattttgaatagtgataaagcttgtaaccaccatataagatattgaagtgtctaccaaatagaaatcatgcgacataagatgaaagcagtacacaaaaaccacttcattataacaaatgtaatttgattgtatgaccatggactctgattacaagatccaatattaaagatccaaaatagatatatatatatatatatataactcatagtataccacatgtaacgtgactattattgagtttttaattttatattttgcaaatggttagtaaccctataaaaatgattagttttgttttttcttggtcaccaaaaaacgattagttattaatctaccgaataaataatattatttcatgtgaataacatttctattctaatatcatattgaatgtaaccatttctatttatatacacatgtacaacatggcagccaacaacgattgaattgaggaagcatattactctcgttaacgaaatgggaagaagtgataagcactaagtctactgaataaataatagataccaacaaagcattgagaataagtcgtgtatcttgttatataatatgtgaccagttggtcaggccatgtataatattataaattgcatgagtattttcgatgatttccaaaatggttggtatgtctctatttacccaattaattagctccctcgtttatttttaggtgttactatacttagttggtcgacgcggacgttattttcaaatctttatttgtttttaaaatagttgttgaagattattagttgttttaccgtatgatttagctaagccatttaaaaaattcgaaacaatcccattattttgactcttaagatcgtctttgacaaaaggagagacttcaatacaaagactatctgggatttttcttgggccgcataatgcttcttagatatggcatttttgggcctatcgatgggtgaaactgtaattaaatatccattttggtttagcatatttaatcacaagaatgcaagattcacaactaattataaactttaatttcgaaatggtattaaattggttattatttggtttttgtagtttatgaacttagaaattcataaaaaaatgtaatgaaaagtttgaactgaaaacggatttaccctaatagtaaagttaactcaaatgcaacaatctcaacttcattacttcaggtgattaagaatttgacataaacctttgacaaaaaaaaaaaaaaaaaaaaaaagaatttgacataaacacaatgatcatttttgaagtatttttgttcttattgcctattttaaaaggaacattagaatttgttttcctctcactcaagacaagagcaatagaaaaatcgccaaaaggccccaaacccaaaaacattatcaaagacactcttcaccacactttataagcatcaaaccaaagtaacaacaagaagtaactgaacgtaaagaagtttaatccgtaacataatctgtcaaaatacacacaaattcttattttctacaacctccaacaaaaccctaatctgacaaaagagagattttaattgggcaaagaaagaatctcaaaatcttgaagaagaatctgatctttaaacccagcaagaaactgacataaaccctcaagaaacagagccgcttgatgctcacttgtagctccaacaatgtccataatcacactcttcctcaaacgattcgcatcaacgaaaatactcacaagctcttccatctcaatctttgctgcttcatccaccgacgttgaagccgtcgcaaccgtcgcagtaagcttcttcttcttcccaacttgatacgacgagacccaactctcagaaactcgagccacgaaacttctctgtgttttcctcatacgatccattaaaccaggaaccataagtctcattgtacactcaatctgatcgattcttttaaccaactcatcagaaggatctttccacgccatcgtcatctttaacggttgattcacaagatcaagagaagtttcctcgtcttcgtcgtcggaatcttgattctcacggtcgatgaaagaacggaggagattggtgaggaggtaaggatggatatcgccgaggaaaagaaacggagtctcgagagagttacgccatgaagggaagagaaggtaaggaatggtgttgtgatcggcagcaagatctagggtttcgtagtataagactaggtgacggaggacgaggtctacgttggaggagaggacggaagcggaagcggcggaggaaagtgattgacggaggagagggaggcagttttcggttagggtttttgaccagtcttcgtagaaatcattgaatcgacgagatggtttcttgcgggagaagaaagagaaaggcattttcttggagagtgaagaagacacgaggatcgaggatttctgaaagcttttcgtgaggttttaatctgtttttcacattttacgatcattgttatcggtttaagtgaaaccaaaccgaatctcctaaattcaatttagttggtttaatgaccataaatataccaattaacaagcccttgtctaaatgggctttttcttgaaccgtggtattttataggctctctctaccattggatgaagatggatcttaattcttacagataattgaaataaatattggaattaacaaaaatagaactaacataatttgtttttgtttttttgttgaaataaagtgaaaacataaaattggtaaagagtttttttttttttttttttaatcacaacatacgaaaggttaacttgaagaacacaactacaaacatgtgaaaacattaggaatgtttatttggagaaatagtacgtcttgtttcaacacgagcttgtgcagcagtgctagttcggtactcatggtgaaaagaagttttggtgaaggtttttctttttttctttttagattaagaacagagaagacaatctcctatagctgaagcagagattgtaagatcgaacacaaaaccctttagtagttaggtttaggctcttgataccatgtcaagaatctatagaagttgtgaaagaagactcttattgattacggtagaagacaatacctttatatacaagatagcttagacctaattgatctatacaacattaacaatatgtaaatgggctaagggcctcataacctagcacaatagaaaagacagaactatatagtccattcggtttcaagctgacctaatagcattgaaaacctcttgaaataacaaaaatagaacaaacacaaggtaaagagtattttactatgtcatctgaaactaagagtgttacatagagacacattactttccttatagggagcactgctttttagaaataggcccaactattggaaatttccaaaccaaagcgataagcatgaaaccagattatgagttggagcagttgttgtagcaattgttgtaatagtacgaatgttttcactttattatatttcagcaacaactacgatcatgctacacatatattagagagccatacttgcaccattattatatgataatacggaaatttcgttctctctgcatctgaaaccaggtgggggatagtccgctccgcaaaggctaagaacttgaacaagtcccacagtgaatggataactgatgccatatattttaatggaatcgcagatgcagacagatgccacataggcgtcaagcccatccacgagagtgcaacatggcctcactgtttgatagttgagaatcctgcccaggccaaacacgttgctacaagcttcgatgtcccttggacatgtcggaggttgggccacggtgaagccaaataagatgaggttgatggtgaggaagaaagctgtagtgttctttgaagccatgttttaaaactgctaattaagcttttgaatcaatttttttttattttgtgtttggagagaaatgttgagtaattagttttggaggtgagggcttggatttatagtcttttagaaagtttagttgcttactatagattatagaatatgattaacaattatctaacgtctaattaaaagtccactacaataattatacatatagttaataaactaaagtaagttttggtcctacatgtagcgagcacgcgttatatcttctcaaaacaatgtgaaaagtcaccatgaaatttcggactacttaaattgctcttataacttaccgattataagatagtattatttcatgtgaacataatttctaacaataagttaatgaaacatattgctcgttaaagaaatggaaagacgtaagcactatatagattaaacaaatcctcgaaactatttcgtgtatataacaagttataatatatgagcagttggccaggccatatttaatattataaatcgaatgaatatctggtgatttcaaaatggttgatatatgtctctatcagttgtacacataacacccaattaatttaatttaactcccacgtttatttttagtactatacttaattagttggtcgacgccgacgttattgtcaaatctttatttgtttttaaaatatttgttgaagattttaagttgcccgtatggttagccgaagccatttaagcgtttcaaaaggattaatcaaattgtttcaatgagtttctcttgtaagctatattgtattgtacgacacgtttaagatgacttcaaactatgatggttacccttttctattttatatttagactcttgatcctagctctttgacaaaaagaggctatttacaggtctaattgggttcttcttgggccacataatgcatatacgggtcgaacttagggtacgtgattaaatacccattctgatttaacatattcaataacaagaatgcaagattcacaaaaacacaaattcgaataggaatcaaacggtacttggttttttattctgtttctatagtttatccacttagaagttcataaaaactgaaaattttgaactgaaaacggagtacccttattgcaatgttaattcaaatgcagaacaatctcatcaagtccaggtgattgagaatttgacaaaaacaaaaggaccatttcccaagtatttttgtacttagtgccattagaatttgtttactctccctcaaaagctataagaaaacagaaccatcaccaaaaacattatcaaagatactcctaaccacactttattagcatcaaaccaaagtaataagaagagacttaaagaagtttaatccgtaacataaccaggcagaggcacccaaatctacaagaagatcttgagattcgtattttctaataattccaacacataaacttcacttataataatttatgaaaaaatagtggtgcatattgagaaaccgatatgctagactagaactaacctactgtatttatgtagccatgataaaagtttattctaataatcattattcgcatttagttggcaaagaaatattttcatttgttcatttcctgaaatcaagtaagtgaatagttcgaccatacatatattgcaagatgccaagatcaatatttttttttatttttttattttggacaaagcaagatcactaaaataaatatatgattacataagttaatcttttttttctttcgtaagtgaatcttactatacgaatactatttgatgaagaattcttaactactttggtgttggattctattggttataaaattcttttcacaaaagatcaaaaggataagaacatggttatagatttagcagcaaaatattgagatccgatccgtgattggtggattaccaacaaagttaataaaatttcataaaaatcgcatctcattttttatttttaattgatcagattgtcttcttgtccccaaacatatctgacgttttacttaccttagtctctcgctgtttgtattttgtttgtgcatttagttcaactgttacagtgttgactgccacattgtcattcttattcgggtcgtttgaccttggctcaatccctagacatagaaacgaagattccgatcaaaccacacggcacaacaccatcgcaactatttatatcctcttaagtacactctttggttgaatctgtaacggcttgatgaatatatgtttggacacaaaatagtgacttctcgtctagatgatgcattttcacaagcgtttctttgatattgtcacatctcgaatttttttaaatgcagtatctaatattggatttcgaaggcgatatcagatatagtctttgaaaattcgttgcatacacaaatgtttagctaaatattgaaacgattgcatgtattggttttacatttgaaagttaattaacatcactagatattttgaaaatctttttccatcattaaaataagataagtttttacaaaacaacctcaatgtttttttatagaactgctgttattagtttttccttgcaatgtcccctctagatattcgattcctttttcggtcgggtccggaggattcatgtggtctaattagtaggagtattagttattaagaggaataattagctgacgctatatatatatgaattacaaataataaagtcatgttttagttaagaagtccatcttatcatcaaaagtaacatctttattattgagttatcatagctagtgaagacatataattattaactatcatgtgaagctttttcgaactagttatctaaatattcctcctggattatttggttatatcccaagatctttattcctttgttggtggatagaatgctaatttgggttggatttttgctgttgtccattattcatatatatgatccataatgtatcagtttcttggattaagaatttaagactactgagtaagttacgttagaaagatagtcaaaaccaatacacttattcatgtaaatttcttacaataatcattgagtttagatttttttctttcaaaactactcgcaggcattagttcataatttaagaggtttttcaactgtaagtatcaagtatgcaacaactcaactatgatttatccaaataaaaactagattgtgcacgttagctatatgacattgtcataaatattttacaaaagtataagagacatccatgacggatgtattgtaccaaattcttcaaaattaggtacacaaaagtacataaatttgttactttcaattcttcccatcgataaagcctcccaatttctttctttccattttttctttttgccaaacagatacagttttcttctaaataattttgtaattaattgtttcttctaaaaaaggtggtaaatatgtttatgactttctgttaaatttataaattataatttacaattttaaaacataattcctgaacaatattaaatcacttaaaaattctgtaactagtggaattccggccaaaaaaatctcagacacgtaataaaaatatgtcttattcatatgaatgaaataaatattataatatatgaagagaaaacaagaaaaggaaaaaagaaagaagaaggcactttctgtgaaccgaaacatgttacgcagatcgcaggcgccgtgccgactgccgaccaaatcctcactccatgtctctccaacacacatgcttggcttttgtcatcctcattatccgattatttttaaaaataaattctcataatattgtgaaaagttttcatttgatctccatatctaagctatatctttaaacatggccctttgtgttatcttttatcttctatatattatagatcgacatctcttatcaaaacacatatttttaaatttggactaagacttaattagtccatatacatagactgatagacacacccatatgtgcatgtacactaaacgacatattgcacataaaaatgatgaaatgagtatttgttaataacaatacacgacaatcggatcttttagatgcaactacaacaagaagcatattttttactcataacgatcagaaaagtttgagtgtagctactgtttttattttgtcatgttaaggaataatgaacacacatatatatgacatgtcaagtactttcgatcggaaaaccaaagagttttcgtcgacctatctcaagtttgcattttaaattacaacgaacttgtgacagagaaaaagaaaagaaaatactacaacgaaacttgtaggtcaactcttaaattgcatattaccgtacgaatgtacatagttgagattgattttgttcaaacgttttgctcattaattgagtttgactattcaacaatgaaagaacccacacgaaaaggtccggtcactaaaaacttaaagttaatttattaagcttggttgagtactaaccagcaccggtctatagactctcgattcagaacatctcccttatgttttttcaacatcggaatgtcaaatttttgttctcaaactgtgataaaatcgggaataacatgttatatttgttttcaacgatttgacaaatattcttgaataaagagtttggtcttgacacaacgtagcctcgtggcataaaacatcaatcgaagaatcgaaacacaaatatctcgtgatcatacgaagaagtaaaaacgttttctttttttttaaaaggtaaaagcctaatgctggataatcaataaaatatttctaaaaacgaaaatgaacttaaaagaaagagagagtaaaaaaacaaaaaatatttttgtattagtgacatgttaaatttggagaactatacatcatgcacatgtatacacgcacgaacacacacattcaacggtcacacctcagaggctataaaaagaggttgctttgttctattctcagcatcaaattcaaatcagtactcttcttcttcatcttgaactgtaacacaaaacacagagagagagacatatttttgaaaacgtaatttcagacaaacccgtttcataatttctccaaaaggtttcattttgttttctgggtctctgttttcttggaacctaaacaactatgaagaggctccgaggttttaagatcggacacagattcgtcaagatcttcaaatggataatccgaagtagaagaaaccaaaccgggaaacgccaatgcctgaccggaattctcaacccggttacaaaaatctactctttagcacggcggtgtctccgtcgtggagctaatagactgtgcggaggaatgaaaccgggtcagacccggcttggtaacgaaccgaagacgccgacagttccaagagggcatttagtggttcatgtcggtgaatccggtgaggatacgcgacgtgtggtggtcccggtgatttattttaaccatcctctgttcggagagttgttggaacaggcagagcgggtttacgggtttgaacaaccgggtcggattatgataccttgtcgggtttcggattttgagaaggttcagatgaggatcgctgcatgggaccactgccgacgaaagagcacttttaagattctctaatttcactctcatttttaaatatatataatttaagttttagctttttttttccataaaaaaaagagagcaaatgtcaaattagaaaaatgagaaatttcctatagtttgtgtgaatatcagttttataagttatacacattacccatacattttctatgttattcaaacacagatttgtaatgagagaacatttatttcatcaatttatttattttatatatcatcatgcaatgatgcaaagaccttacatatttgagataatttttattttttatgtcttctttgttttattattagacacaaaaagtgattttggtataaatggtttgatgtctaatatctatcacgtatcaaatattgcataccaacataagtaggtcaagattttctttgcaacatgggggggtttagttataaacttatctcggaatcattttaaagttattaacatgtgaaattgatcgaagttcagaataaaatggtgctccatatcgtattctcggatgctgctggtttttacttttgagtaagcaacaaacgaatcatggttgggttcatacaaagatattttaagcccaacagaaatgcaaattcgaagcccagctacccaacaagagtgtcgacctcttcaacaaagcaacaaaacagccgtacggaggaaacatctgtacggtcaatttattcaggtaaaccgaaattgttttaaaatctaagcaagttgttttattcatatgaaaatggaaatattctataaagaatgatatgagttctttggaatggtcaacgtgaaatcagattaaaccgatctaatttgttttggttcgattggtttattagtttatttgagctagtaccggctttgtatttgtgtggatagatcggttataaacaggttctgtaggtgtggcctcacgttttagacacaaatgctccgcaggccgcacgttgtacttgttcataaactttttacgctgcatcacgttgttactgacgtattcttctcatgacatagttatggcattattatgacataagtgacatatgattattaaatactatgatgttttaaacatagtttctgataccctatcatcctaatgctaaatattcattaaagaaataattaggatactaaaattctaaaatataaatcataggaattttttcttaaatcatagtgggagatttttaagtttctgtactctctattaataccgtacatcccgaagaatcctatatgcagaagttgagatcatggcttacacaaacaaagtagcggttgcggttggagcagcggtggtgtttctcgcggttgtgatgaatccgcggtggacagaggcacaaacgtatccaaaattggatcgtttatgtgtgatgatgatccctgacattctggaagaatgtttcacccacgatagactaaaacctacggaagactgctgcaacgatctcaaaaatgcgactatgacgcaggttgattgtctttgtgacaacttcctcgaaagtctcagtttctctgacctttcgagaactttctccgctggagttttgaagaagtgtgacgtttctcacaaatacatgtgccaggctgctaagaatagaggtaacgcaaccttttcttttctgtcttgtgatttaatcatgcatatatggtaacttataatatattttggtttttgttttgtaatgaaggagaagcaaagggagggagaaacagtactactacctgcgacaacagcattaccaataccagtgtaggaggaaagaacaaggttgctacatctatgagtgcttttggtttggttgcgattctgctttttgttatgttttaatttcaattttggaccgacctattctatgtgaactttcattttatccccttgtaaacgctaaaacaaacacgtttcttttactgtgttatccgtttgtatttgaataatcatatcttaagttaatagttgtcaagcaacaacatgagaaatcgaatccaaggatttgttttatttgtttgtgacatgggttatggggttagttatgatttatttatcatgtgggattaatcggagtcagaacaaataaatacaaaacagttataatataaaacagttactcaaatagaccaagatctaatttcgggtcatttcttggttagtttatcggtaatattaacaattagctggagtagctcagttggttagagcgtgtggctgttaaccacaaggtcagaggttcgacccctctctctagcgatttgttatttttaaattttgttttaaaaaaaaaaaaatgataaaacgcaatttgctcttacgcatgaatctttttttttccttgcatctgacttctttctttctttggttcttaatcattttaatacaaaactttgtaccttgccattgaaactttttttttttttccattgaaactttcagcaaagcttttacaaagcaatgatacctagtatgcaattttgacgacattggatgattctacgaaagtcaagaacgaagctgatataactatatttcttaatggtgataacttatcaaagccgtgactaaattcaatttgtaatcaaactaatacaaaattgtaccttgtcattgaaactttcctgaaagcttttacagagcattaaggaacccaaacaactttgaaaaactgaatgattctgagaaagtcaagaaagatgtgacacaactctattaattgtgtgaattaatgtcaagttatgactaaattaaatatttagacttagggcttttttcattaaaaatgatcatgttgcattttagagttttcttcttttagtttcagagaccaaaatttaatgagtacgacatgatttttttttcttcctttttcttgtattcattttcttcgccatttcgcagttatgtattattatataatttaaaatttatgatatgaattataaaaatgtgcaatatgttctaaaacgtctcgagcactcaaaagtttaggcaaaaccatgatttccacctctcttgcttataaatcttccaaaatttaaaacccactagcattgcgcctctcataattaaacaacgtctgaatcactatgcacgtcattgttatcaatgtggatgctaacgaactaacgaacatatgttaaattcgaatggactaaaatataggcaaaaaagaattcagaatttctattgttacaataaaataaaatggccatttgatgcttgttttgcatcggtgttacaaaaagaggtcctcacgtcatatacacaaatgcctcccccgaaattaagtttgttttcttgtagatatatattctcagaacaaatcaaatgccatatagaaagtcgtacacatttggtcaacattgtgaagcaaagtcaatgcgactaggttattattttgattagttataccaacacggtacataccaagactctatataaatgataatgtattttggagaagtcacatacaaaattaaataagagcgaaccactggtcgttcaaaaatatataagaaaatattaaacctctgtttttgctggcgatcatggcttacacaaacaaagttacgatatcagccgcggttgcgacaatgatgctgtttctggcggttacgatcgtggatgcacagtcaatgccaccaatgccaaagtttaatcctgtgtgcgcgttggcggatctcccaaacatcgtccaactttgctactttaacttggatttgacgccatctgaagagtgctgcaatgatctcaaatcgtcgagcacgatacaagtgaattgtctctgtgacaatttcattgcacatccttccaatggcaatatctcgcaagctcgctacgacctggtcaacagcgcctgtggtgttgccgacaaattcgcatgtaaaggtatcttttaaacattttcatggcttgtcccttagtattttgttcaaactacattatgttttcaatagaacaaaaaattagagatatagtaccgttactgattccgacataattttttaaaaaagtttcataaaaatgcatgttagtgtattaaataatgcatttaattcataaatatgttgaatgtgccaaatttgaaaaatgtatagacgaaatatgttgaatgttaattaaaaaatatattagaataggggataaaagtaagatgagattgtaaatccataggttttgtagattcttaatgcaacatgaaacaaaagttgttgtattattatggtgattaattgattttggttttgtgtgtggtaaaggaggagacgccagcggaggatcaacgaacaagattgctgcatcaatggttctacttggtttggttgcaagtctgttcttttaatttatttcaatttggccttccaaattctatgtaattctaagatatccccgatatatatataagaattatggtataaaaggaattgttcagacaatgtaatcatatatgaatgatatacatagtatataccacttgtttacgttttcagttttcatgttttgataacatgattccgctgttttgtaccattcaaaatattcatcatgttttcatgttttggaatgtgattttgctatttaccactagtgtgttaaaaatataaattaaagaaaagaaaatggtgataatctaatcaaactagctggctttccggcgttttacaattatttttcttaaaaaaatctagtttagttcgttccactaacaactattctttaattcgattattttgttaattagctaacataccggtcaggaatgtttttaacaaatatacaaaaaaaataaaaataggtgacataccagtcatgaatttatcatataacaaatatacaaattaaaaaaaaaaaattagatataattttttagtgttaatattttgtgcaccctcacaaagtaatatatgttattaaacatagatttatatatctcttagaaactacttgatcaactcaaattaaataaagagaaaaataaataagagtacttgatcaattcaaaatacattagtaatttagcagttttgtatcatttgtcaatcgtatgagagaccccttctactactagctagcgaagacctacagggcaaaatgcttccactagccgtacataaggttgaatatgtactagtgggttcaaggtcaaaccatgcttgactcagtatttttgctggctggaattttattctgaatgcgtcaaaatgaatggtgaggtaatggacacagaccattcacttgtgacaaaaattatttgctttttttttttattaatagtatcaataatgtacgtccaagtacttcaatatatatgataatgtacttttgatttttgataagtcacatagggaagaaaaaaaaataagtgggctaatagtcattcaaactaaaaccctactatttttgggtttgtcggagtcagatactaatcatatatggcttacaacataatggcggttgcggttacagcggtgctgtttctagcggttgtgatcgctcctcagtggacagagacaaaaaaaccaccacgaccgtcggatacatcggatacatcgggtacatcgggtagagacagacgtacaatgtgcccgttatcaatccctggaatcgtccaaaattgctacgcaacgttaaatgcgtttccatcaaaagaatgctgcaaggatctcaaaacggcaagcaagagagaggtgacttgtctctgcaacaatgtcattgcacatccagatcctctttacaccaacaccaaccaagtcaacaaggcatgtggcgttcttgacaaatacgcatgcgacggtactttttctttggttttccttttggatcttttgtggtttatcagaagttatagttttaatcttgtgattgatttttgcatgttgttatgtagttgcacctacttttactattgtttacactaattatgacatgatcatcatcgctgttatacaagatccataaaaagtaaattaaattaaaaatccattaatatattccgcggttttgcaaatatcttaaaaaatagtacagtatcttaccgtaccatattaattagtgcaatcttttgtcaaagataattagctaactagtgcagttttaaacaagacttatttatggtatctaattgatttcggttttgtgtggcaaagcaggcaactctaatggaggagcaacgaaaaagattgttgcatcaatgggcctttttggtgtggttgcaagtctgttcttttaattcaactctacaaaattctgtgtaattgttcttctcatcatttttgtttgttttcaaatctgactactcgaacatttatcgaatcaacaaaccttaactttaataattccgcttcgtcaatgttggtattaaaacctggtctgcgtaatttgacagatgtgtatagattattttttaggtttgcattggttaatgtgattatcacgtcttcatacaaatgccccacccgaaatttcatttcaatatatattatggtaagccgtacgcagatgcagatcatttaaacatatttgttactacaagggtttcaatattcttatcaatttttagtaggtctaattaagatgtccagttatatacatttaatttgaattacagtggatttaatgaaacataccaaagtacatacattcaggtcaaaggcagtgagatattttattagtagataactatactagcaaaaacaacatactgaagaagcaagctgaaatatattttggtttgcgatgaagttgtaatttgaccattcacaaatgttcttaagaaaaaacaagaattgtttcataaacaaggaaaaaaaaaaaacgcatcatcattattcattagctaacagcaagaaattgaagaagcaagttgaaatcatcatgtatgcgaaaagcttggtaagaaccatcgagcagagagttcaagtaacgaacaatcgaaatcaaatttgtgcagtggctccatctcccgtgtctcgtaattgaacagaaagagatcttttgtggtcgtgtcatggctatcactgaaatatatagtatttctatggagtccctcaacttcattggcgagcacggtgatgcctagatccaaaagcattgcctcgtcgcccaaagaatcagcaagttcatatttatcaagaaatgtccctgacgaataaaacttgtagacgttgaatgactggattctagaccaatgtcttaacattctttcaaccaagaggacatctccggttactgtgactacaagttttgtctcagcaacgcaccatgaattacttaattgacgactacgaggacttaaccactcagatctatagacatgcataaaacattgaaaggcttttcgaggaatctctccagaaaaatctaggattgtgaaaagatttctgtagctaaatgagtaaagcttgtgatccttgtaaaccatgtcaagagaatctaaaataatttctggaatttgattccacaacttatctccgttcttggcataaaccacacaccaatatccaagcccccacagagctatgtactctttggttttctcgtcaatccaaaacacaggggtacgtacggtattattacctttgaataacttaacgtggttgtgatcgtcgaaagttagaaaatcatcatctatggtttggtcaacctttaccatgccaacttgttgtgattcaatagcgggaagaccgatcttctcgtaggtgaatggattcaaaatgtatagattatactttgaatcttgcatcaggagccaacttccataggttgctagacaaacactctttgcaaattcaacaccaagatcttgcgtttggtaaagttggtctttgtcctcgggattgaaaaaaatcgtgcatgaactgtttttgttgttgtttttgtctttggggaagagcatcagccaagggatctgatttttgggcacggattgtttcgaagcagagtaccaagacgaacacaccgatttggcttgtcgaaaattagcaaagctgaggcgtttgaaaactaagttcaagagatctagaggaagatccgaccaggtattagggttttggttcttctccatgaaaacgacaatatttgagatatatagagagagttctcttatcaacaaataattatttgagtgaggagatatctctaacaaaagattttataaaccgaatagatctcggaatttcatggtttgctttgttaaaatatgggcttttgtgaaattccgaaatattggccccattaattaatcagtatatattttgttcacttggatccaataaggtgcaagacatgaagagagaaaggtaacataggtgaacgattttgttccctaaataaaggttcaattcaacaatgtgattctcacgtcttatacacaaatgctccaccataaatttcatttcattatatacctattttgacaccgaaaagagtttggaataaatatacctattttcttcttaggtctgaaatgtccagtaaaatacatttgaattacaactgatttaatcatttaatgaaacagaccattagttatacatatacacgtcaacggcattgaaattgtattagtattcgcctttcttcatatatgattagaatgaatgaactgtcgaatccatatcaatgaatatttagttttgttataatcctaataaagatatgatctggattatattaatgacacatatctttgaattgtcagggccgtccagcttatattgattttcgacattctgtccttaacaacttcttcgcaaaacattccattttatgtattaatggttttattttaaattggcttccatatatatacatgaacatgccacataaaatattcattctcaaaatgcgaagaacatgggtactggcggaagaaagctgtaagtttttaggtcaactatgtaaaacatatttaataaatagtaatcaacaatctacatgccaagactcctatataagttaatgcagtgtttaagaagtcacatacgaaaaagaaagtgagataataatccaaaaaaaaaatccatatttttgccaacgtttttagacgatcaaatggcttacactaaccaaatttcagcggttgtgtttctagcggttgcgattgctccgctattagctgagccacagtcaacgatgtttccagagatgactcctgaatgtgccacggttatgcctgacctgctcgaaaagtgttttgcaaccggtagtgtgacgccaacagaagattgctgcaccgatctaaaatccgcaacctcaacgcaagtgacttgtctttgtgataactacatagcaaaccccgccgtttcaaacatcaccggaccttactccaaagcaatcacaactaaatgtggcgttttcgacaaatactcttgtgacggtactagtaaaggtacgttaccaactctttcatgttatagtaatttcaaacaagaatggtgcgttcatggtaattaatggattttggttttgtgtggtgaaggaggagaagaaaagaaaggaggaagcagcagtagcaatggtaaagacaatggcaagagtgagggaaatggaggaagagcgaactcggttgctgcatcaatggctatgtttggtttgcttgcaagtctcgtcttcgtaatgttttaatttagttatttgtattcataccaaattttatgtaatttttttcttcttcttcttcctttttccttgaaagaaaatccgtgaacccaaaacaattacgtacgtttttgagtctataacattttatctgcattattttagggtgttttaactttattgggccttattaacgggcttatagtggcccacggaaaaactcgccaacaaaataagccggtttgtaaactaattttattccaatttcaacattttggtttttgttcaattcgattttccgcaaataaaaaagcacgaagccggtccaaaaccggcgatgcttatccgtttagaaatgagaaggtactagaacaaaagccttattcacttccttttgttccccaaattctcgaaatcgaaacacgacttaaaacgaaaaagacgagacttttaacactcagacctaaaccaacactcttcctctttctatctctctctcgccgatcggaagcagatttttctcaaaaggatggattcaacgaagcttagtgagctaaaggtcttcatcgatcaatgcaagtctgacccttcccttctcactactccttcactctccttcttccgtgactatctcgagaggtactttcgatctaatctctatgcttagtttgtgtctgtggtggttaagagttagtaaagtattgatctttgagtctatgtttgtgtaaagtgtattgccctgatctctagcgaaaatctgttgtggaattgataaaccctttactctcttgtggatgaaagttcctgtctttggttttgggttcttagaatttgtgtctgtgatgttttagtttagtaaagtattgatctttgagtctctgtttgtgtaaagtgtattgctctgatctctagctgaaatctattatggaattgataaacccttgtacctttgatctctgtgaggctattctgtggtttctgatgagttttgggattttttatgatttcagtcttggtgctaagatacctactggtgtccatgaagaagacaaagacactaagccggtatatatttttttgtttggttcaattgaattc

SEQ ID NO: 613 - DNA, 89350 bp, Arabidopsis thaliana
aagcttggttgagtactaaccagcaccggtctatagactctcgattcagaacatctcccttatgttttttcaacatcggaatgtcaaatttttgttctcaaactgtgataaaatcgggaataacatgttatatttgttttcaacgatttgacaaatattcttgaataaagagtttggtcttgacacaacgtagcctcgtggcataaaacatcaatcgaagaatcgaaacacaaatatctcgtgatcatacgaagaagtaaaaacgttttctttttttttaaaaggtaaaagcctaatgctggataatcaataaaatatttctaaaaacgaaaatgaacttaaaagaaagagagagtaaaaaaacaaaaaatatttttgtattagtgacatgttaaatttggagaactatacatcatgcacatgtatacacgcacgaacacacacattcaacggtcacacctcagaggctataaaaagaggttgctttgttctattctcagcatcaaattcaaatcagtactcttcttcttcatcttgaactgtaacacaaaacacagagagagagacatatttttgaaaacgtaatttcagacaaacccgtttcataatttctccaaaaggtttcattttgttttctgggtctctgttttcttggaacctaaacaactatgaagaggctccgaggttttaagatcggacacagattcgtcaagatcttcaaatggataatccgaagtagaagaaaccaaaccgggaaacgccaatgcctgaccggaattctcaacccggttacaaaaatctactctttagcacggcggtgtctccgtcgtggagctaatagactgtgcggaggaatgaaaccgggtcagacccggcttggtaacgaaccgaagacgccgacagttccaagagggcatttagtggttcatgtcggtgaatccggtgaggatacgcgacgtgtggtggtcccggtgatttattttaaccatcctctgttcggagagttgttggaacaggcagagcgggtttacgggtttgaacaaccgggtcggattatgataccttgtcgggtttcggattttgagaaggttcagatgaggatcgctgcatgggaccactgccgacgaaagagcacttttaagattctctaatttcactctcatttttaaatatatataatttaagttttagctttttttttccataaaaaaaagagagcaaatgtcaaattagaaaaatgagaaatttcctatagtttgtgtgaatatcagttttataagttatacacattacccatacattttctatgttattcaaacacagatttgtaatgagagaacatttatttcatcaatttatttattttatatatcatcatgcaatgatgcaaagaccttacatatttgagataatttttattttttatgtcttctttgttttattattagacacaaaaagtgattttggtataaatggtttgatgtctaatatctatcacgtatcaaatattgcataccaacataagtaggtcaagattttctttgcaacatgggggggtttagttataaacttatctcggaatcattttaaagttattaacatgtgaaattgatcgaagttcagaataaaatggtgctccatatcgtattctcggatgctgctggtttttacttttgagtaagcaacaaacgaatcatggttgggttcatacaaagatattttaagcccaacagaaatgcaaattcgaagcccagctacccaacaagagtgtcgacctcttcaacaaagcaacaaaacagccgtacggaggaaacatctgtacggtcaatttattcaggtaaaccgaaattgttttaaaatctaagcaagttgttttattcatatgaaaatggaaatattctataaagaatgatatgagttctttggaatggtcaacgtgaaatcagattaaaccgatctaatttgttttggttcgattggtttattagtttatttgagctagtaccggctttgtatttgtgtggatagatcggttataaacaggttctgtaggtgtggcctcacgttttagacacaaatgctccgcaggccgcacgttgtacttgttcataaactttttacgctgcatcacgttgttactgacgtattcttctcatgacatagttatggcattattatgacataagtgacatatgattattaaatactatgatgttttaaacatagtttctgataccctatcatcctaatgctaaatattcattaaagaaataattaggatactaaaattctaaaatataaatcataggaattttttcttaaatcatagtgggagatttttaagtttctgtactctctattaataccgtacatcccgaagaatcctatatgcagaagttgagatcatggcttacacaaacaaagtagcggttgcggttggagcagcggtggtgtttctcgcggttgtgatgaatccgcggtggacagaggcacaaacgtatccaaaattggatcgtttatgtgtgatgatgatccctgacattctggaagaatgtttcacccacgatagactaaaacctacggaagactgctgcaacgatctcaaaaatgcgactatgacgcaggttgattgtctttgtgacaacttcctcgaaagtctcagtttctctgacctttcgagaactttctccgctggagttttgaagaagtgtgacgtttctcacaaatacatgtgccaggctgctaagaatagaggtaacgcaaccttttcttttctgtcttgtgatttaatcatgcatatatggtaacttataatatattttggtttttgttttgtaatgaaggagaagcaaagggagggagaaacagtactactacctgcgacaacagcattaccaataccagtgtaggaggaaagaacaaggttgctacatctatgagtgcttttggtttggttgcgattctgctttttgttatgttttaatttcaattttggaccgacctattctatgtgaactttcattttatccccttgtaaacgctaaaacaaacacgtttcttttactgtgttatccgtttgtatttgaataatcatatcttaagttaatagttgtcaagcaacaacatgagaaatcgaatccaaggatttgttttatttgtttgtgacatgggttatggggttagttatgatttatttatcatgtgggattaatcggagtcagaacaaataaatacaaaacagttataatataaaacagttactcaaatagaccaagatctaatttcgggtcatttcttggttagtttatcggtaatattaacaattagctggagtagctcagttggttagagcgtgtggctgttaaccacaaggtcagaggttcgacccctctctctagcgatttgttatttttaaattttgttttaaaaaaaaaaaaatgataaaacgcaatttgctcttacgcatgaatctttttttttccttgcatctgacttctttctttctttggttcttaatcattttaatacaaaactttgtaccttgccattgaaactttttttttttttccattgaaactttcagcaaagcttttacaaagcaatgatacctagtatgcaattttgacgacattggatgattctacgaaagtcaagaacgaagctgatataactatatttcttaatggtgataacttatcaaagccgtgactaaattcaatttgtaatcaaactaatacaaaattgtaccttgtcattgaaactttcctgaaagcttttacagagcattaaggaacccaaacaactttgaaaaactgaatgattctgagaaagtcaagaaagatgtgacacaactctattaattgtgtgaattaatgtcaagttatgactaaattaaatatttagacttagggcttttttcattaaaaatgatcatgttgcattttagagttttcttcttttagtttcagagaccaaaatttaatgagtacgacatgatttttttttcttcctttttcttgtattcattttcttcgccatttcgcagttatgtattattatataatttaaaatttatgatatgaattataaaaatgtgcaatatgttctaaaacgtctcgagcactcaaaagtttaggcaaaaccatgatttccacctctcttgcttataaatcttccaaaatttaaaacccactagcattgcgcctctcataattaaacaacgtctgaatcactatgcacgtcattgttatcaatgtggatgctaacgaactaacgaacatatgttaaattcgaatggactaaaatataggcaaaaaagaattcagaatttctattgttacaataaaataaaatggccatttgatgcttgttttgcatcggtgttacaaaaagaggtcctcacgtcatatacacaaatgcctcccccgaaattaagtttgttttcttgtagatatatattctcagaacaaatcaaatgccatatagaaagtcgtacacatttggtcaacattgtgaagcaaagtcaatgcgactaggttattattttgattagttataccaacacggtacataccaagactctatataaatgataatgtattttggagaagtcacatacaaaattaaataagagcgaaccactggtcgttcaaaaatatataagaaaatattaaacctctgtttttgctggcgatcatggcttacacaaacaaagttacgatatcagccgcggttgcgacaatgatgctgtttctggcggttacgatcgtggatgcacagtcaatgccaccaatgccaaagtttaatcctgtgtgcgcgttggcggatctcccaaacatcgtccaactttgctactttaacttggatttgacgccatctgaagagtgctgcaatgatctcaaatcgtcgagcacgatacaagtgaattgtctctgtgacaatttcattgcacatccttccaatggcaatatctcgcaagctcgctacgacctggtcaacagcgcctgtggtgttgccgacaaattcgcatgtaaaggtatcttttaaacattttcatggcttgtcccttagtattttgttcaaactacattatgttttcaatagaacaaaaaattagagatatagtaccgttactgattccgacataattttttaaaaaagtttcataaaaatgcatgttagtgtattaaataatgcatttaattcataaatatgttgaatgtgccaaatttgaaaaatgtatagacgaaatatgttgaatgttaattaaaaaatatattagaataggggataaaagtaagatgagattgtaaatccataggttttgtagattcttaatgcaacatgaaacaaaagttgttgtattattatggtgattaattgattttggttttgtgtgtggtaaaggaggagacgccagcggaggatcaacgaacaagattgctgcatcaatggttctacttggtttggttgcaagtctgttcttttaatttatttcaatttggccttccaaattctatgtaattctaagatatccccgatatatatataagaattatggtataaaaggaattgttcagacaatgtaatcatatatgaatgatatacatagtatataccacttgtttacgttttcagttttcatgttttgataacatgattccgctgttttgtaccattcaaaatattcatcatgttttcatgttttggaatgtgattttgctatttaccactagtgtgttaaaaatataaattaaagaaaagaaaatggtgataatctaatcaaactagctggctttccggcgttttacaattatttttcttaaaaaaatctagtttagttcgttccactaacaactattctttaattcgattattttgttaattagctaacataccggtcaggaatgtttttaacaaatatacaaaaaaaataaaaataggtgacataccagtcatgaatttatcatataacaaatatacaaattaaaaaaaaaaaattagatataattttttagtgttaatattttgtgcaccctcacaaagtaatatatgttattaaacatagatttatatatctcttagaaactacttgatcaactcaaattaaataaagagaaaaataaataagagtacttgatcaattcaaaatacattagtaatttagcagttttgtatcatttgtcaatcgtatgagagaccccttctactactagctagcgaagacctacagggcaaaatgcttccactagccgtacataaggttgaatatgtactagtgggttcaaggtcaaaccatgcttgactcagtatttttgctggctggaattttattctgaatgcgtcaaaatgaatggtgaggtaatggacacagaccattcacttgtgacaaaaattatttgctttttttttttattaatagtatcaataatgtacgtccaagtacttcaatatatatgataatgtacttttgatttttgataagtcacatagggaagaaaaaaaaataagtgggctaatagtcattcaaactaaaaccctactatttttgggtttgtcggagtcagatactaatcatatatggcttacaacataatggcggttgcggttacagcggtgctgtttctagcggttgtgatcgctcctcagtggacagagacaaaaaaaccaccacgaccgtcggatacatcggatacatcgggtacatcgggtagagacagacgtacaatgtgcccgttatcaatccctggaatcgtccaaaattgctacgcaacgttaaatgcgtttccatcaaaagaatgctgcaaggatctcaaaacggcaagcaagagagaggtgacttgtctctgcaacaatgtcattgcacatccagatcctctttacaccaacaccaaccaagtcaacaaggcatgtggcgttcttgacaaatacgcatgcgacggtactttttctttggttttccttttggatcttttgtggtttatcagaagttatagttttaatcttgtgattgatttttgcatgttgttatgtagttgcacctacttttactattgtttacactaattatgacatgatcatcatcgctgttatacaagatccataaaaagtaaattaaattaaaaatccattaatatattccgcggttttgcaaatatcttaaaaaatagtacagtatcttaccgtaccatattaattagtgcaatcttttgtcaaagataattagctaactagtgcagttttaaacaagacttatttatggtatctaattgatttcggttttgtgtggcaaagcaggcaactctaatggaggagcaacgaaaaagattgttgcatcaatgggcctttttggtgtggttgcaagtctgttcttttaattcaactctacaaaattctgtgtaattgttcttctcatcatttttgtttgttttcaaatctgactactcgaacatttatcgaatcaacaaaccttaactttaataattccgcttcgtcaatgttggtattaaaacctggtctgcgtaatttgacagatgtgtatagattattttttaggtttgcattggttaatgtgattatcacgtcttcatacaaatgccccacccgaaatttcatttcaatatatattatggtaagccgtacgcagatgcagatcatttaaacatatttgttactacaagggtttcaatattcttatcaatttttagtaggtctaattaagatgtccagttatatacatttaatttgaattacagtggatttaatgaaacataccaaagtacatacattcaggtcaaaggcagtgagatattttattagtagataactatactagcaaaaacaacatactgaagaagcaagctgaaatatattttggtttgcgatgaagttgtaatttgaccattcacaaatgttcttaagaaaaaacaagaattgtttcataaacaaggaaaaaaaaaaaacgcatcatcattattcattagctaacagcaagaaattgaagaagcaagttgaaatcatcatgtatgcgaaaagcttggtaagaaccatcgagcagagagttcaagtaacgaacaatcgaaatcaaatttgtgcagtggctccatctcccgtgtctcgtaattgaacagaaagagatcttttgtggtcgtgtcatggctatcactgaaatatatagtatttctatggagtccctcaacttcattggcgagcacggtgatgcctagatccaaaagcattgcctcgtcgcccaaagaatcagcaagttcatatttatcaagaaatgtccctgacgaataaaacttgtagacgttgaatgactggattctagaccaatgtcttaacattctttcaaccaagaggacatctccggttactgtgactacaagttttgtctcagcaacgcaccatgaattacttaattgacgactacgaggacttaaccactcagatctatagacatgcataaaacattgaaaggcttttcgaggaatctctccagaaaaatctaggattgtgaaaagatttctgtagctaaatgagtaaagcttgtgatccttgtaaaccatgtcaagagaatctaaaataatttctggaatttgattccacaacttatctccgttcttggcataaaccacacaccaatatccaagcccccacagagctatgtactctttggttttctcgtcaatccaaaacacaggggtacgtacggtattattacctttgaataacttaacgtggttgtgatcgtcgaaagttagaaaatcatcatctatggtttggtcaacctttaccatgccaacttgttgtgattcaatagcgggaagaccgatcttctcgtaggtgaatggattcaaaatgtatagattatactttgaatcttgcatcaggagccaacttccataggttgctagacaaacactctttgcaaattcaacaccaagatcttgcgtttggtaaagttggtctttgtcctcgggattgaaaaaaatcgtgcatgaactgtttttgttgttgtttttgtctttggggaagagcatcagccaagggatctgatttttgggcacggattgtttcgaagcagagtaccaagacgaacacaccgatttggcttgtcgaaaattagcaaagctgaggcgtttgaaaactaagttcaagagatctagaggaagatccgaccaggtattagggttttggttcttctccatgaaaacgacaatatttgagatatatagagagagttctcttatcaacaaataattatttgagtgaggagatatctctaacaaaagattttataaaccgaatagatctcggaatttcatggtttgctttgttaaaatatgggcttttgtgaaattccgaaatattggccccattaattaatcagtatatattttgttcacttggatccaataaggtgcaagacatgaagagagaaaggtaacataggtgaacgattttgttccctaaataaaggttcaattcaacaatgtgattctcacgtcttatacacaaatgctccaccataaatttcatttcattatatacctattttgacaccgaaaagagtttggaataaatatacctattttcttcttaggtctgaaatgtccagtaaaatacatttgaattacaactgatttaatcatttaatgaaacagaccattagttatacatatacacgtcaacggcattgaaattgtattagtattcgcctttcttcatatatgattagaatgaatgaactgtcgaatccatatcaatgaatatttagttttgttataatcctaataaagatatgatctggattatattaatgacacatatctttgaattgtcagggccgtccagcttatattgattttcgacattctgtccttaacaacttcttcgcaaaacattccattttatgtattaatggttttattttaaattggcttccatatatatacatgaacatgccacataaaatattcattctcaaaatgcgaagaacatgggtactggcggaagaaagctgtaagtttttaggtcaactatgtaaaacatatttaataaatagtaatcaacaatctacatgccaagactcctatataagttaatgcagtgtttaagaagtcacatacgaaaaagaaagtgagataataatccaaaaaaaaaatccatatttttgccaacgtttttagacgatcaaatggcttacactaaccaaatttcagcggttgtgtttctagcggttgcgattgctccgctattagctgagccacagtcaacgatgtttccagagatgactcctgaatgtgccacggttatgcctgacctgctcgaaaagtgttttgcaaccggtagtgtgacgccaacagaagattgctgcaccgatctaaaatccgcaacctcaacgcaagtgacttgtctttgtgataactacatagcaaaccccgccgtttcaaacatcaccggaccttactccaaagcaatcacaactaaatgtggcgttttcgacaaatactcttgtgacggtactagtaaaggtacgttaccaactctttcatgttatagtaatttcaaacaagaatggtgcgttcatggtaattaatggattttggttttgtgtggtgaaggaggagaagaaaagaaaggaggaagcagcagtagcaatggtaaagacaatggcaagagtgagggaaatggaggaagagcgaactcggttgctgcatcaatggctatgtttggtttgcttgcaagtctcgtcttcgtaatgttttaatttagttatttgtattcataccaaattttatgtaatttttttcttcttcttcttcctttttccttgaaagaaaatccgtgaacccaaaacaattacgtacgtttttgagtctataacattttatctgcattattttagggtgttttaactttattgggccttattaacgggcttatagtggcccacggaaaaactcgccaacaaaataagccggtttgtaaactaattttattccaatttcaacattttggtttttgttcaattcgattttccgcaaataaaaaagcacgaagccggtccaaaaccggcgatgcttatccgtttagaaatgagaaggtactagaacaaaagccttattcacttccttttgttccccaaattctcgaaatcgaaacacgacttaaaacgaaaaagacgagacttttaacactcagacctaaaccaacactcttcctctttctatctctctctcgccgatcggaagcagatttttctcaaaaggatggattcaacgaagcttagtgagctaaaggtcttcatcgatcaatgcaagtctgacccttcccttctcactactccttcactctccttcttccgtgactatctcgagaggtactttcgatctaatctctatgcttagtttgtgtctgtggtggttaagagttagtaaagtattgatctttgagtctatgtttgtgtaaagtgtattgccctgatctctagcgaaaatctgttgtggaattgataaaccctttactctcttgtggatgaaagttcctgtctttggttttgggttcttagaatttgtgtctgtgatgttttagtttagtaaagtattgatctttgagtctctgtttgtgtaaagtgtattgctctgatctctagctgaaatctattatggaattgataaacccttgtacctttgatctctgtgaggctattctgtggtttctgatgagttttgggattttttatgatttcagtcttggtgctaagatacctactggtgtccatgaagaagacaaagacactaagccggtatatatttttttgtttggttcaattgaattcgtttgtgtgttttgcagaagagtttgtttttgatttgattgtttctgtttaacagaggagtttcgtagtggaagagagtgatgatgatatggatgaaactgaagaagtaaaaccgaaagtggaggaagaagaagaagaggatgagattgttgaatctgatgtagagcttgaaggagacactgttgagcctgataatgatcctcctcagaaggtaccatgatgactaagcaaaaccttagcttttgattttactaatttctgtctgattgtgtgtttctgactctcttggtttcgatacagatgggggattcatcagtggaggtgactgatgagaatcgtgaagctgctcaagaagctaagggcaaagccatggaggccctttctgaaggaaactttgatgaagcaattgagcatttaactcgggcaataacgttgaacccgacttcagctattatgtatggaaacagaggtcagtacaagttgattttgtttattttaacttccatcagatgggtttctttgcctaagtgtctacatttgtgtttcagctagtgtctacattaagttgaagaagccaaacgctgctattcgagatgcaaacgcagcattggaggtacagtggtctacaattttccttgagaattttgttttatggtgatgatattcaatcgttttgtgtttatgatcacagattaaccctgattctgccaagggatacaagtcacgaggtatggctcgtgccatgcttggagaatgggcagaggctgcaaaagaccttcaccttgcatctacgatagactatgatgaggaaattagtgctgttctcaaaaaggtatgcatgtgtttgtctatatgtttaatcacttttgattcattaacaatgcataagcgtgattcttatacaaacatttttttgaaatttgtaggttgaacctaatgcacataagcttgaggagcaccgtagaaagtatgacagattacgtaaggaaagagaggacaaaaaggctgaacgggatagattacgtcgccgtgctgaagcacaggtagcttcatagaccatgaaatcaatcagaataatattttgataacattagtcagttttgtattgaccttatcacttagctatagacatgggttttgtttatataatgttgggcttatccatatctctttttctgtaggctgcctatgataaagctaagaaagaagaacagtcatcatctagcagaccatcaggaggcggtttcccaggaggtatgcccggtggtttcccaggaggtatgcccggtggattcccaggaggaatgggaggcatgcccggcggattcccgggaggaatgggtggtatgggcggtatgcccggtggattcccaggaggaatgggcggtggtatgcctgcaggaatgggcggtggtatgcccggaatgggcggtggtatgcctgctggaatgggtggtggcggtatgccaggtgcaggcggtggtatgcctggtggtggcggtatgcctggtggtatggacttcagcaaaatattgaatgtaagagcgactatttgtgaattaccaatatccagagtttttgaagttaaattgacattgtgagattggtttgatatttgtgagcaggatcctgagctaatgacggcatttagcgaccctgaagtcatggctgctcttcaagatggtatgatgactcagtttaaagttgcagtttattaatgttttttgaatatttttcgagtcttgaatgttgtttgaatgctataacagtgatgaagaaccctgcgaatctagcgaagcatcaggcgaatccgaaggtggctcccgtgattgcaaagatgatgggcaaatttgcaggacctcagtaaacaaaacaagaagcttgcttttctttgccaatttctgtgtttaattgcgtgagataagagatatgttggagaacttttgttttcttttatgttgtcgttgcagaggaactttaacaggaacaaaactcttttctcttcgttagtaatctaccctcttctcgtttttcacttcctgagttagaagatttatattgaaagattcgtataagtataacacttccaacattgtttttatgcgtacattgtcctcatgcagacgaattgtgtctgtcagacacatcaatccataccatataagagaagaatatgtaatttatttgtgaatctgacagacacagcaatcacagaaaaatatctatgggtggacttaaagggccatttttagtgtgaagaagaagaagcaaaggatctcttcgtttagttcgttgacaaaacatgtaggagaccaaataatattcaagtccagtgttgacgggtttgttacattcacatttaactttgtcgtatcatctcgtttcaaatgttttgacctaagtatttgataaaactttgaagtggattctacaaataattaatatactatttgactggtttgatatcatcagggtagaaaatacatagattttaattttaaggaattatgtggttagtaagtaaattttatctcctgtattctagccagttgtttattagttctttttgaaatttcgtgagtgtgaaaatatatattgtgaaaacgatgtgaaaaatgcaatttcaaactaattattaacaaaaataacactcacaaaaataaattaggttgtgactatctcatccggacttccctcatacatatagcacatttaaattatcaacaaaaataacactcacaaaattttgaaaagaactaattaaccactcactagaatgtttgagaccatgccaaagatttcgaagttatgtgtgtgatctccacaatgagaaatggtttcacttttagtttaaattaaacaaactttattggttctcgttaccaaaaattaatgttagtggtgcgacaactaattccacagaggaaaggattgtgatgtggatgtacattggaaactctccacatactatttcttcttttttggcaaaccacatactattctcatacgaagtttaattgatcaaaatcatagtgtctttgaaaaccaatatatacaattctataaagatgaaaataatagatacatcatacatggtcaatgatgaaaaaaaaccaaaattaaaaggagccacacatctctaagttagaagattcaaacgttgatagcaaatcttagatttccgaatcgtccaaattcagaagtgacatggttcggtgttgaagacagaactaaacctacgacagtttttttgtatcctggtcttgtttgtggaataaagtcaaatgttattagttattactgtaacgagtttttaaaatttacagaattaattatgtaacttatgatgaaatttcaaggtattatgtaaaaagtgtgttaataatttattaaggagtattaaatataaattcatgattaaagtctaaagataacaataactaaatattttggagtaattaatcttgttaacaaaaaactcaaaataatgtgatgtttattagttttatactaataattttcttaatatttgtttagcacaattatacaaatattttataacataaagataaggatacaaagatatgcaggagagaactagtgtctcaattttttaagttttgtttaaacgtaaagttggaccctaatactgaaacatacattcatcttattttcataatatatattcctcggtttgtgaatatgtgaataatttatacaaaacaaagaaagtaaacttcaatctgtattcttgactttgacgaaatcctaccaaaccctaattaataatacttgaaaaccatggtgcacccttactgctttacatggatttattatccttacatgtttatgatttgtatgcgtgtatatgtttacatataatgtacatatatatatatatgtatatgccacgtatgtataaacatgacaactcaatgcttgtgttcatctccatagagttgccaatatgtcaatggtgaacagtcaaaacccaaaatcatgaacaccaaagtcttgacaataatccaaaaacatcttctcgtcattgattctttccggtgaccatatcggaaaatctgcatcggcgccggagatattgtggtcatataatgttccaccaacaccaaagttactatcactccaagaggcctcatctttagtagtttcgtcggaccataagtaactaaacaattcatcatcatcataaatgttgtcaattagatgattttcattatccatcgaactgttttgatcagtaaccgtgctactactttcttcttctgttgtcgtgacacttatctccacgtatttcgtgttagttgtctttggttccactgagacatcgtctggattggacggaatggttttggaattatcgatattagaaggttcttgatttaggggttgatgggtcataggatcgattcccatcttaagaagtttcttcttgatatgagtattccaatggttttttatttcgttatctgttcttccaggtaatcttgaagctatcttagaccacctataatacaaccaatggttttaaataacaaattaattacaagaataaataatattttataaagtgttggtggatatatatgttacaatcttggtatagaaaaacaagaagattgacaaaataagttaacattatctctggaagagaaggacgttactttgtcttgaagtagcttgaagttgatttcaacgaaaaatcaatgcaaatcaaaacttattctacttatttgaccaacttatttggaaccatttggcataatttacacaacacacattaatacactaaacatgttggatcacatgcaattgactttatattttatgatgatcaaaccaatgtttatcttaagtctctagtttttgttacaacgtaaaatttgaatttttaatataaatttgaaaattttaagcctccgttgatattatatgacacaaatcattaagtaagaattcaaaaaaaatgtggaattaatatatgattattaggcttacttattgccgagattagcatgaagatctatgacaagttgttcttcatcatgcgagagaaggcctcgttttaagtcaggccggagatagttagtccaccggaggcggcagctctttccacagcgacggagaccggccagcttcggcaaagcacgccagcaacaatggccattggttagtatgaagtttataagcttcttatcttcctccaccgtccacggccctttcttcacccctagcttgtcacagcatggctgtctccccattaaatactatatagaaatgatatgtgtgattgtatattatgttatatggggatgtgaaatagagagcgaaatggaagagatatggaagaataaagttatcgaggatggaaaatctcaacagcttgcaagttatgtcaaaagcttaccaaagctcacccacctatatataaccttctcacacctttcccccacaattggtttcaggaaaaaataactttacatcttaatattttcgaaattgttttagtaacttttattaaaaattctagtggcattatggcaaagcattttaactagtaacggttatatatatatacatggttcgattggtaacacaaaaaattataaaatcttttgtcgatatgaaaaaagtaattgataacatataaataattaaaaacggtataaataacgaacatataaaatggtataaaaagctgataatagttttttttgtcgcttttagtattcttttatgtgattggttagaatgaaaaacagtacggactactaatcaccctcataatgttgtcacttagagatttcttggtatataaatacaattaatcaccctaatagtgacttaatatatgtataatacccgtcttcactattttatcattaaagaatgtctaatctaaataagaattatgcattactcgttcatacaaaagtacatatagatcagaatttttttaaggtacgtatgtatatacaggtgtcatgatggggaaattacaacagtttcaaagaagatcttctgtatctgactttatacataatacgttcgtttatatttttatattgaatggttcattttaattaggagttagtcagctaaagaattacgaattctgataaaataagattattctaataaataatgattcaggttttttttggtcagaaatgattaaggttaagaaatataatttgtcttactttgtcaaatctgttgctagtaggatcatagaaaggagtattggagatgtcgcatttggttggtgaaaatgactttggaactaatgtgaaaggataggatgcgtgcgaatgtacgcaatcacacgtgcgattcataccttttttactcaaatacttgctcaagtttcaaataaatatatactttgtatttatttattaaaaaatgtattaatttcaacattaagtactaaggatcttgataactaaaactagtgtagttttaagttgtaggcacttattctgtcaccaaaactgtatataaatcaccgactctaatagttgatgacacacacaaaaaaaatgaatttttcattgttgtcgctatcagctgtgaaataaacacgaataaaaatatgatccagtctttacaaaaccgattttacataaaatattcagaatttgcccataataatactcttttcagaatctcaaataattggcttggtccggttcaactatggcaaaatccgataagttttgagaattgagatctttagtccattgcgataaaccattttttttggcaaccctaacaaacctattaagtatattatatacgagtctctaattttggtaagatttgttttttacataacatagaagaaacttaaaagcttcaataatgaattgccgcacaaaatactttgtcgccgatacgaaaaataagtatagacgaatatccatttgacacatggtgtacacgtatagatcactgtatcaatatatgtttctaatctttgcgacttgtgggtgacttgcaattttggcttcatggttttgctacaaattgatctatctttcaatattaaattaatattcttcgtcgtatcatagtgtctacttaattattgtcagaatgtggctcgctcgcttctttgtttaatcggatcggaaatgttttaaaaatcttccatgaaaaattaaagattgtatgctaagatatgatagtaatcctggtaaatgttattggaagtgttgatatatcctaaatgatgaagtaggcggatatataagcgagaaagtctttggcgtaccgaaataagggatgtaacctgattctaatttctaaatgagtacacatttataggttttgggagtttatatgttgcatttataacttaatttggggcacataagagcaatgccattttttattataaaagaagctaggtttgttgactataattttcgaatggattctgataatccaattcgataattatttacactattatttcttttaaaacctatgttcatatggtattaagtcagaagtgttttgtttttctgctcaatgatgaatttcgcttcaacgggtaattaatgctttagcattctttttcttgattccgatttctttgacttgtgtttagtactactactactctactgctcaaactaatataaacaaatattttttttttctagttacgatttgtccacaccaaatatagatgttcccacttcttgttcttgcccacgaaatttttccaatgagtcactgctatcttcttttgctggctgaatcattattcactaagtaatatatattaaaaattcttagaatgtggtcgtttaatttactatatatgtgtgaaaatatgtgaatctttgtttcatggaatctatttttgaagttacaatttcttcgaacaacttgtgagttgtgtctcttgtcttctttgataatcatggcccccagacaaaatgttatatacacaattgtcggaagtgtctgtttccgtgtgattaaggcagaaagaaagagcaaattaaataggagaaaaatattttcactatttgatcaagaatatatgtctatgtaaagtacatatcagtgtttaatgtaaaaccatttttttttgaataagtttttttctcaagaatttttatgttatatgtaaaaagggactatgggagttggagatccctcattagcacaagtaaaaagtctcgaaaatgcgaatatattgtgtgtatatatgattaagtctctaaaactcaataaacacaattataaaagtgacatttcaacaccccaccactttcttgtatttctctacaactctcatttgctaataattaattaattaagattcaagactcttaatcatcgcttgttcccttaatcaaaagtttaaaatcgacttcttgctttaatcccattttcaagtcaccacttacgtaacttaggagtaatgccatcgtcattatattatgcatgcatatatatagtaaattcatgtgggtgtgtaactgtgtatgtatggaactgtaaatataaagatgtggcactattgttagtcaagtcacttttgtcccctttatttatttatttttattattttttgtcccctttattgtagactatatatttatttattcaatttctaagtaactaagaccataatatattcagagtattattctgaaaaaatgttatactgtttgtctgtttgatatgattatcaatggttcatattcacataaaaactatattaaattttacctatgttacatggtactgatagatatctaatatatggtactattgacttatgttgaacaaataatatcctttcttactgcataggttacatgagagatgttgcatggtcaaactattagtctagttttgtgtaaataaaacaccggaccggttataaagaaaatcaagacataaagaggtttgttataagagtattttatttttttcttaattaattggctttctaaatgttgaaacaattagatttcctatattttagcaagtacctaagttttagagaattgaatcaaaacacattgatgagaaagttttgttggttatatttttactgaatgaataatatcaaaccaaactattctattacttataccatttgaaaaaaaaattgtccaaaaaaaaagaataccatttgaatcaaaatgatttaaatatctaaccgggactacaaaagaaaatgttatccaatgggttgggtcttgttgtgatcaaatatgtgagggccaaattgttatgaaacaatatttaggcccagaatagtctcactaagtgcaatcaagcccatgaccgtcatacactaagttaataatagatataagttataacaaaagaaataattgaaataggaggagaagtaatgaatgatcagaaatgtgtccgtgaaagtttcatgttcttggtctcactttcataatcatgtttatggtcgctcacacgtaattgtcgcaagagttaactacactacgttcagaagtgcattttcgtaattatgtagagatttcacaatttggcttaaactaaccaaaatgccctggcatgatgagagctcgtagataggctttttagcatttgtgttaactttatgcattcaatcttaaacattcatctatctaaccatactattttaagtaagacacaaccaaaccgatctctaacaaaattgaattaaattttataatgacacaaattttacgaaaactcgaatctaaccaaaaccaaatccgtatcatactagaaacttaattgaaatgtcgacccctaattcatattacatcatctgctaaagttagttgcataagagtacccacatcggttatttatttgtcggtgtctgtaaatataagaataatcaataaaaaatggtaggtgtttttagttttaaatttgtggttttaagaaaacatttgaaacataaaaaaaaagagatgattttaatttcattactaatttatgctaaagacatttttcaaaaattgtgtaacgaggatggtctaatggtgttttgtagagcttgtaatttaagatagtttttacgttggaatgaaattgagctagatccgattgtctagccgccagtcttcacaggtaacaacaagtcaacaaccgacacataaataaaataaaaaatttggacaaaatagttgaaaatattgtaaagtgttgttgttattttctttattttaaaaatgtttaaggtaaacgtataaaatcagcgcgcatgcaataaaataagtcaaattcaaccttttactactactactatattgaagtattttttttgtttttttgtagtaaattactattgaacaatgattaatggataataaggttttgaatatcgacaagtggagtgatgcgatagtacactgttttcgcggctgcgtatagataattgattgaattagacttcaacactggtggcgacttggtcaagattggcgttgtatcatcataattttttgtccaataatgttattacatatttatgatagtatatagtactgtacaaaaaagtgattatctattactctttctgttttaaaattagattttttagaaaaaaaattatttttaaaattgagtttttaaggttttttatgcaatatttattaattattattcatatattataaacttttttttgaatatttttagtttagaattatagattttttttttaaaggtccgtatttttttacaaaatctattatttagaaagagagaatcttaaataaattattcttataacgcaatacaatcatttttctttaccttatgaactttatttttttttgtgattagaagataaagtaaatactattttttctgcatgtcttttgtataagtttgtaactactaccactttcaacgccgtctcaaatctttcactctttttttttggattgcaatatgaagtacctaagaaatttcatataaggtgatctaaaatataacaaaaataaaatagtgtaatgattctctctgagcctacaatataaatgtccacactccctttgttctctcttcaccaccacacaacacaaaacctccaaaccaataatcagaacacagtgagatatttctctctgaagccaaagatggaaacggcgtcttctaatttctctctctcgcagatcctcaatattgaggaaccctacagctccgtaatgctcggtgtcgccgctctcttggccgttgtttgctatttctggatacaggggaagtccaaatccaagaacggaccaccgttgcctccgggaccttggccacttccgatcgtcggcaacctcccgttcctaaactctgacgtcctccacacgcaattccaagccctaaccctaaaacatggccctctcatgaagatccacctcggttccaaacttgcgatcgtcgtctcttcccctgacatggctcgcgaggttctcaaaacccacgacatcactttcgccaaccacgatctccctgaagtcggaaagatcaacacttacggtggtgaagacatcctctggtctccttacggtacccattggaggagacttcgtaagctctgcgtcatgaagatgttcactaccccaactctcgaagcttcctactccactcgccgggaagaaacccgacaaaccattgtccacatgtcggaaatggctcgtgaaggatcaccagtcaacctcggagagcaaatatttctttccattttcaacgtcgtgacaagaatgatgtggggcgccactgttgaaggagacgagagaacgagcttaggaaacgagctcaaaaccctaatatctgatatctccgacatagaagggattcaaaactactcagatttctttccgttgttctcaagattcgatttccaaggattggttaagcagatgaaaggccatgtgaagaagcttgatctcttgttcgatagagttatggagagtcacgtcaaaatggtgggaaagaagagcgaagaagaagaagatttcttgcaatacttacttagagttaaagatgatgatgagaaagctcctctgtccatgactcatgtcaagtctctcctcatggatatggttcttggtggtgtcgacacatcggttaacgcatccgaattcgccatggcagagattgtgagcagaccggaagtgttaaacaagatccgactagaacttgaccaagttgttggcaaagacaacatcgttgaggaatcacatttacctaagcttccttacctacaagcggttatgaaagagactcttaggcttcaccctacgcttcctcttcttgttcctcacagaaacagcgaaacctcggtggttgcgggatacactgtgcctaaagactccaagattttcatcaacgtttgggcgattcatagagatcctaagaattgggatgaaccaaacgagttcaaacctgagaggtttttggagaattcgcttgatttcaatggaggtgattttaagtacttgccttttgggtcaggaaggaggatttgtgcggcgattaacatggctgagagacttgttctgttcaacattgcttcacttcttcactcttttgattggaaagcacctcaaggacagaagtttgaggttgaagagaagtttggtcttgttcttaagttgaagtctccacttgtggctattcctgttccaaggttgtccgatccaaaactctatacagcttaagtaagtaagaaggaaatttggtttgagcttatgagaggaagttgaattgagttttcttgtttaaagtttatttttctttattcgtgtttggagtttgatgctttgtaaaaaaagatgtgtcaagttaaatttaattttcttatatataataaaataaagttttagtcacaatatataataacgcattattttggtgtccaaagtcgataccataagctataaaattcttggcaacaaaattacacatacagtgtatgggcttaagaaccacagaagttttggatatgtaaacattaacgatcaactggtactcaaaacttcagaatttgacatatctaatgcatggtaattggaaaaaaaaaaataccgtaaaagacgctattatacattacaaaaaatataaatactgtgtacacttaaacagttatttactttcatctatctgtaaataaataagtcaaatttttgatatttagggggtgtaattggttcctaatttataaggaattttgatgacttcaatcaaatactagaaagtaaaaaaatgaaagattttaaacgattgttagagacttttttataatcttgttgattagtttttcataattttgtaaagtttttcaaacaatctctctattttgataatacttttcaatgatttttcatgacttcattttaagaagaaaaatgtagaaagtcatgaaccaataacataataatttaaattattaacaatcaaagattcttttgttttaattgaataacacaaaacttttaatgactttataagtgtataaatctaataacccaaaatttatgaagattttaaattattttttacaaatcttaaatgaataacacaaaattttaacatacttttaaaaagtcttgattaaataacaacaaattttacataacagtttaaatcacttaaattcttttgaaatcataaacgaataacacccctttattagacattagtcatgataatttgggaaaataataattatagtaaataatgttattatctttcctaaacaagtattgcgcagtcaaacaataactcttcatcataaataaataagtcaaattttcgatatttattgaacattgctatcttacctaaaattattgatatggcaatttaaatatgttttgagacatgcctataaaactatgactcattttgttattctatgcatcatttatatttactacattttcttacattggagcaaggtattgcatgatctcaccatcttgatctaacgtttaaaatgaagttttttttatttgtcattaacttataatagtttttcatatataccactcatgttttattacatccattttatacacttttcattgctacataaaaaacaaaaaatgattttataaatattcgactatgagatctttcgtgagaatttgttctcttatgttacattgatatgatattgttatgtttgtacgatttctataagaacttctaatcgcttaagttaggaagatttattgaatatttaaattatatatatatctatgtagttttacgtagattttttactcatcacaagcaatggtgaaaatataaattttagtggtattatttatgatatataatttaaatatgtagaaatttttatatatcttgaagatatttttcttaattttgttaatataaatcaaatatgcatatatttaaaagtgtattgataatttttttttctcatacaatttttttatttaggggttaagagagaaaataaaacaaagaagaatggcttccaaccgttgtgctgtctgcaaaattttgaatgaaacttgtgctccaatgtgcatttatgcaccacattttccatcaaacgatgcaagtttcaaagttattattcagatttttggagccgtgaatgtttgcaatatccttgataatcttgaatttccagaacaacgagagattgctgccaactgtttacgttatgctgctgaggctcgtatacgtaatcctatttctggttgtcatgacatgattctacaatacaagaatattctcaataatgttgaacaagatattgaatccgcggtgaatgagcttggaacctatgtgggacacgatcaagtaccaaaattttatgatcttccaatgccagatgatttcctcatgacaccagtctctttagattcttttattgcaaaaattaagagtttaaacgaagttcaaaagaatcaacttatgcaactcccaactgctgctgataatgcaccaatgataatgaatagcatatttgggaagatggaagataaaaacctgaaagatgggcatagagctgatggtgcatcaacatctgctggtaagtgatattgaagagatacttccattttctgaaaatcaaaaccaaaaataattttaattatgtcttttccgtgaatttcttttaaactcgagtctccataataattctgtgtttctcttctctgtttttcctttttataattctacagtttgtaatgtcttaagtttaatatatcacaaagtttttaagaaaaaaaaaacataatttgaccagtttataaagatttattaacagcatttccatatttaatttccatagttttttgcaaatagtaatctatattataggatttgaagatgtttgtatattcttgattggtaactccgaaataattctaaagtttgtaacacttaaaaacatcatgtttttctactgtttaaaaattggatatgagaagaaatacaattctccgacagtccgacgaggagtgctctgtcgtccatacacaaaaagcttttggctcattttttatttttattttttcttttctctttagacaatatttgaatgggacttcaacactgggggcgacttggtcaatattggcgttgtatttcctatcaaattatatatgttattatcattcgttttctccaataattctatcagagattatcatataaattatactattacttattagtacaatgaaaattaagagtatttattatattcaacaactccttctttacgaattacgacccagtagaatttgtcaataattatattttttatatatatatttcacttatgaactttgagagttatcgtcattcaaagttataatttcatttggttttagtttcatatctctttcatgttaacttcttttgtctgcactaaaacatatatatattttttttattgtccgcgtggtctttgatatatatagtaatcattttcaaagccgtcaaatttttcacttttgattttgaatatagaggaacctgttgacccaaaaaaacagattatgaaggaacttaggaaatttcatacaagttgatcttaaaaattaagcaagaaaaaagaataaattaatgcagtcattccttaagcctacaatataaatgttcacactcccttgttctatctccaacacaacacaacacaacacaaaaaatccaacccaagaaccacagtgagatctttctcagaagacaaaaatgggaacagcgtcgtctaagtctaacatcaacctctcgcaggtcctcaacactgaggagccgtacagctccgtgatgctggccgtcgctgctctcttggccgttgtatgctacttatggattcaggggaagtccaagtccaaaaaggaacctccactgcctccgggaccttggccacttcctatcgtcggaaacctcccgttcctaaactctgacgtcctccacacgcaattccaagccctaaccctaaaatatggccctctcatgaagatccacctcggttccaaacttgcgatcgtcgtctcttcccctgacatggctcgcgaggttctcaaaacccacgacatcactttcgccaaccacgatctccctgaagtcggaaagatcaacacttacggtggtgaagacatcctctggtctccttacggtacccattggaggagacttcgtaagctctgcgtcatgaagatgttcactaccccaagtctcgaagcttcctactccactcgccgggaagaaacccgacaaaccattgtccacatgtcggaaatggctcgtgaaggatcaccagtcaacctcggagagcaaatatttctttccattttcaacgtcgtgacaagaatgatgtggggcgccactgttgaaggagacgagagaacgagcttaggaaacgagctcaaaaccctaatatctgatatctccgacatagaagggattcaaaactactcagatttctttccgttgttctcaagattcgatttccaaggattggttaagcagatgaaaggccatgtgaagaagcttgatctcttgttcgatagagttatggagagtcacgtcaaaatggtgggaaagaagagcgaagaagaagaagatttcttgcaatacttacttagagttaaagatgatgatgagaaagctcctctgtccatgactcatgtcaagtctctcctcatggatatggttcttggtggtgtcgacacatcggttaacgcatccgaattcgccatggcagagattgtgagcagaccggaagtgttaaacaagatccgactagaacttgaccaagttgttggcaaagacaacatcgttgaggaatcacatttacctaagcttccttacctacaagcggttatgaaagagactcttaggcttcaccctacgcttcctcttcttgttcctcacagaaacagcgaaacctcggtggttgcgggatacactgtgcctaaagactccaagattttcatcaacgtttgggcgattcatagagatcctaagaattgggatgaaccaaacgagttcaaacctgagaggtttttggagaattcgcttgatttcaatggaggtgattttaagtatttgccttttgggtcaggaaggaggatttgtgcggcgataaacatggctgagagacttgttctgttcaacattgcttcacttcttcactcttttgattggaaagctcctcaaggacagaagtttgaggttgaagagaagtttggtcttgttcttaagttgaagtctccacttgtggctattcctgttccaaggttgtccgatccaaaactctacacagcttaagtaagaaggatgttgaattgagttttcttgtttaaagtttacttttctttatctgtgtctggagttttgatgctttgtataaaagatgtgtcaagttacatttttgataacatttaatataacaaagttttacttacaataataacgcctaatagtcgatgccaaagctataaaactatattgtagttatatttttggcaagtcgattaaaattcttgggtcaacaaattacaaattagtatgaaggttacaaattaaaattgtaattatttaaattaattaatgtataattatatcacaaatacttcacgtcacactaaatgagtccttcttagcggcaaaatatgcgttattgggctaggcccatttataaacgacgccgtttacacagtctagaaactcaacatcgtcgtttctctcccggcgactttatcgccgtctttttcttctttaaactctctggctaatttcgttttgctttgagcttgtgagctacttctgattccggccatcacgcagcttcaggttagtttttgatttaaatcaaacaacagtacatgggttcagtgtgttgtgtctcgaatggaattggtttctgtgtttagattagggtttagggctctttcatctaaggaaacgaaacctaggttatacgaatctctttgttgggtctctctcaataccaataccaatcaacgaaaggattaattttgttcatcatcttcaacgtctaaggctataatttgtgttagttcaaattgattcagaataaagtttggatttttacttcacctagtcctgaatttgttgttctctgtgtagaaagtttctgtttttaaatcaaagaaatgaagaagaagatgatagccattggtttcgaaggatcagctaacaagattggagttggaattgtgactttagacggtactatcttagcaaatcctcggcatacgtatataacaccacctggtcatggttttcttcctagagagactgcacatcaccatcttgaccatgttcttcctttagtcaaatcagctttagagacttctcaagttactcctgaagaaatcgactgtatttgttatacgaaaggtcccgggatgggagcgccgttgcaggtttcagccattgttgttagagtattgtcacagctttggaaaaagccaattgttgctgtgaatcattgtgtggctcacattgagatggggagagtagttactggagctgatgatcctgttgtgttgtatgtgagtggtggtaacactcaggtgattgcttatagtgaaggtaggtaccggatttttggtgagactattgatattgctgttggtaattgtttggatcggtttgctagagtcttgaagctttctaatgatccaagccctggttataacattgaacaggtagatttcatttgaaagtaaagtaaatttgaattcttgaaagattcaagaacaatgttaacacggtttttggtgttgttactagcttgctaagaaaggagaaaactttattgatcttccgtatgctgttaaaggtatggatgtatcgttcagcggaatcttgagttatatcgaaactactgcagaggagaagctcaagaataacgagtgtacaccagcagacttgtgttattcccttcaagtaaggctatcacttggttcttaactgatgaattttgtcacatgaatgcaaattttggactgtttaagagtaatatcatgaattcatgtttgttgatcttgcaggagacggtgtttgcgatgttggttgagatcacagaaagagcgatggcgcattgtgacaagaaagacgttttgatagttggcggtgttgggtgtaacgagcgtttgcaggaaatgatgaggactatgtgctcagaacgtgatggtaagctgtttgcaacagatgaccgttactgcatcgataatggagctatgatcgcttacacaggtctactcgcgtttgttaatggtattgaaacaccgatcgaagactctacctttacacaacgatttcgcacagacgaggttcatgcggtgtggcgagagaaagaagctgtactacttggggataagaaagttgcagcgaattgagtctgtccccatttttgttcatttttcatcaaatttgagattgaatctctctctactcgataaattggtttttgctaagtagttaagacttttaaatgtgttttattagccaaattatatgattgatatcttttggtttgaatgtaataacactttcaaatttcaaagtgagctttgtaaaaagttcaaatgtttcttgtgttgcatttcgctatttgttttattgctttaataaaaatatgatatctcaaagtcgacatttctaccgagaatggtggagagattagtgcattagtcttccttaatcatacaaaaacaactgtgaaaatacagcactactaaaaagtaaaaagtaagaactttttaatgtagaacgtatgagatggttcaattaatcacaagacacttctatggcattgcgtattaaacgaaaagtgagtaaatagaatttatacataatgatctaatcttgatcttgctaataaaaattgtaaaggcaacaacaagttgtcaaaaatttcaatttgacgtagagataaattctatctaataattttgtaaaaacattcgagatatagtgtatcatttttccatcatctagaactcatttgcgtattttcaagtgtaaatcagaaccttgacacataggctacacaaattttggtcgatatttatattacttttgtagcataatgtggatatccttctagagactagagttctagataaaacattcatacatgtaactatgtaagtaagcatgcatactaaatataaaattttcaaaagttttaaaagacatcatatagattcaaaaagacgtgggaaaaaggagaaaatgacaaaagttattagtaaaacaatcaagtaaaaggtcaaagtagttaacgaaaagataaaagtatttcaaaagtcttccttccatcttgaaatgccaaaaaataaaagacgaatgattgaagataaatcaaagttgtctgattgctattgtatacatctttttttttgttaaaactattgtatacatctaaaaaaccttgaagtaatcaagatctgaattatagccgttgataaggttttatgctttcacattgaactcgatcgtcgtcgtcaaatctactagtctcgttttttagttttaacgtgcttaattacttcactaatttgttttttgttatcattttcaccaattttattcattgtgtgaattaagttttgtccacatagtaagattcatcagtataataggacatatgataaaagtttgtatataatcaaagagtatatctaagaatatctaattaagatgaatgtttcagtccacattggattctgcttatagtcaaactgtcttgttcttaaacccaattaggttagaatacatgtaccaacaaatagcatttctataactaatcttttatcaatttactttatagcctacaaataattagaggaaaagaaaagagagttagtggaataattgtcctctaaatctcgatatcatcattaactaaatactatatttagaccatatatactatattttatagtatactatattttatagtatatataatcaactaatcatattagaccactattagaaatatggatctaaaaaaaacattctttaatcagtactattctcatccaaagacttgttttaagagactaaatatgaatatgtgtatgtgtatgtgtatgcaggagtagacacgtgcacgtggcacatgcagggaatgggaaggtggagtgttgacaaagaagaagaggatgatccaagtttcgaaatgattccaaaagttatgaactataagccaaagtgctcaatcgccaaacatgaacttaaataaacttcactcgttagatcgttttctcacattaaagccgctctacacttttacccattttaccatttataataaccaccacacatagatattaagttctatggattttattcgtaaacttaagttatgatcaaatagctaaatgattttgcgatttgcccgagttctgtttgtttctaaaatggttatccaaaaagcatatttttgttttatatagaatttgtgatatagaagaaatatactaaaaatgttttaaagtctgtctaaatcataaaccaatgcaaagaaagtgaaataaaccaagatctcgagcaatagacataataaataaacaaacacctaataacatcacatccccactaacaaatgtgaacattaactgttaaaaatcaccaaaaaagtcatcaagatttggctttccttttcaaaagcagtatacgtctctgtctcacacagacagtgtattcaatgcgttgtgttgtcttcccacttttcaccagctgaggttctgcttctttctcttcttctctccaaaacaagaaaattctgcagaataacttttcattcacgagagtggaaggttacagttttccaaatccgagaaacagacacaaaattggtccctctctaaaagttactatcttcgtttaacaaagagatagctcccaatccagtacaaaacagagtactctgctctataaatttcgttcctttattactctgctctataaaacagattattctgctctataagagagatagataaatgagctaaagctcagtaatttctaaacagagagacaagaaaattcaagaatggttaccttatgtgccacgttactgatccttctctcaatctttcttgcaactccgtcgaatgttcgaggaaatgcagagctgaaggctttaatggagctgaaatcgtcgcttgaccctgaaaacaagcttctccgttcatggacgtttaacggcgatccatgcgacggatctttcgaaggaattgcatgtaaccagcatctaaaagtcgcaaacatatcattacaagggaaacgtttggtcggaaaattgtctccggcggttgcagagctcaaatgtttgtcaggtctttacttacattacaatagtctctctggagagatacctcaagagatcacaaatcttactgaattatcagatctttatctcaatgttaataacttctctggtgagattccggcagatatcggctccatggctggcttgcaaggttagcatcttataatgtttcacagatctttcacttgaatgtttactcgatcttccatttgaatgttttgtggtgtcttttgttgcagttatggatctttgttgcaacagtttaacagggaagataccaaagaacattggatccttgaagaaacttaatgtgttgtctctgcaacacaacaaactaaccggagaggttccttggactttaggaaacttgagtatgttaagcaggcttgatttaagcttcaacaatctgttaggtttaatcccaaaaaccctagccaacattcctcagttggacactcttgacttgcgcaacaatactctctctggctttgttcctcctggtgagttaatgattcttgaaacgtctttgtaagagcttatctctctgtttcttgactcggttttttcttcgttatgtttcttcaaaggtcttaagaagttgaatgggagcttccagtttgagaacaacaccgggttatgtggtatcgattttccttctttgagagcttgttctgctttcgataatgcgaataatatcgaacaatttaagcagcctcctggtgaaatagacactgataaatcagctcttcacaacattcccgagtctgtatatctccaaaagcattgcaaccaaacacattgcaagaaatcctcatcgaaactcccacaagttgctttgatttcaagcgtgattaccgtcactataacattgattggtgctggtatattgaccttctttcgctacagaagaaggaagcaaaagatcagtaacacacctgagttttccgagggaagactaagcacagatcaacaaaaagagttccgtgcatcgcctttagtgagtcttgcctacactaaagaatgggatccgctaggtgatagcagaaacggagctgagttttcacaagagcctcatctctttgttgtaaatagtagcttcaggtttaacttagaagacattgaatcagcaacccaatgcttctcagaagctaatctattgagcagaaacagcttcacctcagtgttcaaaggagtcctcagagatggttctccggtagctatcagaagcatcaacataagcagttgcaagaacgaagaagtcgaattcatgaacggtttaaagcttttatcttcgttgtcacacgaaaacttagtgaagctacgtggattctgctgttctagaggcagaggagagtgtttcctcatctatgattttgcttcaaaaggaaagctttcaaattttcttgacttacaagaacgcgaaactaatctggtccttgcttggtctgcaagaatctccatcatcaaagggattgcaaaaggttaagtatttgaaatatcacttctttgagttcaaggaacaaaatgtatttaatacacaaatttcttgcaggtattgcttacttacatggaagtgatcaacagaagaagcctacaatagttcatcgaaacatctctgtcgaaaaaatcctacttgatgaacaatttaacccgttaatcgctgattcgggtcttcacaaccttctagcagacgatatggtcttctcagcactcaaaacaagtgcagcaatgggatatttagctccggaatacgtcacaaccggaaaattcaccgagaaaaccgatattttcgcctttggagtcatcattctccagatactctctggtaagctcatgcttacaagttcactgagaaatgcagctgaaaatggagaacataacgggttcatcgatgaagatcttcgtgaagagtttgataaaccagaggcgactgcaatggcgaggattgggataagctgtacacaggagataccaaacaataggcctaatatagagacattgcttgagaatataaactgtatgaagagtgaatgactctgctttttaattagtatctttgtgcaagtatgattctccggttagctgtgtcccaccaattggttttgtttgttttagttctctccagtaagaaccgggtccggtttatattttatttagatttgtagctgagaattgaagctttaatcagttagctatatgattataagcaacgaagaactgattaatgtaacaaaagatacatatataataatcatcaaggagcagtgtttaaaaccctcaaatcatgtcatcatacagttacagtaatgatgatgcaacctaagtaaagtaattagtctttggttacattcactaaagattttcgaaaccatacatataggcggagattagtttgtaccatgtcctcttacattcattgcagctttcggtcttcgggatgattctgctcgtgcatgagaaggacttggatcagtcgagggaagtaacattggttgctctctgttcacaagaccacctgcaagaacatcaaagagatgatttatctttgttcacaaagaaacgtacaacacgaaaacttgaccgtgtaataggactgcttacttccaaatgaaccagagcgactgggtaactgcatttgccttctagcatttccactccaagactgttcaaaaccagccaattcatctgcagaattttgcaattgaaagcaaacggtatataaggatatttcatccacaatagaacatttatgaagcttaacgagaattgtattagttaccttcattcaaattgtgcaaggtctgagttgtatcaacacggccatctgagttaagtttacgcgcaactgtgtggccctgcaagcataagaacataacttataactgatccaacaacaaaagatacagattttattatcctcaaggtatgtatatatgtaccttgttatgaaggcctcttgaaatcatatgcgctgcttcccgcgttgcagtgttggcttctctgctttcttcaagagttaactgtttcacagtaagaccggttttagtaaaaagtatcagctaacattcttactttcacacacacgcaattacattactaatgtaactcaccccatcacttcctgtccttctggtctttgaggaagtatagtagttgccgttctgaccaccgtatgtaacagtcgagctctgaaaactataactaccggtttgaggttgccactgtccattgttcaccatagcattcacattcatgttctgcatttgtgggttccttctctctgcattcacattcatgttctgcatttctcggttccttctctctgcatttacattcatgctttgcatttgccggtttcttctctctgcagcgaacataaaacacaatcagttccatagaaaagaacgatttcattccactttaaaaccaaggtagaaatagaaaaaaggtatcacctcgcactctagcatcttcagtttcagcctcactgcttgacctgccatgtttccctagacttcctttcttctctttatcaccttctccttctttctcatcatctgaatcaatctcttcaataaccggtccgcgtgatctactcggtcctggaggctgattattctcaataaaaccctgtggcagacgatgcatttctgcaaaaggattcatgctgggaccaaagaagttggattgaaacatgccaccaccaaaaggctgagtgaagaaagggtcgtcaaatggatctcttcctccgaaaaaattagacatgagactcggaggaccattagggccaccaaatccaccaaaggaacctcttccaaaaccaccaaaagagccacctccaaaaccaccaaaaggacccccaaaaccaccaccaaaaggatctctaccaccacctccttgcatcttccctgataaaaactaaagtatacaaaaacaaaaacagaattcataaaacgctatcatcaaacacaaatctgaaatttgcaattcaacacaatctctagcaagataacaattctctaactgcaaagcaatttcaacagtaaatcaggaagattacatgaatcgatcacaatcaagtcacaaacaactcaggaacgtaaatatcatgaagaaaaaaccagagacctgaagcgaactagacctaacgaagaacccgaaattgaaattcaatcagaaatcaaaatcaaacattaaaattcaccgtaatcgaatttgaagttcatacctcgaacaacgattcggactcccaacaatctgagagatatttgttggaattgagaaattttctcttaagccattttatgcagcaagagaatttaagaatcttctcgaactgtgtttctacaggagtcgcagtttgattggctgatgggttaacttcgacaccgtttctgtaattttctcttgctcattgtcttaaactcatggattttcttctaaacatggcaaaattataaatattttctactgtttttctaaatccattttattttatctattctataatttatatgttcattagttgaatcgagttttttccgttcaaaatgagtttccgcatgattttgtacgttttaaatcttagatttaagccatattcaaaatatcgttaggcaatctaagatgaattctataaacattaatcttagattgcatatacaaaaaaagttacaagttgaacacaaactgcataaattaggaacaaagctcgagagtgattcgaaaaatcaaacccaaaagtaatacggataatcaagccgctactcattcggaaccacgaaattacaaacaaaactttgaacataacttaaaataaccaccgaagtttaagaaaaaatgctaccaccaaacaaaataatgtgaaaaccacactcgcagtcaacagaaagcgcggaaagaacagtagatgcagaactacaaaagctcacaagcagtcttcgaggcaaatgtaaatcgcgaaaaaggaccccaaatacgacgaataacaagaagaaaaaatcacatataagaatcaaaaattgtagccatgtaatcttcatcctaaagagtctaaatttagaactttgcatgcccacaaaaggttagcctttacataccaagtaagaccacatgagaaaactgcttattcaactaaaccaaggagtaaggacggtggaaggagcaacctaaacttctaataaacggtagactccagatacaaacaaaaactaatgaaacatacacaaaaccttgagaaaggactagcttcaagggctggtcagaaaacccaagagcggaaacatacataaagttatgttgtgagtcttctttttgaaaatcccaaatatgcaatcattgtttaaggcttcttttcataaagctctcagtcccaagaggttatgaccaatactcaatgttgaatgggataaatagcccataagcgaggacttgcacaccgcacgctatagcagagggtgcgcttggagtagaagaagttgtacacatgctgcttgaatatactttgtcgtgtttgtttgtacacactgagtgaaaaccagagcgattcatgtagttgtgacttgtgacataacaaaaagagaagaaaagataatccttcattagaaaataaagatccaatcagagtcaaagagatgagtttaagaaacattctacagtaagaagtccgacacccttaaaagactaaaccagatagaaacctaaaactgactccaataacaacttcaacaccataagaagctgggaagcgctatgtagctcaatcaattgtaactttccttgatggcttgggggtcctgtcagataatatcccactaggaaccgtctcttccatcacctttgggactgtgaaattgaaatctccaagcagtgcatacttgtaatcctgattggcatcgatgaaggctgcgatttcattacgagacttgagcttcttcccagtaggagttatgtagtacgcatccattttcgagtaatcctttctcagaattaagctccttttgaaccctcttggtgtcctcggcaagccaggcttgtcgatgacccatgttctggaggaatcatagtttagatctccaacatcttcacaggacacaccttctttcgtcttgcaaaaaaacgggtcctcttgtactctacttctgatatcttcatactcatcttgagtatcaatcttcctccacttcatgcacttctcacactgcacagcaaagacatctatcgacctccctggagtaccggcttttttctgcacctgcacaatacaaatatggaatctcggtgaaaagaagaacagtcactcacaagctacttggatcaacagaatcatactacaaatcgtttaatatatagcaagatgagaaaacatgcgtagagaaacacaaaagtcaaaacagggacaccaccaaaagagtgatactgagaacatgcagaatcaaaaaccaaatttgaagaaaagggtcactgcgaaaccttaaatagcataaatattgattaaattttatacataactgatcagccaaagacacaacgagaaataaagttataacctttatgtctgcatcagttcgtcaaataacactagtaactaagtcttcgaaactggttgaaaaaaaaccttaagattctcaactaaaaccctaattaagagatagaattcaatgataagatctgtgtggtaaagagagaccacaaagcaaaattgaaaccgggtttaggtttagtgaggtttaccttaatggttgttggttcagctgatttctcagtctgctcctcaatcttacttccagatgaagcaactgatgagttttccgatcgagacttcttcaagttcattgccggaaatggtaacattaaaccttcaatttcaagccctaaacgatcagtataacgaagcgagagaaaactccaaaattgcgaaattcaagtacgaaatcgaatcaaagagcagattcaaggagagtgatccaaaagttcatacctcgaacaacgattcagatttccaaaaatctcagagctctttgttagagaatttgagaatttttctttgaaccctttttaatgcaatgtttttttttggccagcagaagaagaaaaaatcttctccaactgtatttacagatgtcgagatatgattggttcaatgcgacacgcagaccatttctgtaatttttaatggattttctactaaacagggcataataattaattaaatttccaagtgtttgttaaatggttgactctggattttaaatatgtacatatttggccaaaattatatagaccagaaatttagtttttaaaaaaaattattttagtaaaagtattacattataaaataacaataaaacaaaaaaggacaaaaataattatttttgattcgatcaaaaacatacagaaagtatgtggtacgtcaaatctttgatagttacagtacatcattcacgtgtcgtgatttttttattttttatgataaataacatgttattattatcaatagtgaaaaaatgaaaatggtatatttaagcaaatgtgaaaatggtatatttaagaagtttgagaaatttcttttcacgaaataaaaagatacaaattccacaataggcactaatctttataatacacaagacaatgtttgatataatatttgattgatacatacacaaagcagaagacacacttccaaaaatttcaagtttgtaaggtcatagagactgaagcggctctgtctcggactccgacctgctcgtaaagtctaaccctccaagtgctggcaacttcttcttatcgtcttccgtgtacaatggcacgaaccaatacattttatcacttccaaaaacctgattcaacaaaggaatagagaccaaactttttaaagctttcattgtgttcgatgtcaaagatattatctaagtagcggggaaacgaatcagtcactgaagaacgagtgaaacaaagaagatggagagcgaacctgttcaaagtttgtcttacgaccaacgttgtatggccagttcactgtatgcttctcatacgcctgagattaaagaaaccattagtttggtcagtgagtttattgacatggagattcctgagagaacccaagttaagagcaaaaccaagtgagagttgttgctttacctcaatagttgtggtgttacgagcgaccaacattatgtgcattattaggaagcctaggacacttagggcaaatgctatgttcaatactggaaagcaagagagtgaagtttttgaatcagatggtaacgttaaggtgttctgaaacaaaaacggaaactgagatttctatatctttgaactcaccaaatgcaacaaagctggctgctaggcttcctggtgatacggttatatcaccatctccatcgctgaagaatacgaggaaaattggcaatagtgatactgcaaccaccgttgtctcaagaaatgtgtaaaactgcatttttgagatattgggaatggattatgatcatggcaacattaatgaacagaacatatcaaaaacaacttcgttcagcgatgctatgataagttgacataccaagaataggagaaatgatttgtagttatttgcaccaacacaattcaccacccaaacacagtgatggtccatctttagtatgcatcttccacctgaaaacccaatatgacaactttttcactactaaaaaacacatataccggattcaaagaaaagaatcactcattgaagagacttacagactgaacaatggtgagaacgaggcggtttatattgattgcactttctacaatatcttacaccatgagacgaggaatctccaaccgaagcttctccaatcaaagcttggtttccctcgcttttctctatgtctaattctggcctccaacccgttggaacaccaccagggtccgtcacaacaacagagaaataactccacagtagcattataagctgcaaacaaaacaacaatcataaaaaaaatgagtcctttgcttccttactctttcctctgtgagttctacaatgcgagggagttcaaatgttgataatctattaaaacacacaagaaaccaacagctttaaaactaaaagaaacaaagacactctacactacaaccaaatcaaaccaaaaaaaaaaagatgaatacttgattgcttacttagcttatactatcctaattcactatctcatcttgctgttacttaaaatccaacagacacaaatgtaaatccacacgccaagctagattgagcccactaccacaacaaagcaacaagctttgactcaatattatcaaagcaaaatcaagttggtgcatctgacagaacccaaaagattacaattcgtaagtaactaaagcatagtccaaaccagcgtatcatgtaattagcagagatctagagggtaccaaatgcaaaaatttcaaaagggtcacaaaaagattaaaaatttcagattgacctagaaggaagaattgagtttaccagaaagtggaagaacgctaagacgagaacagatagtaatgaatcgacaccaccgatcagtagagcaggtccgtaattaacgacgacaacggcgtagtatgtgaatccgatgatcccgataacaattaagatcatgatcgaacccaaggcgcgaagtgctgtgcagaacttgaacacgttccacgccattgtcggggttctttcaaaacacccggaacttgtttggtcggagaaaaaaatgaagcaaaccccaaattgaattgaggaataaagtttataaatttcgatgaaatcgagctgacaatttttttgttttcatggataattatccttttttctttgttcaaaaattaatatatttatttctgaggctttttattatactctgttaaattttaagaattataacttttctttgtgataattttaagaattataattttttcaggagaattacaaaatgaaatttaccccatacgataactactaattacacgcatggtaaattaaataattcaagtgaagaatttttctttgaatgattttacgtcacattattacagatttacagaactacttatagtttagtcacaaacaacgtagcatatatgatcacgcattaagtgtcgaaaaaaaaaaatatgatcacgcattaatttaattattttcacaacacaacccccttaactaaaatatggatcattatagtagaagcataatagtggattagtagcaatttattcctcttaccattatttttccagacagttttttttacatgaacaaaaaaaaacgttttttccatattgttacttactcccacttctccaatcaaacccttatcttatcaatgaattgaaaattttaacaggctaatcgtgtttccttactctcttctcttcagcttcctctttaatctacaacatataagataaaccacaaaaacaaaagtaagatgtagataatgtcacacatgacagatatatatatatatgaagttattaagctaacattgataatgtgaagtttaaaatattaacctgatgatgaagaagcttcttatggattcgatagccctaatgacagaaaacaatataacaacaacgtcaacactggtcaatattctataatacgtaattagtttaaaacgctaacggacaaagtaatatgattgaagtttgatcaaaactcactttatcagttccataaatgtaatcgcagtaagtgaaaaccgaagcaaagttgctctggctttgtcctccaacgtagtgatggtagtcatgatactcaggtccaccgtaaaatggaattaattttgtcacactccatggaaaatcatatctgcaaacaaaataagtaaacaagtgcatctacaaacaatatgtaactatttatgtctatgtttgcatattactaaattctttttttgtgtttagcgtttgaattttcgaatgatatcactaaacactcaatctttcttttacaaacgctaaacaggataatgattttaagtttgtttagtgtagttttacccgctgtgggtctcaatcgcctcgaattgtcgtaaagatatccataaccaaaacgtcattatatggccaggagcaattgccggtccaagaaacgtcggaatcccaagaatcaaaatctcggcccaatgcgcatacggcgatgcgtatccgataggtgatgtgtactcatgatggattcgatgaatcttctcgtaaccccatttgcaatgcatccatctatggatccagtagttagtgtaatcttctatcaagaagtaaaccactaattgtgctactatctccattaacgatggtaatggcaaaccacttcgaatcccaaccatctgtcaattaacacatatagtatatctcaagaacatcacaaattaacaaaaaaaagtgttgtaagaagggtatatacatatatgcaataatataacgtttcaatttaatattttaatgggatttttctctaaataaccaaaaaaaaaagcacaaaattgtataacaacccactcacacaaaaaacgttgcaaaaacaacacttaaaaaaaggaatatacatatatcataaaatatttggttgtttgttttaaagaataaatgaaaatttaaaatgaatagtaacctggatggaaggataagaaacgatttgcaatgtgccgacgacgagaaggaacaacttcatgacttctttataacattggaacatatcagacaacgaatacttaaccttcttctgaatcttaaactgatcgaaccaaccggtccattcgacaatcacaagaggaaaaggagctagtgaaaagacaaggaagagaaccagaatggtgtggcaatatacatggaaattggatttggtggctgagtaatcgaaccaaaccgtctcgaaccaagtaaggtttcgtcctaacgccacggacgcatcttctacggttggataagggatcatattgtgagagtgttgtgtctggattaatttgtgtggtttatgttatagcattgttttggagttatagactcataaaacgtgtcttgaatgtgttttggaaaatgtatgatgaggatgcttgaaaaactatataaagatgcacaaatgtcgaaacatggtacctacttaattaatttcggtgatttttctttttttttgatttttccaatttttggtatattatttaccctttgagaagtccgccaaattgggtcctcaatgtatttgttttttgactttttagtagaacacaacaaaacatatcttatctctttacgtctatatttgatacgaacgggtcacattttcgttttttaaaaatataaaacgaaaattcaaagttactaaggttgttattttttagtagttatttaggttagaagatatctaaaattgtatgttcggaaatatttgttgcaaattcatttatagacctatcatcaggagtaatttcttttcaccaaatgattttgaatagctaaagcctttcttcattgtttaacaatctacgaaacgaagagtgatgatccatacgtctagaaaagaaaaactcgttgatacacaaaatatgtgtggacaaaaacttaatatcaagttcattaaaactctttcgtgaattggtttaagagtaaaaacttattgaagtagtttacaatatagcctcattaaaccaaaaaaaaaaatatagcctcacacagctacaaccccattcttgaagttattatcatattcactgtgtccatggtaattctaagacaacgagaacaaggaaatgtgtgttaaagaaaaactgtgtgttgttaggtttagttgaaaaaacacaggaaggaagagagtgtttcgattttaaagtcataaattagttggtaacaactaaataagttattgtacctactactgtacttaaaactgttgttttcaagtttggtgagacagctttagtaaatgcatgtgtttcgcttgttttagccttctttgattagatttgttttccgagagtgaaatcgacccccatcatcaatgcaactatcgttatggtaaggattttccttttaaatcatgccactcaaatgcaacaaaaaggaaaagaaacgcccaccgtggggctcgaacccacgaccacaaggttaagagccttgcgctctaccaactgagctagacgggccttgttgttaacgttagatacttaagttatacttaacttaacttaatactatcagagtaggaacttgttacaagccaatgaatgcactatgtaacatttaaaatatacaaaaaggatttattgacacacaccaattccaaaagagttttaaaaaaaacttcagataggaactcgtcacgagcattttcatgtgacacagggaagaccagaacagagaaaactaactaccctttcatttttaagtattgactacatttgtagaatgcttgaaacttacggtaagtcaacctcgcgaggggttttagatttactaatcgaatttctctcctccattaaccagcttgttgctcttcttggacttctccttcatctgcaactcataagatatagcatcaagaaacatatcatcaatatgatgatactagataccacatatactgttatgtgagcttgcaatttgatggctgcgtttatgggtatgcggtatgccgagagataagctagtctcagtttatggagtatttatttacctgctgaagaagcttcttctggaatcggtaaccctgatgaaaataagaacatatacccacattgtcaaatttttatccagaattagtagacgctaaccggaaaagaactgaagtttcattactcactttatcagttccatagatgtaatcgcagtaagtaaaaactgaagcaaagttactctggctttgtcctccaacgtagtgatggtaatcatgatactcagctccaccataaaatggaatgtactttgtcagagaccatgggaaatcatatcttcaaaagaaaacgaaaaataaaaaaaacaagtcaatttatctccagagaaacaagtttcatgcaccaagcaatcatcatattgtccaaatacttatttgaacaagacaagatgcttatcatctcaagaatgatttcttgctcatgttgaccacaaaagattaactaagcagtctctaaacaatcacctagagctaattacagtcaataaagcatcagaaaaggctagtgcctaaccttagccccaccaacaaaaggtaaacgcactattgaaacttcccacatagccccaacgcattataaactaagataaacaattcaaaaccattccttttccttacccgctatgagtttcgatagcctcaatctgtcgtaaagcaatccacaaccaaaaggtaatcatatgaccaggagcaatagcaggtccaagaaacgtgggaatgccaagaagcaaaacctcagcccaatgagcataaggagcagcataaccaataggagctgtatactcatgatgaatatgatgaaacttctcataaccccatttacaatgaaagaatctatgaacccagtaattagtataatcctctaccaagaagtaaaccactaactgtgctacaatctccatacatgatggtaatggtaatccacttcgtatctcaatcatctgtttcaacacacgaaaaacaaaatcaacctaaatcgcatcaattccgaaattagaagccaaattccagaaattaacctgaatcgaaggataagaaacgagttgtaatggaccaacgacgaggatgaacatcttcatgacgtctttgtaacatttgaacatcgatgagaatgagtttttcacttttggttggattttgtagcgattgaacaaatctgaggtggattgagatgattcgatgaaaacgagagggagaggaacgagagagaagatgaggaagaggaagagaatgttgtggcagtagaggtagtaatcggatttggtggcggagtaatcgaaccagagagtctctagccatgtgaggtttcgagataatgcgatcgacgcttcttcgattgttgcgtatgggatcattgtagaagatgatgaaatcgtttccttccggtgacggcgacggtcgttgacgtgagattgagattgagattgagagagagagtgagagaggagagtgtcgtcgttgttgttggattttgtctgttatgatttggcgaatatttggagtagtgacgtggcattatcggtttagtttacaagtgtgatgtttacttgttgaaccggattaaaccaaaattactaacattgtctcaagatctcgcttacaacataaaaaagagggacaaaatggcccatactaaaagcccattataaattattgggccattaaaatggataaaatgtactccacagtagcgttgtgtttggagtaggcccaattttctttctttaattgtttaaatggtgcatacaaatttctgtttttttttttaagaaaaaaaactttattatacacttggatatacacatatatataaagacacggatatacatacacgagttttgtggaatgtgtctatgaatttttatgacaccattatactatagagatagcaaaaggttgaaataaattgaggctgttggccaattgtatttaagtaatagaatggtattacatcatcacgaaaagtgacgttacatttgaaattataaagtcttacaattttttcgtcatgacaataaatgatatttaaatgtaataatacatattttttaagtttcaagtatacataaaaaagggtcacaaacgatcgttgttaaatacttggtggaaaacaagtgcgttacgcgtgaacatgagtgcgtatggcataagagaagtcgaccacaccattaatgactttaaatcaagcccaaaagttctttcttttaacagtggaaacaaacctcggaccaatctcagccacacaaattctcctttttattttatgttgttttttcttgacgttgatgaattcttgtttttggttataaattttttatattacttccattactcagcactttcgtaaaatttaatgaattgatgatactagttgagtctccctcctctctaattgtttatgtgttttttttcatttgtttatgtgcttctcactatcaccttagattttttgtgttttacgaaacttgtttgggtttctcgttttcttgtttaacgtgtcaacttttctacaaatccaatagttttgtttcctttacactttataggattgtgagtctcccaagtaatcttctaaaacaatgcatcaagaaatttatattcatttgtacaagtatattattgcctttttccaacacattttatccataataaggatagattttttaaaaaatactccgtatgctaaccagaaaacattttagctccataattacatagaagttttaatctaatacagtgctacaattcaacgcatttctattttactataataaacacaagtacgtaagaatcagcacaagatatcatactataaaagaatcgatcgtcgacaggaaatataaatactatattacaagaaccacgtctatattactacctttaatcgtgtattttttttggtcggtttgaatttaaatgttaaaatccacacttatgttaaaaagaaaaaaaaaaacaatttgatttggaaaaacatttgaaaaatacaaatgaaagaaaagaagataataaaagagtaaagcaaagcaaaagcagagaataactcttaattcgcttctttgccaagcaaaccaccaaaacctctcaattgttttttcttcttcctcctccttaagcaaagatcatcattcacgaaatgtctgattcgattcaccggagaaaagtttcgaatcctgtaggaaatggaggtcggagctccagaacaagacgaacagctttcagatatgtttccgacaagaataatcgctctaaatcgagtaataaggttttcgagagaagcttctcagagccgagtcttaatcgccaccgcgacggacagagtaatcacttgcggcgaccatcgccgatgagaggtttaccgatggaagaagaaacaaaaccgatcgtttacttgcctaggattcgctctgaggttttcgcttcgtctccgtcgttgttgaacttatattcgccctcgtcttcatctccgatcaatcaagaggtcagagtcgtttgcttctattttttcaaatcaacaaattcatgatttcaactctgtaagagaattcatcatttagtccacaaagatttaaaagtttacagtttaagcctaatattataaaatatttcaatataaccattatataggctgaacaaagagttttaagttcagctgcaaattctagagtcagttctccagttcatgttatcagatcgtgataaatataccaaaaattgacatttctattaaatttctaaaatcagagaacctcattttgttattatttttcgaaacagggtaatacaaaagaagcaccaaaagtaataatcagtgtagcagtagaaggaagtcctggaccggtaagagcaatggttaaactgagttgcaacgtcgaagaaacgatcaaaattgtcgttgacaagtactgtaaagaaggaagaactccaaaactcgatcgagattctgcctttgaattgcatcagtcacatttcagcatccagtgtaagatatattaattatccaaaaataataattgtttttacatatagaattaataaaataaaagcacaaatgatgttttggttgaaattttgaatcagttgttttcagtttgacgtagattgattggattaaatatctatactccatgatatctagttttgctttaatcaccaacggttatggaaaatatcaaaactactcatggctcatgtgaacatagaaacatcacataattcttgagttatataacctataataaagaaaatggtgactaaacctaacgatttacctctcttttttgtcacataattgaatggttaagacaatcaaaatatacttaagtttgatgtaatgtaattttcaggtttggagaaaagagaaataattggagaattaggcagtagaagcttctacatgagaaagaaagctcctgaaaccggaggttcgttcgccgggatttctccagcgagaacgagcctaattccgtcgtcgaatttgatcggatcgtgcatcgctcagttgattgggaaaatcatgaggagaacaagaaggatatggaacatattggtatgtgtgcaatgagatagaccaaagtatacacttttgagcgtggcacataatattttttagtttgtgttttgctccactctcatcaaataagggaaccttgtactttatgaaattgtattataagtgtgtatatatttgtgacgatagatggatatggttctacgaaattattgatttatgaggaaaaaattcatacacacttcgagaaaataacagaaaattgacttttgaattataattgtgagaaaaatgagagatcaaaccttctgtttgagtcagagtctttaggaagtatcttcttcttctgcgaattgcaaaacccaaacaggtttataacagagagaagttgccgtcgctatcgccgacgcctccaccactactcggcgatcactgtagtcctcatactctctctttcgggtaaaattgctctcattctattttaggaagcctttcttatattattcaggatataaaccgtaaagttttagattcgaaattaaaattttgactcggtgcatcaagcacaaacttattggactttctctagaaaagagctgaaattaggaactgaggcatcaatgtaatgtatgacgattgttttgatagtggaaggtctttggtagattggttcttgtgttggttttagagtttgtttcacaaatgttggattctaagctgagattcttccttcaaagatgtgtagtgcttgaacaggcgaagcaagttcatgcacagttagtagtgaaccgctataaccatcttgaacccatcttggttcaccaaactcttcacttcactaaagagttctctaggaatattgtaacctatgttaaaagaatcctcaaggggtttaatggtcatgattctttctcctgggggtgtttagttcggttcttaagccagcataggaagtttaaagaaacggttgacgtgtatattgatatgcataactctgggattcctccaagttcacatgctgtaacctcagtgttaagagcctgtggtaaaatggagaatatggttgatggtaaaccgattcatgctcaggctctgaaaaatggattgtgtggttgtgtttatgttcagacaggtctggtgggtttgtattctagacttggttacattgagctggcaaagaaggcgtttgatgatattgctgagaagaacacagtttcgtggaactcgctattacacgggtatctggaaagcggggaactagatgaggctcgcagagtctttgacaagatccctgagaaagatgctgtgtcatggaatctgattatctcgagctatgcaaaaaaaggtgacatgggcaatgcatgctctttgttttcagcaatgcctttgaaaagtccggcttcttggaatatattgataggcgggtatgtgaattgcagggaaatgaaactagcaagaacctacttcgatgcaatgccccagaagaatggtgtctcttggattacaatgatttcagggtacacaaaattgggagatgttcagtctgctgaggagctctttagactgatgtctaagaaagacaaactcgtctatgatgccatgatagcttgttatactcaaaacggcaagccaaaggatgctctgaagctattcgctcagatgcttgaaaggaattcatatattcagccggatgagatcacactctcaagtgttgtatcagctaattcacagttgggtaataccagttttggtacatgggttgagtcatatataaccgaacatggaatcaagatcgatgatctcttaagtacctctctaattgatctttacatgaaaggcggagactttgccaaggcattcaaaatgttcagcaatctaaacaaaaaggacacagtttcttactctgctatgatcatgggctgcgggataaacggcatggccacagaagcaaacagtttgtttacagctatgattgaaaagaagatccctccaaatgtagtaacattcacaggactattatcagcgtatagccattcaggtcttgttcaagaaggctacaaatgctttaactccatgaaagaccacaacttggaaccctccgctgatcattatgggataatggtggatatgttgggacgagccgggaggctagaagaagcatatgagctgatcaagagtatgccgatgcagccaaatgctggagtttggggagctttgcttttagccagtgggttacacaacaacgttgaatttggagagattgcgtgcagtcactgcgttaaactcgagacagatcctacaggttatctttcgcatcttgctatgatatattcgtctgttggtagatgggacgatgccaggactgttagagacagtataaaagagaagaaactgtgtaagacacttgggtgtagctgggttgagggttcatatcattgagatgtcggggaatacagatttcggtttcggttaggatcatcaaaccgaatgtgagagattagggatcaacttctacatccaagagtggaagaaactgaagaagaagttggaaaaacaaccctaagttaccaacctacatcagacctaaactttgagagagtgattaaacagaggattttatgaggaagaaatcaggttgatgtcatgagagggcttgtgtcgtggatcagaaggtaaagacggtgtccatgtggcatgtactgattgggagagaagacggtgtgggacggatggttggatgatcaacaacattcgaagaggttggccttggagaagacatgattagcgtgtcattggctagccctgatggacgtgtagtaagcagtggtgtcgctggcctgctggttgcagctgtaggtagttttttagccggcagcaagatcatagaccgaagcagcagaatcaaaaggtgtctccaatgccaaccggcaaccacattgcagcatgtaaactggaaaacagtaccttatgttgaaaaagaaagacaaaatggtggttcgattgtgtacaaattaaaataataactgaacatacaaaaatgcatttatcacggctcatgctttgcataggctttaacactagtattgtacattgttcatgttcttcaaactttgctattaatttggtataaattagcttagccatttagctaattcattccaaattagtaacaaattttcaagaagataaaaagtactatattagttttaaggccgtgttaagcaaaccaaattgatcaaaaagaattttatatttttcatcaacaaaggtaaactttatgtatacattttaaaatatatatcaaatggaccctttttggagataaaaataattatttgttatcagtttcgtttgctttcatctatttatattgctttcagagtttacttaatggcttagctaattcataccaaattttcaagaacatgcaaaatatacaattttagtgttacgcccacgcaaagcatgggcggtgataaatgtggttttatgtgttatctttcgcatcttgctaatcaatcaccattggtttgaaaaaatccttcctggtttggataaatcagaatgtgtagccggttaagagattgggagcaagtttcaatttctacatccaagagcggaataaaccgaatagaaagttggaataaaggcatttccatcagtgagatatcttcttggtttctcaaaaaaaaaagatattagtattttaataaatattagttatataattaaattttaacaataaaataatatatgaccaatagatgatatacaagtgtttttgtaggtgtcttagagtttctcacttgagagactaattatactctctctcatactttttgattatattttatttttatattgaacagtttctcaatgagaaaccattgatggagatggtctaacaatcctaagtgacaatcctaagtgacagaccaacataacacctagactttgagagtctaacatgtagagccctaaactggaaaccaaaatacagaggatctacgagttcttcaaggaagaaatcacgtcaaagtgatattaaagtcatgagaatgcttgtgtcgtgaatcagaaggaaaagacggtgtccatgtactgatcgggagactagatgtcatgggacggatggttcgatgatcagctacattcgaagaagttggcattaatggagaagacatgaagttgtggttatgcggcttcggtgtctgttcttgctggtttgttccacctaagaaagttcctacaaccacttgaataggagtggctgcaaccagcaagccagcaacaccaccacctactacacgtccatcagggctagcaagcgacacgctcatcccgcctgttctgcttcgtgtcccgtctgagtcactaggcatgaatgttccagatagtgacaatatctcaaaccgaccctttaaaaagcataagcactcgtcatgatcaacaagaattacatgaaaaccaaaagcaagggataggcaactcggttttatattccggttcggttgtttacattgatggtttattaatacagtttggtaacagtgtttttcatctatgcaaatagtgattaagatggaaaccgtacctcataggtcaatgtaccaccagatgaatcaggctgacgaagtgtaacgctcgaaacgacaccgtttgcgcataaaacgcaaatagctagagacccttgttgagaaaatgatattatcctcttcgtaacgtcctataaaaccaaattacccactaaatcatcaactactctaaaaataaacacattcttaatctatatttattttgtcataattacctcgcctgcattcaccgtaataatatgcggcgtgaaattagcggcggcagaggaaggagaccattcaccttcacaagcacaaaacaacatcaccaaaaatctcttcaataaacatgcaattattattataccgtatatatacatgtatatatgaccgtatatgtacggacaaaaagttgtaataagaggtcccaccacttgaagtagaagctttctttctttgcatgtttcaacttaagacccagaaagatcccaaaaaatctcttttaaacacttttgaagtcacgagaactcaagattcagttctaaacaaaacatagatttagacacaagattagcaaaaaatttaaaaatctatagttacctaaattctcgacctggtactttggcctgatgaatgagcttggagttggagttgctggtttcattttgccacgtttctccgatgtcgtcgagaaatcgatgacgtgagaagtcgttggtgcggctgatgatatcggattcggagatagcgtcaccgctgctccgtcgtgtccgtacttcctagggcgcccacgtctcttctttatcggtccgcttgagaaaccatccatagccgccgacggagtaaaggagttttgcggcggtggaggaggaggaggagcgacggagttgggaggtgtgtttgaagtttctgacctcggagccatgtggaagtctgacggcgcgttggatctcaccaccgtaacgcctccgtcgctcccggtggttgttttaacaacttctccggtagtctccatacctattacgattattaaacaaaataatcgttttgacaaacctaaaaatagatttgggacagaagaagatataattttccaaatccaaaggttaaaaatcagattaaaaatcaaggaggaagaagaaatacatgagataatattttcttgtagatattatttcttagaattaaagctttgaaaattattaggatggaattaggaaatgtttgagaggaaagtgaggaaaattagatttatttatgctgtgtagttttagatgaaataagaaaataaatatttttttgacggcaatgaatatttttgattttgaaatttggaaaataaagcgttttctatatattattttaatatttatttcaggcttttagttcatttccttcctaactttttccttgtctgtccgtttaaatttaatattgaataaattaatacgaaaaagaaaatgtattgttttcgtgaaaaggaaatgtatttaatggggcgttataatacaactcacaattttatattttaatttggagaaaataatatctttttgtcatattatagaaatgggaattcgtgtttttgctggaatccgatggggaaaattaataatttaaaagagaagaataaataataaatagaaagtaaaaaaaaaaacggaaagtgggtgatactaatttttttgttttaaattattattacttttagttttttctgttttttaaaagacaaatgtggcctgcagataagacttgttttttttttctgtcattcttttaaggtgtttttatatcattgttgttttggaaatatatagaaaatgatttttgcaaaaaagtaacgtaaatctcgacgatacaacttatgtaaatatcggcttctaagcaagtaatttcacttctaagctaactaaaagaaaaaaataatatatatatatatatatatatatatatatatatatcttaaaccatcctcaagctaagacagatcctattcctactattactaatgcgatttgtttcagcagaataagtgactacactttgatatattgtcgaagcatacaaccagatgatagtttaataatgtgaccacggtccacaacgcaaggagatgtcgatatttcatcagtattttgggatgttaatcttctcaatgtttgttttccagtgttatgtatgaatgaagatgtatatttaaaatgaaaataaattcaagtaggcttgtttaacaatagacgatatttgttgaagctatgtcatggaattgatcttaaaacgatatataatctttgcgaaagggaaggagtaatctcctgttatatccttttttcattttgtttctcaagtttagctcacgaggatatgatatctaccaaactagttaatgtcattttgaattatagagcaacttgtcttattttgagaacaaaaaaaaagaaaagaaaaagatatcgtatcatttcctctgtcaacaataatattttatcacattatatgctaatctacacataaactacaatttaataatacaaagaaatgtattttccaaggtttggtctaccttttaatttgtttgaataatttacaaagggtaagtaatcatgaatcataatttttaaaaataatataaatcgggaccacaaagcattgactcgtagcgattaatacatactataactttccaagaaaacaaagaaaattaattaagaaaataaagattagataagaaaaagcattttagtagtagtaatctatttgtttgggcttataaagaatacgtttgctttttaaacaaaaattataactcgaagtgcatttcctccaaagttttatgttggttagaaattcacagtacacctttttaaaatctacatcagcaaatcatgtctatttaaaactctactttgaattgtgtctttagatatatttcataatttcaaaatttaatcttaaactcaaaacataaaactaaatacatagttacaaacgataaaactcatctcaaaatctgaattacatgttatataatgtgtcttatttcagagtcataaaattatgtcaaagagtaacaacttaaacatcgatagataaaatatgattagctgtgcaacatgcaagaatcgatatagttttaaacatccatgagctaatgcaaacggcccaatattataaatttgggtctcataagccctatataaaagtccacttacactattaatttacttaacttttttttgtcaactatactataacccctatatgatgcgaacccaactttaaccggcggtatatggcaacatgtcagaagaaccggtttggtgcaaaattcaaagtcagaagtctcgtgtttggtttttattggtcaataatgccttagctgtttgcaactctgccttttaaagccaacagtaaagttagattctcttaacttctaattggattgttcttctaaattagttcacaaagaactgtacacagcatacaagtacaggtacgattttttccaatttcaaatgtttgtttgacttcattcaattttgaacaataatgctgccttcatttctaaaaattaatattattgatatacaaacaattaaaattcagtttcatacatgactaaaccacttcaattttgtccataagttaatgactcatgagtcatgagcatagttgtcataataatacgtagcttttacgtcatagagacgacatgtccatggccaatagttttgtgtaaactttaaatatattatattatccttaaccataattcttaatcttttgtctatcggtcacatgttatcttcatcttgaagaaatgtagttgtctttttataagcatgcttagataaagattatataataaaaaaacgaatcaataagattcacacatgtaggacccacttgtctcctttgcgttacactaaccccataatttaatttaattttacatacaacacactgatttactattgacaaaactaatcttctaacaacgataggttatatcataaatatgtacagagaaaaaaataaatgttaccaagattctacctaacatccttctactacctattggtccaacatgaaagaccgaccaccaaattcttaactaacttcccacattttatatacataaaattaaatttgcccacaaaccaaatccataaccggttcactatctgctccagatacaccaattcaaccgcgtgggttgttgacaaacacgattgaattggtctacatggaccggttagttaccccggttaaaaatatgatttgatcaaacccaaatggtatagattcctcatcactagactcccaagtgacaccaacactgtccctcctccataccgtccttggtgatcttgcggttctatatgttgttccttctcaaccgcttctcggcaactaatcgggaacggttctttaacactgagatcatcgataccgatcttctccctaatcgatttgattatctcgggatctataaggttaccatttgcatccgtcacatagaacacattcctcgctatactatctttagtcgatatctcggctctagcaatgtttaaaccgttctccctcaatattcgtgttacttccgctaacaatcccggtctatccgctgtgcataactccaatctcacaccctgcataagagtaataactagtaagtaagctactaaaccaaccggttttaagttctgttaaccaaatgagagttgttcatcatagttttataccttaaccgttcttctttcaattgcagcttgtaaacattggatcaaacgttgtctctccggttctgaactaaccggatgtccatcactatgtctaacatagaattccaaaaacgccgtttctccaaccgttcgaatcgcggcgtggaacacaatgtaagccatatccgtcaacgtgcaaacaacgtcaaacaaaagcttcattcgatctttacactgcaagttcacaacagagtaaccacgtttcggaagattttgtaccgaaacgataggagatttctcgatatcaaacttcttctcatagtcacggtccataaacatcctttggtgcaaccttctctccatatgtgtattgccaccataagacacacatgtcctcgtgtcgttttggtaaccatcgtcggcctttagtagatttcgtagttgtccttctacacgttggacacggtcggaatctccgtcgatcggtgtcccggagttaccgtctttaacataaatcatcgacgcaatcctgccgttatgcgtccatgccttagcctcaacaacatcacattcaagatcagctagaaccgcgaaaacctctgagagtaaaccgactctgtctgttccggttaactctagagcggttaaacccgtatacccttccgttttacagtaatgagacgtttcaatagactgtaaaattttcaaaaaactagtctttaattttccgataagattcacaaatttaattgcataattaaggattaactaatttaccttttcaatgtaacggattaggttctcgtcggttaatttgtctccgttaagatcgctcacatgaaaaactgcaaaggaaaaaaatcaaacaagtaaatattactaattccttaattagtagtaccataattagcgtaagattagggataattaattaccatccatattccattttccatcagaggaaatgtaagcttttttgatccagagattcatatcagtgagaagttgtacagattcaagcaatattcctgggcttcttgcactatcaatctttttgaaaaaaggacaaaaaaacaagaaaaaagatgataaaaatcattttcaaataaaaaggaaagagagaaaagacgaagaaaaacagaggaaggttgcgtgagggtaaaaaccttgacgacagttgaattagggcaaactccattgtcaattacgaccctgcaagtgaccaaacagacagtgatccttttaaaactcactcttgtgttgtgtgtgtatgaatcaaacaaccaaatcaaataaatttaaaaataaatcgattgaaattgtcaataaaattgacttgtgatttttactgtttattatactattagatgacggtaaagccaggatatcatatgacgattccttccataaaaattggagattttatttttattcaagaaaattctttaaaaccttaactgttatagcaaacccatcttatgatgattaaatttcaatttcgtgaaaaattaatttggttaaacataaaacaaacaaagaaaaaaggcataaaattttctttgaagagaacccatgttttgaaaatattatcaaaaatcatgttttgacgattattacaagaaaaacaaaaatctgatgattcggatcaagattttgtttgttgttcatagaagatgataatcgtttacatacaaaaaattataagataaaaagaaataaaaatattttaaggaaaaatacctgggcatgttcatccgaacaacgagcttctcatattcattagagcaatcagataactccatcttttttattcttcaattcttcttcttcttgcttcttgtttcaaacaataatccttaaaactcagaaccacccttttaatttatctttcttcttcttcttcttaagagaaagctatcataaaaccagaacaattcatgtgcttcttctacagagtctctctctctatttctctctctttatttttctccaggggcagagttacttccaagtctgtctataagagaatttaataggataagaaataaatggtaatatatataaatagtattcctaattaaaatatcaagtaggcgttaggggaaaagaataaaataaaaataaacagacgctgacctgttcctgctttggaaaactctgggctcctcccatagaaagaaaaatctaaaccattagaattttcaaaaacaaatctttcttcatagactttccgttcttgtctcctggattcttacccaccttccctttttttttacacaaaaaaaaaaaaaaacaattgagtttggccgtacaatacaacaaagcaaagggaacaacactttggtcggaggatcctacgtggcagatcacatgtgagagttgtaagatttttacgcgcgatttgtcaaccgtaaatttaacgccgttaagagttaaaagaattaacgccgttaggatctatacgggatttgcgtagtaacaaacaaacagccgttgataacttcggttcccgcggaatgtcggttgtcttcccgccaaatttcacgttctcactcagatatttttggttacaaacatttgatttcacatgtaagaatgtttttttgaccttcactcacatgtacatgcttgttgttttgataaaaacatttcaatagcaattcaattttcaacttcacttgtgataataatcaaagatatgaaacctaaagggtagatataaaatttatgtcatatgtacacaggattttgaattcttagcataacatattgtgtttattagtttactctcacaatattttgttaatggtgaaatcgagaagagaaaataaaagtcttcggtgatatgaaatttttaaaacgcgttgaacaaatgaagaaaacttctggaaaaaaatcatgtgttcaagaagaaacgacctttaaaagtagttgaaggcgcgtcgaagaagttggtcctacgtgtaccattcgacatgtgagcgactttggtcggtgtagctcgtttatttatttaaaattttacataagatacacaaacatatttcataaatattcaccgtcaatgttactcttaaatgatgataattcgtaaccgtcgttctgttataacattaaattcttatcattatttctataatgattaagtaacggcaataaagcaaaaaaaactctcagaaataaacttgaaatttcttagagtgtcatgtgtgaaaatatagtgaaggttcgagacttatttaaatggaaagacatgattcgtgtcttcttgagtgcttgtagcaccgatgcgttttcgtctttttatggagtcacgcctgttttaatattttcttatacataataatgcgtttatctatacttgaatccgggatcgaacatggattttagcgtatgattattgttgtcacaagaaaatatgatatgtacgtgacgaaagcatagctttaggtttaaattattgtataagtggatgtacaattagaagaattaatacggatacttcatagttttttttttttctaataagtactcatacttcttattggatccatttgtttggaaggtaatcaactatattttccttcgatgtcaaactcacttttaactttaatatatggtttcttataggataaaaatatccgcaatcgtcgcagtaagtggtgaaaccacgaaagtgggaacgcacttagttgtatggatctttttatttatagtgtcagatctgagccgtcgatataggtcgagttagattcttttaaaaaatcttgaggatattagagaacagatagagaggattaggatttggtcaaagacagaacatgtagtcactgcatgcaacagttctcacttctcacttgtcagaattacagtaataaaaattaaaataatatgcttccattatctttatataattcccattcacatctgatactaatgagtgagataatttatttaaagtgaaagtcgcaattaagaagagtatgaattaaaaaattagtaattgtcaaagacatttcaaagagaagagtgtggcgtgggactattatttggcttgtaagttcagacatttgaaccggccaatttcttataattcacttttcttaatatttgactcacacatttataagatagtgacatcttctaatcacttttatcaatataatacgtttatatcgttcttacattacagctgtagccaatatttttaggatatgtagaagatgaatttttatgatttaaataaaccttacaattcgatgattacagcgacaactaactgcctgatcacgatcatataccaaaattaggagtatagttgttgtgtttttattcaaaaaatttgagttaaattgttcaaaaaaaaaaaaaaaataggtgcaacaactacctttaattgtcaatttatagattttctctagttttcaattttgtaaatagtttcattatgagaagttattacttattcttaagatttcccaatcttgtagggaagctccagataattaacgagattctcttattcacgtttgattgatgatcaacatattagtaaagtatgatgtgattttttctcgactattcatttatagaaaaagatcgtgagctattaaaaaaacatcaaagaaatcatgagttagtgaattttcagctattttaattaaaattaaagaaaatgtattcttcgatttctactttctagttttctagttatgtttaagaaaatcagtttaataataaagtcatttaatcatgcaacttttcaccttttcctaattaaattacaatatgtttattaaataataatggaagagatataaatagtgttatgcatagaaggaacatcatcacaaggtcatgcatgatgcatcacatgggatgttgaacgacttcatgctcctctccgcatataccaaaatttatgagtctatctcattttctcatgaataactagaatgttgtaagtttgactccaaaaaaacagaaaactagaatgtttgtatatacaagcaaaagtttaaatccattataggaaacaaaatacaagtctacacacggattatacaaattctcctgaatcctgatcaacttaaccatgaaacttgaaacaatcagaattaagagaatcggcctccaaagaaagctaattatccgattgataatatatgcgacgaatgttcatcacaagaaagagtctaattcaaaaaccggcttttgacatatcgcataataatagtgcatgacagtcttaacaaaaaaactcaacgctataaataattaataaacgttgacaaaacataaaataattccaaaccgagtgcgtatctaaaaaacgataaacgtggtcgtacgtttaagactaagtaatttcaccaattaaattcccggaaaaaaaaaaacacaaaatttatcaaagaaaattaaatacaaatcaaccttaattaatgtcaagctttaaccctaagtggagatttgagtgccccacacttctcctcggatatgtgtttccgattcacatggcactcacaagacacaatcaatgtttttaggttctttgtctaccaaaacaccaagaacaaaatggttgtactccaataattttgctgtattggttaagatatttattttcgtttggtatatagaacaatcaactaaaacattttttgaaatactttgccaataatttcaaatatcaaaagttaattcgttaaggcccggtaaggttttgtgtaacttacacatgtaaaataatgggcctcttcaaatctcaattacctacgcaacgacatcgtctagctcagttggtagagcgcaaggctcttaactttgtggacttgtggtcattggttcgagttacatggtgggcgttttcttttatacacaataatacaaagtttggatcctcaattcatagttacagttacatcaagaagataaatactctcacaaggtaaatttgactacatctctagctagaagatacctcagtgagtactttctatgagtggctatcttgtcctgaaccttgtgaagtttgttcgtcctctgtgttacatgtcagaatctgtgctttcccagcttctttctcccaatctatcctcgcaataaagatgagcaatatcgagagacagagagatataccaacaaataacccgatcaagaacccttgaagcccttgtttagccttgaacgccaaagttgcccctaaaggcaaagccaatagatagaatccactaagatttgcatacattccaagagacggtttcgctgttccgcggactatctctccacaaaccattaatgggaagtttacaacttcgataaccgccattatcagcatcatcttcttcacaccgtttaagatgagttggtcatggtgagtatacaaagacccccaaaaacctctaaatgctatcatcactaatgctccaatgcagcctgaaataatacccacaatgagtgtagtgtaagctgctctataagctcccttaggattatttgcgccgagctcattggacactcttgttgccacacacgtgcctaaagagagcatcaccgcgtaaagcaagtagtcgaagttgaaaactataatcaagattgatacagcttgcaccgggtttggtaacctcccggttaaaaggaccaagatctcgtagcaccaccattcaaggcacacggtgagacaacatggtccactaagcttgatcagtgtgagccagtcttgagcactttggtttaaccagccaccttgtttccatttgttctctttcattcgctctacgactatcacatatccagttagaagaatcacaacaataaaatcagttatccaaaccgccattgcaactccttcaattcctcttgctttagagaggactatgttgatggggatatgaagagaagtggctgcagctgttgtgaacatgatgggaagagtaacaccttgtgagcttaaataagccttaagtggacaaagaaaagagaggattggcaactctggaagaaggtagagaagatatttcttggctatgaaggaaatatcttctctttgaccaaaaccagtaaggatcttgtgaacattgagccacaagaaagaaattggtaccgaaatcaagagtagcaagagcactgccataaaaagggttttatgaagaagcttaaagttcttggctccgaaagcttggccacaaataggctccattgcagcagaaataccatacaaaacagaaaagccagtaacgtttgcaaaggaaaaccctaatgaacctccggctaggttaagctcaccttgacggccaagaaacacagatgtggtggtcatcttaccgaaccacaacaaattcataaccaccaatggcaaaccaattctcatctgcagcttcagctcatgaacaatgctctgcatcaaggtctttgaacaaagcccttcagagacttctggatctaaagactctgactttgatgtttctgacattattgttagtagaaaatatggataatttggaacagagcaaagaacttttaagaggtttcagccaaatttgcagagatagttgtttgtttgttgataaagatgacaaaaaaaattgtaagtggaaaatggttttgttgtttgcgtggaggattttataagtaggtagattaaaagcatgagttccgtgagagagtgatgagctaaataatataaatgttgaatcaattttctcgaggaagcttttgtaacggccaataaaagcagaggattaacaagttggtgggtttctatacccttaagtgcattagtgatgatgaatccatatcattcccatttcccacttttaatacagtaattttattttatttttgaaaatgtgcaattaacgaatatatatttttacattaatattattttcttatcttttttggctaaaattcttacatatttttttttctgaaactaagctaatattaaattaaaaaaagttgatattacaaaatttaacattggaaaaaaatgcttgtaaaaaactatttaaatataaaatggactttcgttacagagaaccagagtatgcacataagctttcgtgtaaaacatcggatatttggttgaggagcgaaataggggaaagcaaacgataaactttcatgcaagaaaagtttgacatcattcaatataccaaatttgtgtgtggttgccatttttcgataacaagtctaaagggttttcaaacacctcaatgggaccttaatctcttcttctttttttccttttgtctaaaggggaagtgtgttattgcatttaacataaataacttccaccctcatcatatttaggatttcacttaagtaatttttttgtaaacgaagttatatagtctttctgtaagaaaaataaaacaatggtggaaaacaaagcttgcttataatagtaaataggcagttggtaaatcataatataatcagaattttcttctcactagctaatactgacagaaatagaatataataaaattagaattaagtatcctaaaaaactaagagatagttgaacacacaaatagcatagacaaaagaaaaaatgtgtttgaaaaagatacgtgaccttggctttctatttttctttccaaaaagcaacaaataattgcataatgcatcattttctaatgaaaatattatgaatataaaataccaactttttataggatgattggagatatttcaacttttatttttgttgcttcttaaaaaggaagaggaccccagaacaaaaataaaaggcacgattggtaaattttcatgagatgataaagatttggggattttcactattccggaattagggataaaaagtggtagttggacagaaccttaagaagaaaaaagcagataacaaaatttaggtttgtccactttgagaattggaatcgataatccaataaaatatgagataagaaaaaattcggataatgggtcggtccgaacatctaattcactatctaacttctcatcaattcgacttagtatcacctacaagattgaagattcgaataagttggataattaaatattactcaaatgaataatttggtactccatcctatacccgaaccatattcgacccatacggctaattttaccttgtaaagtgctacttccctttttatgcgaatcactttagctataattttttatttaacagaaatgatcatattcttgaaatagttaatgagactacattaaagaatgaaaagaatgtgaaatggaatatggtattaggaatttagcattcaacatatattcttacgtcgaatcattttgttctttacatataatcagttgcaactttactgaaacatttattcagaaggatgataagaaataagtatgatttcggatcggaaaagtttattattcgtttatactttatatatagcccataccgtaagtctttaactagttaattcaatattttgagaaacttattcgggtccaaatacatggcccatttctatcccggtccattacagattaagaaacaaaacatgtaaattactaactaactagtagtattgatttactactacactagataaagcccgcctatttaggcgggtgtactcgaaatttgtaaatactcgaacgggtctaaacttcaaaacccgaacccgaataggtatccaaacatatctcaaatataagtatatattagttatatttatacttatatatagaaaatattagaatttttttggatattttagttatttttgtgtatttttagatatattcaagcaaaactactcgtgttgttttgaatttttttgaaattttcaagtaatttaatagatttgcacacaaaatttgatatttcaatatataaataaactcgaacccgaacccgaacccaaaccgaacccgacccaaaatcttaaattacccgaacgggttctaaacttctaaacctgaaaacccgaacccgaaatacccgacccgaatacccaaacgcctagagctaataattaatataaaaaaagaaatccacaaaaatatttagaaaccaaacattgttgaaaatatattttctacatataccgtaaatgagttaattttacatcatgcaaattaatattaaatgagttaaaattaacaaataaaaataattgaaaagttaaatcctataagctaagctatttttctcaaaatgttctatttttcacttatgattacatgagttaaagacaaatttgttaattttccttttgttgaataaatgttaattgtttataaatatatagacatataaattactatatgtaaatttgtttactttttaagattctctatttttttagagaataaaaaagttaaattttgaatgacacatgtaaacatctgatcgtttgacctgacacgtggcacaatcttatgagttagcaactttaaaaaccatactttatataataaaattattgatttacatgttttgttgcctaatttctctaatggacgttaaacttccaaaaaaacaaaaatccttctccaataaaatctaaaaagcttctaaacaattatataaccttgaccagaaaaaaattagataatccatgtcaatgtttttctttgtcaatgcctatcatctgaaaattataaacacgagaaagttaaagtatgactaaaacatttattaatgcaaacttttttctgcagcaagtaatgtaaactgttgtttgcgataaattttacaaaagcgggaggtttgcacctttctacgatattggcaatatataaccaaatctaacgtcacaatccagagtaatccacaaaaacttctgtgaaaaaatagctattcttctcgatttatatttggtaaaaattcttctcgatatttattgctaaatgatcattaaactaatgatgaactcttcaataattaggtcatcatgaaatacacgtttttgctacaatatttgttagtcatttctgctgagagaacgacacttttttttttttttttttccaaactttaaaggaatcttttgttgaaataccctaatattaggtttaatttttttccagccatagcgagcgaatcttatattccatatatcttcggacaactgccatatctggctgggaaagcaaaacctgattagaaaaactcatgagttcgtatattttagtttatcttgtggtttaagtattatagtaattattcttaagaagagataattaactaaaaaattgctgtttggcagaactaagacaagtgctgttcggaaacatactggtgagccaatagacaaaagagagattagcgttcagtatattttttaattgaaatttgacccttgacgagctcctgaaaagttggacgattaacttataattattgcatataccaataagtttttattgttttaatttcagaagcccattattgtttatcatgcaagattccatttcagacaatgttcaacatttagttatataatgagtgtttttttgttttatatcataaaagcaagattaaaatccaagctgaaccaaaaagggaaaactatttagagattaatgatattagaaactgaacccaaacgaaaatacactacagaaactatagtttagattcagtttcacttcgatcactgtaattccaaaaccaaaaagtcaaaaactgatccaaacaaaaatctatatgaaacatgtctagaaatactttcctcaacacaaacatttttgtatatatacaacataacagtcttaaacttatcacctcaaaacaaacagattctttaaaacagtataagtagtctcccttttgtggataaatatatttgatcactttttttagaatacaattactttaatacattcaaaattgcccatgtttggagtcatatccaaccatatctaagatcacagtgacagatttttctttgttagtggtgaaaccatgtttctaaactgagtgtgattatatcaatgtgtaataatgacaatgagattcataatcaaaagaacccttaaatcatgtgaggtttctttaagctttagtttgtcgttagcttaatttgtctccaattatgccgtcttaatggcctttaaagcacccacttaaatcatttaattaacccacatgcctctccctccaagtttgacattagtcttcaactctctttctatctcgatacacagtttttttttttttttaaatgaaaagaaccatattcctacttttgacaatacaaggtagctgatatatttacaccgcttatagattagattaagttagaaattatttaacattcacttgatatagagttaagaaattcatctcaacatttatatacataattatttattacatatggtggggaggggaccattaattgggttcgtgagaaaagcagaagcacgacaaggtttgacgcaaattaggtgtcttccacgtgggtcttacatttagattttgttaattagcttaatttaccaactttaacttaatttgtaattactacaacaaaatcatattgaaagaaaaatagtgttttttttccaaaattttcgaaacatatcataaacttttgttatagatatgaattccataagatttggttgctagtttggtacactaattgaaacaatttctttataccataactttcatttagtatttcatagaataaacgtttatggtaccttttttttatcggtggttttcaaaaccaagaaataaaaagtggttaaatgttaaatgcgaataattttagcaaaacaaactacagtactaccaaatcatctatatagaagtatgacatcaaaatgtgtttaacaatatccatgcctcgattacttacattataaagtaatgaaagccaaaataattaaatccgccaatcaactaattatccgtagaattcgggattgaaagcaagctgtccttttctctttttaagagctcgtgaactcacatacttttgttcgataagtttcatgcctttcgtatttaagataaaataattcgggtgacctcatttcccaataattttattgattttggtaatgggatcaagaatcattaactaaccaactaattattggaaaatgcaaagcaataatctataaacacttctttgaaaaaaagaaaatattatagtaggttgaaaatgaataatcaagcacaaaattgcatagcaattattgtaagactattaaagttagaaagaagcatcattatcttcaattgaacgtacatatgtattcttttttttttttttggtacatgtaacacgttcacattctttttaagcataatctgcaataggacgtacataaggtttcatgttttccgttttaaatgaatcaaatgtaagtcaacgatgaggaataccttttcgtgtgtgtgacgtcaacagtttagaagaacaatatattggcgcaaacgcttattaatgtcaacattggttactgcagcattagtatttagtagcacactctaacattacaaatataatttgaaattcgtttaattaagaaaaacaaaacatcagatgaaaaaaagaacatacatacatgtatacaactagaatcaaacatgaacctagaataactttacacccttattagccctagatctatcaccaccatgccactatacgtagattcgatataacctcttgcttaattttattggttggaatagatcggaaaaatttatcgatgtaagaagaaaaaaggagtgggaggagaagggcacgtggagagagggggtgaagatcatgagagagccgacaaagagcatctctttaactcatcggagtttgtgtttatctctcccaacagttcatgcgatgcctctgcctctcttatcttcttgttcatttcttttaccctctctttctctctcactcgtggttttggaattgtcagcgacatcttcgcgctttcttgttaacagtactctctccaatgcctagtctctccctatatacacatatgtgtgtatgaacatactattttacaaagaaacacctttagatctagatgattttgacaaatggatcgtttgactatcaactaattaagtaaaggctacattaatataaatatagaccaaccagtgtctattcaacgcacaacactatatcttactataaccgtgatgacaagtacaaaataacattaatgatgtggttgttttattcaaagatttaaagcaataaaataaaattcatcatcaacaatacaaagccatcgtatgtaaaagatttattctacatataaccataggtgattgatatttcttgtacttatcattggatgagttgtaggtttgttatgttggtatatatactaatcagatcttcgtaataattctatagctaatactacgtacatgcaatcattttttcttttgtcaaacatggaataatttattatttaatagaaaaatgtatcttatagatgaaatattgatatcaactttgcgtctttttctgatgattaaaaagtttgaatccatgtaaccatttccatataacacctgtaatgactcatgtattaatagccgatgagactcgaattcatatgtgttgaagaattacaattactagctactagtttttctgttgatctaatgattcattatataactcgagggctcacaaggttatttacaagggaaattcaagttccaacacaatacatgtttggtttcttttgtcttatcaaattttgatggttggatagtgacttactaacgtgtgacgaaattataaggtttaagggcgaagagtaagagggggaccagaaacaccgcccatacataggaggaaagtcacagtcaaaaattcataagcacaataacaaataatcccataacttggcttcttatcttgtccctttctttacttaaccctagtttaccaatcacaaaccaaagttagacccacatacacatctcaatattagtttaaataaaaccccaccaaaacctcctttttcactttccaaatttcacttcctccaactcaaagaaagagatcagaagctatagctatacaccaaaactaggtatagagagagaaaccctacaaaatcaaaaggaagaagagacgaagatgaagaagatccagcttggatttcgttgttcatcattactactctctttcttcttctagctagctagttttgacagcaaaataagaagcaaaaaaaaggtcaactaaaaaagatctgttcttagatcactctcttcttctttttttgatccaattccaccattgaatcatagatcatggatccagtacaatctcatggatcacaaagctctctacctcctcctttccacgcaagagactttcaattacatcttcaacaacagcaacaagagttcttcctccaccatcaccagcaacaaagaaaccaaaccgatggtgaccaacaaggaggatcaggaggaaaccgacaaatcaagatggatcgtgaagagacaagcgacaacatagacaacatagctaacaacagcggtagtgaaggtaaagacatagatatacacggtggttcaggagaaggaggtggtggctccggaggagatcatcagatgacaagaagaccaagaggaagaccagcgggatccaagaacaaaccaaaaccaccgattatcatcacacgggacagcgcaaacgcgcttagaacccacgtgatggagatcggagatggctgcgacttagtcgaaagcgttgccacttttgcacgaagacgccaacgcggcgtttgcgttatgagcggtactggaaatgttactaacgtcactatacgtcagcctggatctcatccttctcctggctcggtagttagtcttcacggaaggttcgagattctatctctctcaggatcttttctccctcctccggctcctcctacagccaccggattgagtgtttacctcgctggaggacaaggacaggtggttggaggaagcgtagttggtccgttgttatgtgctggtcctgtcgttgtcatggctgcgtcttttagcaatgcggcgtacgaaaggttgcctttagaggaagatgagatgcagacgccggttcatggcggaggaggaggaggatcattggagtcgccgccaatgatgggacaacaactgcaacatcagcaacaagctatgtcaggtcatcaagggttaccacctaatcttcttggttcggttcagttgcagcagcaacatgatcagtcttattggtcaacgggacgaccaccgtattgatcaaatatacacacacactcataatcgttgctagctagctaacgatgaatcatgagtttagtggatatatatatgattaaaagaggttagcttatgaacattaataagagtttggattctatcgagcttcattatgtttgggtcaacgttcataagatgaaccaggttcttttttctcaaatttttattttggttcgtttttagctcgtagatctttttatgttgattttagtaacatttttctgtttgtcttggtttttctttgatgaattctcattgctagtttgcatttgatttttgtgtgtggttggctctaagtatggtttttcttatcaacatttcaaggtgtttttttcgacaattcatatatgtcgtagcacactaaatatgaaactacttggatatacaacaactaatttatgtgacatgcttaagtcatttttcccactttgaggtttcgacaagactttcacatatattactagtcataaagtttaagtagattcagaattttctacccataagtatctttacactatagttatatatgactatatcgcacattactttagataacttctgatgatgattaattactgttatctatatcaactttcatcatatgttatgtatgtacttctattgaagtgactaaaaagttactttccaaaattagaaaggaacttgtgttggtagctacattaacggggaacatgaaaacattattttttcttataagtaaaatcattttatctcgtccttaatacagagacccaaagttcaatcaataggtcaatgtggataatgattaccctaataattggctattacatgataataatagaacatgtcgtttgctcggagtgtatatagtatatacatatggctgatggtgatttaaaatcgcacatatgtaaataaagacgatatacatcaaacagtaatcggaaattatatacgtaacgctcttcacatatttattttaattgtgtgagtaagcataaaagaaaagctgcaatatcggcggcttaaacgggagaggctaacaatttacgagaaaataaataaagaaagaggtatgggggctttatgtgcatgttttctttacatacgcaagtcttgtgtgtgtatgtcttcataaatgttcaaattcgtatggatatgtggataaggagacaatacacttgttcaactgctgccttacacgtgagcttgctcgtgagtaccatgttcttttcgtgactacgcgcgacttatacaatctcatttggaaaatgtaaaaatcaccaatagtatataaaagacatgatcactcattcattatcgatttatgttttgaatgaaaactaataacttttttttttgtatggcatcagagttcaataaggttaatccaaaaaagatgagattcaaatcatttaatcgatcaatgataatcaatagagtgattacctcgaattcatttgttaggatctcacagagtttcaagagagacaaacatcattccatcaatgttaattgttttgacttttgaattaaattcatgaattttcaaggtgttgccaacatttttataaatgtataaagttaatatattatcctttgtaatttgtatactacttcagcatctagcaaatactgtatagtattatttaatagaatcgagttttatatatcctcaatcttacatgtgggctttacatgtacagaccaaattccaggcccaaaaatatatttatatatttaggccgatatggggcccaatatgctatcatgttgatcaaataagataaaactctaatatatatgccaagttcaaatttatatattcatgtaacattggtatgttataccaagacataaattagttagctcacttaggaaacatgactttttttcgaagataaaaggccgagtgttatcgttggttcatgtatatctttattgttatgaatgtctgtataattttgaagtgttataaaatttcacaatgctcccatcttcaaaatagggaggacgatgagtatctctctcattttaaactcccagtggtaggttttgcgtgtatattacgcggatttgttactgagagtttaaaatgggaaagacacttagggggaaagcgaactgaatagtgggtcgatggttgccttgccatggttaacacttaacactatcccttctttcgtcaaaggtctattggtaagattacttattttgtttatgatgtctatattgaaattgtaaacatgaccaaattttttttgtaaaagtgagatgagtcaaactcattggcaatttagtttaagaacaaacttcatcgattcactttattacggaaccaaattcatcatcctctatccctttggaaacaatccattaaaaccatccaagacaacccccaaatcggttcaaatacaaatgagtaattaccaccaaaatacttagaaaaaacttccatatttcagaacctttgaattttatcagccttaaccacaggattagctttggcaatctctccacgtccaacttctttgaaatcaaagctgcaatcatgagtctccgggtaccgatgttcgccgcagaaagtgctcccgcatttgcacttaaaccccatgatcccaaccttcttgttacaacacaaacaccggttggttcgtgcaggtctcgatggctcgttcgcctcaggaaccgccgaggaagatggctcggccgagacaacaacaactgccgccttttcgggtttgggttccacaacaacagcaggaggttctgctatgaagagactacgaggaggagaaggcttgaaagatttttcaacagcagctttagcaactgctgtttgagcttcctcagcacaaatgcctctgtaacatttagaacagagatccatgtttgatggtgatccaaagaaaccacatcctttaacacatagctttggctctgaagcttgcgattgcgtgaagcttgtgctatcgttttgttccgatcccattcttactctcttgcttttcttctgttacaccacataaattcaaattaaaattttaccactgcgattattgacaatatacacgacaagaagacaatagatgagattagtcagaccaaagattcctcaatgtcagaggatcttttaaggttgtcgggtttttgaggattagatccataacaaaagtacaactatattattgacacagatcgattttgttttagctacgataacaacaatttcgtcatcaaattatgcaattaaaaaagtagatctgagtttccgaaacacaaatactaagataacacaagaatctaattcagatcggacaagacacagaatcaactaaatcaatcaatcaatcaaaaatacacaagacaaaggagattgggaatttttacctgtagaaaacggagatctctttcttctggcgattttaaagagaattaacaaacaacgattcacagtttgtgtttgtttctgatcttcggaagtaatcttcgttagatgatttgttcttaaatcgataagaattgagaacgacaagtctttttcgttaatcgagaacaacaagagaaaaattagagaaaaacagaaacacgtaactatggaggaacatacatgtgtatatatttatatggtatgagtcacgctacggttttcactttttttaagttgtgttcttctacacctccttattgtacactttcgtaatcttaaccgtgcgattcttttggctgacctaatctgacggttataatttatcatcgagcagctaaacggaataataatggcactgttttgtaaaatttccaaagttatgaagtcagaactgtactttcgtagctgacgtgtatatttcctttatttttgaattctgactttccatttttttattaattgacattttttatccagtttgatccaaaaaaaaatgatgtaggtttttttttcccataataggagtacaaactaataggtaaaattaacaaatttaaatgtataaatggcctttggggttgtttaagtaatgattaagatggtattattggtggacttttggggaagataaagataagatatgccttcttcatcacgccctggcttggtctaaacacgattaacgcgttgtcaagatttaagtggaacttggtatcttattttaataattcgaaaattttattattttaaacttatgtacttacgttcattttttttcttcttattaagatcctaaccagaaatagctcaaccaccccacatttttgcttatagtttttaacttcaagagattcggatttaaaaaaaaaaaaaattgtcgtactgtcccacgtaaagattcaattttgtgtgtgacagatgtaagttatacacaatgattttcttcaactaactagattgagtttgttggcatgttttactatatatggtctcgatttaagatgatataacaaaacaagataattagttcagataatgttaaacgttcaatatctgcattttgagttaagataatctcaatatctgcattttgatgtctacttttatttataattttagccaaacttgccacactgggaaaaacgttatcagttttggcactttctttcttctgttttcttgatctcatttatacaaaaatggagaagttcttatgatcacgtaaccaaaatttataatttaattcaaactctagattctggataagactaaatctgtgtaacttgggttactgatataggttgaatgcacatggatcttcctcatataaagactatataatatacttaaatcgttgacatagaatctcatagaacttttcaaaggggaaaagaatcttagtgatcctccaattaataattcaattatactttgctcatattgatcggtttagccatcatggcttttcagagacttcaattttggatgacaacttgttgatccgaaaggcagcaatgcagagagtgatattaccaaacaccgttagtgctgcctgaagagcgaccaacacctgataatgcagtccaacaattacaccattaagtaggagtgaagaagcaaacgaaacatatcacagacttatagctaaaagttggagtcaagagtttcttgacctcaagagattcatcgttgtagaagaaatgccatgtgcatgcacagagagctccaccaagcaaaggtacctgattaagaacaaccaaaaagctcagaaaaatgaaatcatgtaatctaggaaaacggcttagagctttctcaccattccccatgagagacctttccaagactcataaccctttctttctccatacttccataccaatgccatcgccgtaatcctttagtaaaaacaacaccagaattagaaagacattacatttttcttgtttgttagctccaactgcatttcaaaccataatgagagaagcttaatctacattgtgagtgaaagatcgagactttatatgtagatgaagcttctctcataatgatatcaaaaactcgaaaaacccacaacatcaaatactctcttgtgtcactatagatcaaatgtcaaatgttttctaagtgagaatttcaatcaataaagcaaaggaagaagaagagaaccattcgacaacgctggaaacatgaacggcccaagtgggtaaagacaacgcattggacggttcgcttagctgaagagaatccaccaccgccgccaaagcagtagcatctggtcccgccgtgatgaaagcagccgcaaccaaactggttccgataagacccgacagcgcaaccgggtcatgaattaaactgcggcttcggatccgaattacaggttcgttagaggtggtgagagaagaagctggacggctctcagaatgaattcgccggaaattgggtttggcgcagcagaaaagaacggtggctgttgaagcaatcgccatggctgagatttttctccaatttccaattcccaagttctggtttaattttaaaccggtttgctgttgaaccgtcttttatcattttcacaaacaaaattaaactaatcggtttattaacaaattctggtttttctaattacttcccatctttgaagttgaagagaaaaatataaagacaaaatggagattagtacattaaaaatctcaaattctgtattgaattatttatattacaagaagaattttccaattatttgtagtacatatatatatgtataatcaaaatgtggagtgaaacaaaatcaaaatgttaaaatgtgttactcttttccttagaccagatcaaaacgagagtgaaccccatcaatgacattaccaccgtctgcaaaacaaaacaaaaatctctataatcatcatcaataaaagattatgctatgtcaaaaggatatgagacttacagatatagcaggaggaatccccacaagaggatcttgaaagaacttagtagcaagcgctagagccaaaaggctactctgcattcctgatatattcacaaacacatttctcttctcaaatctttaaaccaaattgtactttcttgataagattttccaataccataaagagttagtaccagtttcataggacaatgttctttgcatggctttagcgtctggagcgtttctaaagacagaaccggtaaggaagtatccagcgaggaaagctgagagatgaaacattgttactagtaacaatatggtggctccaaatggagacatgaccgagtttatgttcaatgcgagtggtgctccaacgcagcaagctgtgtcgagaaccgatagaatcgggagaaatggtcggattgcatttgatacttttgggaacaacctgtaaaagaagaaacaaaaaggagataaaaatggttatacttagagaaacaacttgtggttatttctagttgtaggcttgtagctatatctctcacttgtttagtagcaatcctgcagcgattggtgcgattacaacctgaagaatgctggatatcattccttttacatcaacgggtagtttcttcccaatgagcaggagtgatagcatcggtgtgacaagaaccgcagtagcggttgatagagatgtcatgacgatgctaagaggtgccaatgctggatcagttaggaatgtcgcatagtttgacaactgagctccactaacacatgataccaacatgattccagcacctgagagattgagaaagattggttaatgtgagagataggttaagagtcttgaatgatgagagacagggagcttttaccaattggagttgggagttggaaaagagaaacagcagctaggccaaagatgaaacctaggacaggctttacgagatattgtccaacataaccgaggaggatagcttttggtcttttgaaagcttcaagaaagtctttctcgtttgaattgataccaaccgcaaacatcaaaaaacctaaagcgggcacaaagtacctaaaataacaggagagtaaagaagagctttttagcaaacctcatgtctacaattcaaagtcttagatcaatttgaccttgttccaatgggaagaacctcgacgtaaaccaagtgaaagaaggaggatagataagagctaatattgtactcgccaacactacatgaggaagaattgagtttgctttcttcattctatccactatagaaggcttctcaataacctgcaagccacttactagattcatgttggttctcggaagtaacataaaattcttaacaactgaaatcatcagcaaacgaagaacaaagtagcaaaactgtgatccagggatgatttttagctaatcagattcaaaagtaggataattaacaagtcttcaatagtgcaaaatcacattttgacattaaagatgacacattttgagaagactattcaaacccaacataacatagaatggaaaaggaaagatcccatagcgcacaccttgaatggatcagctccaggatccaaacccatctccgagaaattatcagatgcatatctacgccacaaattcctcgatccgccaactgtgtatatagtaggttgaagaaaaccatgagagaagaaagtgtaaattttgcaggtacccaacaagcataaacgcctgaggatcgatgagagtaagatgaacaaaccttgagagattgggtcgatgcgaagtggagaactcagagaagtgttcgagaagatgttgggcgggaaaacttgaatccgttgactgcgataaacagctcgtggtagaagacgaagtgttgactttaggtgcagggtctctattggagttgtgatcacgctcattttttttctttggactttgtgatctttcagattcttcagaagaagtggcgaaactctgagagttctgggaaatggaagaaagagggagagattcagagaatctgggacccgagaatctgtcgcatcatcaacctaacaaaacccgacccgacccagttagagtttaagtttctggaaatggcccactgggctttaagataatgtatatttcaaattatgattttcttattttaaaactgatatttggaatataatgtgttgtgtagtgagaaagacgcaattaatatacttaagttagggtaataaaaaaatcggtacaagactacaaagcaaagacacaaatcaaggagaaaacttccacaaattgtctctctttctttcctacacaccaatttgttttgtgattctttcgattgcattcttctttttcgaattcccgatcactggattttcccgtttaaccggaaaatccagtggattagattttacccagtgttatctttttggattggattcgatgactgttacggaggacgaaaaaccggttcttgagctgctggtgagagttgaagacgacgatgagaaagggccttatgtgaaattgagtgaggttttagagaaaggtcaagaatcagagcaggagaaggaagaagaaaagactgattcgtcgcggttttggttttgggtcaagctttctcttttattcgcctttcttgctgcattggctgttgtgggttacatttggatcggtccattgatcatggataaggtttgattttaacttccatcatcagattcagttttagctttatttgctcttgcatgtgtctcaaaaagtttaattctttgtctgattgaattctttaactcatgattattcactcttgtggaagattctaagtagtcttgaggaatgaggctgatctagttgcgtatagtctgcatgcttgtagtctgactagatttgatgttgatgcttaatgtatctattagtattcatgtatgatcaaagagttcttgcatttgagcttgttgtatgtgtaatgtcttttacaatcttcactaacaaggggaattatctacttgcctggttctgcaggagcttataccgcttatacaatgggagatacgaacttttacacatcctgtgtgtggtcttcttgtttttgcatcagtggcgatatttccaactatacttcttccatctacaccatcaatgtggattgctgggatgacttttggttatggctatggctttctacttattatctcagctgcagctgttggtgtttcgctaccttactttattggacaactcttctgccacaaaattcaagtatgtgttagctccctaaagctgcttccttttcgcttgaatttgtcagagtatccaagttttaatcatgattgaaagttctgaggtaggtttagaaaatacgaagctgctcaatacatgactctaaagcttggttatcttggtttgaactaggattaacattgttttggtttcctcaaatgatgttataatgtagttgcatttgtgaatgtaactgtgtgaaatgtcattttactgaattgtgtttgtctcttttttcttgttattctatagggatggctagaaagatatcctgatcaagcagccgtattaagagctgctggtgaagggaattggcttcaccaatttctattagtaaccttaatccggatttctccattcccttacattctttataactactgttctgtagcaactcgtgttaagtatggtccttacatcacgggctctctcttaggcatggtgcctgaggtttttgtcgcaatctacacgtaagtcagctttctatctcttcttttcaattccaaaacattttgttaggtccaatactgtttacatcaatgctcattgcacctactcagcagaaaacatcccataataagaatacttagtaaatcctcacattacactattccactactgtagaacagttttagcttgtgtctagcttttattttagcttctagaagcctaagtaaaaagcccttttcacggatgagtcaaatgtctcgtttctgtgttgcagagggatacttgtaaggacattagcagaagcatcttctgcagaagaacagggtctctcggtaacacaggtgattctcaacattctcggctttttagcaacagtggctacaacgattctcatcacaaagtatgcgaaaagacagctggagacgatgaagaaagaggacgaagcattgttgcagtaaaactgtaaaaccacgtgacaaactctgagctgcttttgtctctctgctactttatctgaaacaccccttgtcttcttacacagtacaggtctcaggtctgttcctagatgtgaaagagctctggtttttttgtccttgcttcttttaatctcatttattaacagccttaaaatttgagaagagaaaaatggttaacaaggaaaaatctaacacattactttttttttgtaattattgtagtcaagttttatgtttggcatgaatgagagaactgagaagaatattcgtatatctttgtgtttttactctgtggtgatactaatgtttactttttcgtgtctgtccaatcaaaacaatgttatttaaagctt

SEQ ID NO: 614 - DNA, 139316 bp, Arabidopsis thaliana
ttcaaggtgttgccaacatttttataaatgtataaagttaatatattatcctttgtaatttgtatactacttcagcatctagcaaatactgtatagtattatttaatagaatcgagttttatatatcctcaatcttacatgtgggctttacatgtacagaccaaattccaggcccaaaaatatatttatatatttaggccgatatggggcccaatatgctatcatgttgatcaaataagataaaactctaatatatatgccaagttcaaatttatatattcatgtaacattggtatgttataccaagacataaattagttagctcacttaggaaacatgactttttttcgaagataaaaggccgagtgttatcgttggttcatgtatatctttattgttatgaatgtctgtataattttgaagtgttataaaatttcacaatgctcccatcttcaaaatagggaggacgatgagtatctctctcattttaaactcccagtggtaggttttgcgtgtatattacgcggatttgttactgagagtttaaaatgggaaagacacttagggggaaagcgaactgaatagtgggtcgatggttgccttgccatggttaacacttaacactatcccttctttcgtcaaaggtctattggtaagattacttattttgtttatgatgtctatattgaaattgtaaacatgaccaaattttttttgtaaaagtgagatgagtcaaactcattggcaatttagtttaagaacaaacttcatcgattcactttattacggaaccaaattcatcatcctctatccctttggaaacaatccattaaaaccatccaagacaacccccaaatcggttcaaatacaaatgagtaattaccaccaaaatacttagaaaaaacttccatatttcagaacctttgaattttatcagccttaaccacaggattagctttggcaatctctccacgtccaacttctttgaaatcaaagctgcaatcatgagtctccgggtaccgatgttcgccgcagaaagtgctcccgcatttgcacttaaaccccatgatcccaaccttcttgttacaacacaaacaccggttggttcgtgcaggtctcgatggctcgttcgcctcaggaaccgccgaggaagatggctcggccgagacaacaacaactgccgccttttcgggtttgggttccacaacaacagcaggaggttctgctatgaagagactacgaggaggagaaggcttgaaagatttttcaacagcagctttagcaactgctgtttgagcttcctcagcacaaatgcctctgtaacatttagaacagagatccatgtttgatggtgatccaaagaaaccacatcctttaacacatagctttggctctgaagcttgcgattgcgtgaagcttgtgctatcgttttgttccgatcccattcttactctcttgcttttcttctgttacaccacataaattcaaattaaaattttaccactgcgattattgacaatatacacgacaagaagacaatagatgagattagtcagaccaaagattcctcaatgtcagaggatcttttaaggttgtcgggtttttgaggattagatccataacaaaagtacaactatattattgacacagatcgattttgttttagctacgataacaacaatttcgtcatcaaattatgcaattaaaaaagtagatctgagtttccgaaacacaaatactaagataacacaagaatctaattcagatcggacaagacacagaatcaactaaatcaatcaatcaatcaaaaatacacaagacaaaggagattgggaatttttacctgtagaaaacggagatctctttcttctggcgattttaaagagaattaacaaacaacgattcacagtttgtgtttgtttctgatcttcggaagtaatcttcgttagatgatttgttcttaaatcgataagaattgagaacgacaagtctttttcgttaatcgagaacaacaagagaaaaattagagaaaaacagaaacacgtaactatggaggaacatacatgtgtatatatttatatggtatgagtcacgctacggttttcactttttttaagttgtgttcttctacacctccttattgtacactttcgtaatcttaaccgtgcgattcttttggctgacctaatctgacggttataatttatcatcgagcagctaaacggaataataatggcactgttttgtaaaatttccaaagttatgaagtcagaactgtactttcgtagctgacgtgtatatttcctttatttttgaattctgactttccatttttttattaattgacattttttatccagtttgatccaaaaaaaaatgatgtaggtttttttttcccataataggagtacaaactaataggtaaaattaacaaatttaaatgtataaatggcctttggggttgtttaagtaatgattaagatggtattattggtggacttttggggaagataaagataagatatgccttcttcatcacgccctggcttggtctaaacacgattaacgcgttgtcaagatttaagtggaacttggtatcttattttaataattcgaaaattttattattttaaacttatgtacttacgttcattttttttcttcttattaagatcctaaccagaaatagctcaaccaccccacatttttgcttatagtttttaacttcaagagattcggatttaaaaaaaaaaaaaattgtcgtactgtcccacgtaaagattcaattttgtgtgtgacagatgtaagttatacacaatgattttcttcaactaactagattgagtttgttggcatgttttactatatatggtctcgatttaagatgatataacaaaacaagataattagttcagataatgttaaacgttcaatatctgcattttgagttaagataatctcaatatctgcattttgatgtctacttttatttataattttagccaaacttgccacactgggaaaaacgttatcagttttggcactttctttcttctgttttcttgatctcatttatacaaaaatggagaagttcttatgatcacgtaaccaaaatttataatttaattcaaactctagattctggataagactaaatctgtgtaacttgggttactgatataggttgaatgcacatggatcttcctcatataaagactatataatatacttaaatcgttgacatagaatctcatagaacttttcaaaggggaaaagaatcttagtgatcctccaattaataattcaattatactttgctcatattgatcggtttagccatcatggcttttcagagacttcaattttggatgacaacttgttgatccgaaaggcagcaatgcagagagtgatattaccaaacaccgttagtgctgcctgaagagcgaccaacacctgataatgcagtccaacaattacaccattaagtaggagtgaagaagcaaacgaaacatatcacagacttatagctaaaagttggagtcaagagtttcttgacctcaagagattcatcgttgtagaagaaatgccatgtgcatgcacagagagctccaccaagcaaaggtacctgattaagaacaaccaaaaagctcagaaaaatgaaatcatgtaatctaggaaaacggcttagagctttctcaccattccccatgagagacctttccaagactcataaccctttctttctccatacttccataccaatgccatcgccgtaatcctttagtaaaaacaacaccagaattagaaagacattacatttttcttgtttgttagctccaactgcatttcaaaccataatgagagaagcttaatctacattgtgagtgaaagatcgagactttatatgtagatgaagcttctctcataatgatatcaaaaactcgaaaaacccacaacatcaaatactctcttgtgtcactatagatcaaatgtcaaatgttttctaagtgagaatttcaatcaataaagcaaaggaagaagaagagaaccattcgacaacgctggaaacatgaacggcccaagtgggtaaagacaacgcattggacggttcgcttagctgaagagaatccaccaccgccgccaaagcagtagcatctggtcccgccgtgatgaaagcagccgcaaccaaactggttccgataagacccgacagcgcaaccgggtcatgaattaaactgcggcttcggatccgaattacaggttcgttagaggtggtgagagaagaagctggacggctctcagaatgaattcgccggaaattgggtttggcgcagcagaaaagaacggtggctgttgaagcaatcgccatggctgagatttttctccaatttccaattcccaagttctggtttaattttaaaccggtttgctgttgaaccgtcttttatcattttcacaaacaaaattaaactaatcggtttattaacaaattctggtttttctaattacttcccatctttgaagttgaagagaaaaatataaagacaaaatggagattagtacattaaaaatctcaaattctgtattgaattatttatattacaagaagaattttccaattatttgtagtacatatatatatgtataatcaaaatgtggagtgaaacaaaatcaaaatgttaaaatgtgttactcttttccttagaccagatcaaaacgagagtgaaccccatcaatgacattaccaccgtctgcaaaacaaaacaaaaatctctataatcatcatcaataaaagattatgctatgtcaaaaggatatgagacttacagatatagcaggaggaatccccacaagaggatcttgaaagaacttagtagcaagcgctagagccaaaaggctactctgcattcctgatatattcacaaacacatttctcttctcaaatctttaaaccaaattgtactttcttgataagattttccaataccataaagagttagtaccagtttcataggacaatgttctttgcatggctttagcgtctggagcgtttctaaagacagaaccggtaaggaagtatccagcgaggaaagctgagagatgaaacattgttactagtaacaatatggtggctccaaatggagacatgaccgagtttatgttcaatgcgagtggtgctccaacgcagcaagctgtgtcgagaaccgatagaatcgggagaaatggtcggattgcatttgatacttttgggaacaacctgtaaaagaagaaacaaaaaggagataaaaatggttatacttagagaaacaacttgtggttatttctagttgtaggcttgtagctatatctctcacttgtttagtagcaatcctgcagcgattggtgcgattacaacctgaagaatgctggatatcattccttttacatcaacgggtagtttcttcccaatgagcaggagtgatagcatcggtgtgacaagaaccgcagtagcggttgatagagatgtcatgacgatgctaagaggtgccaatgctggatcagttaggaatgtcgcatagtttgacaactgagctccactaacacatgataccaacatgattccagcacctgagagattgagaaagattggttaatgtgagagataggttaagagtcttgaatgatgagagacagggagcttttaccaattggagttgggagttggaaaagagaaacagcagctaggccaaagatgaaacctaggacaggctttacgagatattgtccaacataaccgaggaggatagcttttggtcttttgaaagcttcaagaaagtctttctcgtttgaattgataccaaccgcaaacatcaaaaaacctaaagcgggcacaaagtacctaaaataacaggagagtaaagaagagctttttagcaaacctcatgtctacaattcaaagtcttagatcaatttgaccttgttccaatgggaagaacctcgacgtaaaccaagtgaaagaaggaggatagataagagctaatattgtactcgccaacactacatgaggaagaattgagtttgctttcttcattctatccactatagaaggcttctcaataacctgcaagccacttactagattcatgttggttctcggaagtaacataaaattcttaacaactgaaatcatcagcaaacgaagaacaaagtagcaaaactgtgatccagggatgatttttagctaatcagattcaaaagtaggataattaacaagtcttcaatagtgcaaaatcacattttgacattaaagatgacacattttgagaagactattcaaacccaacataacatagaatggaaaaggaaagatcccatagcgcacaccttgaatggatcagctccaggatccaaacccatctccgagaaattatcagatgcatatctacgccacaaattcctcgatccgccaactgtgtatatagtaggttgaagaaaaccatgagagaagaaagtgtaaattttgcaggtacccaacaagcataaacgcctgaggatcgatgagagtaagatgaacaaaccttgagagattgggtcgatgcgaagtggagaactcagagaagtgttcgagaagatgttgggcgggaaaacttgaatccgttgactgcgataaacagctcgtggtagaagacgaagtgttgactttaggtgcagggtctctattggagttgtgatcacgctcattttttttctttggactttgtgatctttcagattcttcagaagaagtggcgaaactctgagagttctgggaaatggaagaaagagggagagattcagagaatctgggacccgagaatctgtcgcatcatcaacctaacaaaacccgacccgacccagttagagtttaagtttctggaaatggcccactgggctttaagataatgtatatttcaaattatgattttcttattttaaaactgatatttggaatataatgtgttgtgtagtgagaaagacgcaattaatatacttaagttagggtaataaaaaaatcggtacaagactacaaagcaaagacacaaatcaaggagaaaacttccacaaattgtctctctttctttcctacacaccaatttgttttgtgattctttcgattgcattcttctttttcgaattcccgatcactggattttcccgtttaaccggaaaatccagtggattagattttacccagtgttatctttttggattggattcgatgactgttacggaggacgaaaaaccggttcttgagctgctggtgagagttgaagacgacgatgagaaagggccttatgtgaaattgagtgaggttttagagaaaggtcaagaatcagagcaggagaaggaagaagaaaagactgattcgtcgcggttttggttttgggtcaagctttctcttttattcgcctttcttgctgcattggctgttgtgggttacatttggatcggtccattgatcatggataaggtttgattttaacttccatcatcagattcagttttagctttatttgctcttgcatgtgtctcaaaaagtttaattctttgtctgattgaattctttaactcatgattattcactcttgtggaagattctaagtagtcttgaggaatgaggctgatctagttgcgtatagtctgcatgcttgtagtctgactagatttgatgttgatgcttaatgtatctattagtattcatgtatgatcaaagagttcttgcatttgagcttgttgtatgtgtaatgtcttttacaatcttcactaacaaggggaattatctacttgcctggttctgcaggagcttataccgcttatacaatgggagatacgaacttttacacatcctgtgtgtggtcttcttgtttttgcatcagtggcgatatttccaactatacttcttccatctacaccatcaatgtggattgctgggatgacttttggttatggctatggctttctacttattatctcagctgcagctgttggtgtttcgctaccttactttattggacaactcttctgccacaaaattcaagtatgtgttagctccctaaagctgcttccttttcgcttgaatttgtcagagtatccaagttttaatcatgattgaaagttctgaggtaggtttagaaaatacgaagctgctcaatacatgactctaaagcttggttatcttggtttgaactaggattaacattgttttggtttcctcaaatgatgttataatgtagttgcatttgtgaatgtaactgtgtgaaatgtcattttactgaattgtgtttgtctcttttttcttgttattctatagggatggctagaaagatatcctgatcaagcagccgtattaagagctgctggtgaagggaattggcttcaccaatttctattagtaaccttaatccggatttctccattcccttacattctttataactactgttctgtagcaactcgtgttaagtatggtccttacatcacgggctctctcttaggcatggtgcctgaggtttttgtcgcaatctacacgtaagtcagctttctatctcttcttttcaattccaaaacattttgttaggtccaatactgtttacatcaatgctcattgcacctactcagcagaaaacatcccataataagaatacttagtaaatcctcacattacactattccactactgtagaacagttttagcttgtgtctagcttttattttagcttctagaagcctaagtaaaaagcccttttcacggatgagtcaaatgtctcgtttctgtgttgcagagggatacttgtaaggacattagcagaagcatcttctgcagaagaacagggtctctcggtaacacaggtgattctcaacattctcggctttttagcaacagtggctacaacgattctcatcacaaagtatgcgaaaagacagctggagacgatgaagaaagaggacgaagcattgttgcagtaaaactgtaaaaccacgtgacaaactctgagctgcttttgtctctctgctactttatctgaaacaccccttgtcttcttacacagtacaggtctcaggtctgttcctagatgtgaaagagctctggtttttttgtccttgcttcttttaatctcatttattaacagccttaaaatttgagaagagaaaaatggttaacaaggaaaaatctaacacattactttttttttgtaattattgtagtcaagttttatgtttggcatgaatgagagaactgagaagaatattcgtatatctttgtgtttttactctgtggtgatactaatgtttactttttcgtgtctgtccaatcaaaacaatgttatttaaagcttgtcagagagtaacgtttaatattttgaatgtaacttagattcttctgaacatattaaatgatggatagaagaaaagaagaagcagaaaactttagctatgattatggaaagaattgtcatgtggatcatgtgagtccaattaaatgaaaaacatacaccaaataatacaattgtatgaaaatgttgcatatgtatggtttattaaaattacttttactatttttagttaaaatttcctttactacctctaaaatggttcaaccaacaccaccccaaataaatgtatctttgtacctccaaaagtagctttggtacaaaacccaaaaaccctttgaacaaaacttatgcctaaaaaacatacataaagattttgaaattttgtcttaccccaagaacccacaaaatttataatttgtccttttctttaacacaaatttgggtctttgtgtacccacattgaacgtattaaatgtcaagttttgcttaaaaaatgatggataaaattattaaattcacagtcaacgtcatgctggtgtgtccacttctcattttcataagaactgatttcaaaagatataaatattacttataatgtcattttgaaaatgttacttcaataagaaaactttcatttgtggtggagaaagcttctatcgtcgtctccatagcaatgcaataaactattacgttacgttacaagataataatcttattgcaatacacatacatacaccttacaataagattgttcacatataaaaaaattcaatttttatactgagaaagtataaattgtcaggtcatacaagtcaaaggctcaaagcaatacaaccgttagtggcagatttgtaaataaatacgtatccaaagggtaaaaattgaacccgccggaatttcagtgtcgtcgaaagccaataaagctcgcagtcccagacgcgcctcgaagctctccatgtaaattgacgaaaccatcctcacgctctctcacagctaaggttaatatcgtctttttcaaagtctaattagaattcaaaatttcgagtcgttacaaaaaccggagcgtcccatgcttttgtgcttcgagtacgttttgaatacggtgtcgtttgagagcggatgatattaaataataatatatattccattttgtcgcataaacaaaaaaatctctgaaacagcgaaatttgtgccgtttttttcctttcctgccttgtgcttctgtttctgcttctgcttcctcttcatcagacccaatgaatcagagattcttctgagaaaattagggttttgtctcctcaatttcatttggtaaacttcaggtattttgcaaaaccgatcagtgattttcttcggttagttgcatttccccaagaaagaaaagagagaaagagattgtggaggttttagagagagcgagcgaaaatggagatggatgaagatatggaaatcgagccaatggtgtttgaggttaaagagatcgatctggagtacgaatttgatgcggcgaggtggtacgattttactcgggaagagttaccggaggagtctcaagccgctgagttctggtttcactctgctccgtcgtacgctccttctcgtgagttttaatcacactctctcggcctcaagttttcattttcgttgactcatggttctgctttgattacaattcacaattatattttgaatcctacattttcaattttgtaattgatgtctctaaatcttagctcctttttgtcagcattgtgtgaactttttaggataaaggtgtatttgttgatgattctttgtgtgtttcagcttttgtaacaaaactgttactaagagaggaggtttatgatgacaagacggaggcatctacgagatcagaggatgaggaagtcgttgcagatgtttgtgataagtataaaggaacctttcagcaaccaaatcatttagccacagattttaataagacaggtgaatttataatctcttaagtagtttaccagtttgattatggttgtgagattggataactgaggtagaaataaaagcataatgttgaagaagactacaagatatgttttagattcttcaaatgatctttgccttttcaggaagtagaatgcgttctgggattttttcctcccaacaacaacaaggttgtaatttgaagaaagttccaaatcagcccatatggaaaggtgattattttgctataatagcaacatgaccatgcatgtagttcaattacattttggctctttatatttttgtatcatcaattacatttttcttttgccttcaaatgtggtccatcttacttctgaccatctttggtatatactttattgatcaaacttgttgcccccttaaaaatacatatgtactactgtcttcatcattgctaatggtgtcactttctctacttctattagggccgacggttagcaatcacaaacacactgataaaccaaaattccgagctaagtcaagcatcagaccaactccaaggagctcaacattaatgagacctactgctagccaattagcaaaacaaaataatgccaggtgacttttggagcatgtaaatctaggtgctttatcttcttgtcaacttgattttattcacctaatacgtggcttcttttgctggtttatagtaaattccatatgcaagtggatcaaagtcatgataaaggaagttgtgggacatctgggactgaagttcaagcgtctaaaagacagaagcttgatggaggtcttcttcgtaaggtagagtattttgcagacttttcaaatagggtgactgtcatggtacactgagttgagtagtgtatacttctttttaactatgtactaggtatatatatctgataatctgaatttaggtgctgaaagtagtggcaataaaagacatttgttctctgtttcaggttgctgatacaaagcaggaaatgagttttgtccacaagatccccaagaaggtttgctttctattgcttgaatactcttgatcttgtttatagagttttacaatgaaatgtaaatcatttaattattcctaaatggttttgcaggatacaactcttgataaaaacgctcaacatgccaggacaaagattactatcccacaggagcctgattttgctacatcacagagggctcacaggatacggttagcagctaaatgtttgctgaaagtgaatagttacaggaaaggtcacatctcaccggctgttttgctaatgattatttcaggcacaagaatgatgcgaagttagaacaagagcaaccagctgtatatagattcaaagcacgtccatttaaccgaaaggtttgtaactttgcatctgctacttagaaatgtgtgatagaaatgatattcatttacatagccaaaagctcaatctcgtgtttgtgatctgtagatatttgatgctccttcattgcccatccggaaaaagagcactccgaaactaccagaattccaagtaagcctcacaaatgaattcttctcagctgctatagtgattccatcatatcctggtttaaggctttagattaaattatttccatttcttatcaggaatttcatttgaagacttcagaaagggctatgcaacattcatcagcagtaacaacacggtctcatgcgtataaggtagcatcgatatttctttatattagtttatcctgtgtcctgtgatcttaccaaggtctcccatctaaataacttgatccttgccaaagcgctgcctctaaagtaataaaaaattctttgtgacaggagtcagacaaatctattataactgatatgcttgacggtgataacagagaaagtaggaggtatgacttattataaagtcactaatcacagagaaaaatatgaaggattgcttgatttctgacttcaacttgcctttgatgtgaatgtaaagttaaaagttgaatttttcttgcagaccaagcggtatggatatatctaagcatgatgtctcagaaggaagtcacgtttttaaagctcgtcctctgaacaagaaggtactatccattctcgagtctcatttgcttgcattatagtatttcacacctaatataggtttccgctcctgctaaacagatactttcaagcagaggagacatgggcattttcaaaaatagcaagcgagaaacaacagtacctttggtatggcagtcttaccaattattctttgcacttgatcttctggtatgttcatgaatggagtttcctaatgagtacataaactgttttctgaaatgcaacacaggagtttagttttcattcggaaaagagagttcaaccagatttaccgacagaccttttcagcaaggtacagctcatgagttgacgtatgatctttctaaaacgcactctagttactgaaatattctcctagtttttgacctggttttattaacttacagctctccataaaatccgagatacagccaaacgatggatctcgcacaagattatttcaaccaaaggtgcagcttgtaaaactcaatttcacttgacttgttttcttccattcccaagtctaatcattgagttgcaatcttttttttggtatcaggtctcaaaggaaaatagaataaactctttccaagcaaggaatgaggtaaaactctaaacttgaatataaaggagtttgcaaccccttataccggaggtttcttaattccttaatccgataccccgatccattacaggtaacaagaatggcagcggcaaaaccagtctcttcagctggacaacaaatgcaatttggtaatagtggaataactcctgaaacaaaccagcaatggacagctaggaggtaagctaatataataaagtcaagtctgcaaccacgaacttatgaaatatgcatctgatcaaatcaggaacaacatgtgtacttatatcttttggtgtcaatgttgtttctaattttgcaggaacttaggcattcgctgatggatcaaaacgcatttgtagtatctggattcatgtccttatgtacattcagatttggttctcttctcagtctgatcatgtggtataactcctccaacgcaaagctaacattttgaaatccaaaagaagcagaacaattcatcttgaggacaagggaagaaaggagaaagcaaaagcaaaccacattcttcagtttctcattatattagccatgtattgcatctccctctctcttttgctttcttcggtatctgttttcttacatttagtatcataaaacggataaacagaaaatgtaaatcagaaatactttcaagttctcaatacaacatgtggttcatagatctacatatctctctcttggttacttgtttgtctcttgctgatctcggttacaaatctcggtctatagtgactagattccttccaagagactgaaaacagtttagaaaatgcaaacgaagatgaaatttgtttttttattattcttacgtatcacgttagtgacaccattgtataatgatgtcttcacatcttcaataagatacacacatcaaaatcatagtaaagacacgaacaaatataagagtaaacacagaaacttaatcctttttctcagacaccaattcctcttgttcctttccaaacaacttatgctcaatatgttgagcaaatgtccttggaggaaacttagccggagactcaacactcaccatatcaggcaacggcttaagaacaatcttatcctttggtggctcacaaaacacagcccaagaaatcctaaccttctccttattcaccaacccacgatgaagtatactcttatacttcccattactaagaatctccaaagtatctccaatgtgcatcacaatcgaattaggaacacattttgcagtgacccatttgccctcgtagaatagctgcaaacccggaaccatgttgtgaagcaccagagtctcttaaggatcaatatgttatgttttacaacaaactaaaaaatagattttactgtcatgaaaaatgaatcaattcaaattgtaatatttagaattttatatttttttttaaaacaataacatgtttttcaagtatttttcgtttgttaaattgatattacaatttgaatattaaaatagaagatttaatgttagtttttagtatttacttagttaacatataaagaatgtttgggaaaatgaatatttaccaaatgggttctaaattcctcatagaatactcttggaatgctaacccgaacaaaccatctaaatttacatctttcaaattcattcctcttatgtatttccttggtatcctctacgaaagtctacaaaaagaaaagcattaactagttatggtatatgaaatattatatttattattaaagtaagattaattgtttatatagttacgcttacatgtttctctaccgtcatgtcacctactatcacatcatcttggctaaggaaacctctaataatagatgtatcataattgatttgtgtggatattgacatgtaatatcgaaattaggttaaaactaattattaatgagagaagaaataagcatatcaaatgagtcataccgttctttatataggatagggattggctagaatcatatttggacagaccctcataagcccaatttttattggatacctacaaactccgcacttcctgtatcaaaggctactacaaagtttttggatggttgaccgatggagatagcaccataataaagcgtagaaaattgtctatcaaacctgattcgattgtttgatgtttcaaatatggtcgagttcaactgaacactccccctgtttattttgattcttctgatcaggctaatcgtgacgacatcatttgtatcttgtccatgccatgagagcattagcatccacaacaagagaaagcatattattctaattctcatagcttacggtcaatataaaattacacgtgagaaaacgaatgctaagcatagatatttgtttgacaaaacatagatattttatatattagtttcattagaaaaaataaaattgcaatgtacttaaagagtatagaattacaactagaaatgtaaacattatatgtttttcaaatatatacaatatttggcttagtcattttctacatttacttctcgtcaatatgattttgatatggtagaaactaaaattgaatttatggtaaaaactaattaaaaggataaatataagcataaagtcgtcattatgtgttgatatttattgatgaaaactaattactaaaattaatttcacgtgtaatattcttatagagataaatatgtacattggatcaagaaaattaattaatttagagagatattaatttatagataaattaataaaattgtacatcttttataaattcttgaatttttttgatatagaatgtagttttttctttataatcaatagtaattataagtagcaagcaattattaagtttaaaaaacaatacaattttttttatgttgtaaaatattagaattgaacattacaaagaattaataaaaattgaagaaaaaaatactacagtcatattttacatatgatatttataatatatattagtaaatttataaaattattattttatgctattgatggaaccacatatttatataagattttcaattatttttatttatttattaatttatcaatttgtattaatttttatattgatcccaactcgggaccggaaaaacttattaatttataaaaataattaatttatcgagtattaatttatagaggttttactatatatatattatgtatgtgtcccaccaattaacccaataaaacaaaacaaataaaatcagataaagatacatatacatacaagttatttaaaaaattccaaacaaaaaaaagaattgcatatgtaccttttccgaggaaataaaatttgtgataagtttagttcgcatatctatttatattgctttgaacgtgaaaggtatacagccaattaatcataccaaattaaaccaaattttcaagaacatgaacaatgtacagtaccaaattactaacaaattttcaaccattttgatacttgcgttttttctgtagattattatttggataattatactaaaaatataatttatcatgttggatgtggtagatggttgtttacttgtttagacaggagagaagaaggagattgagccataccattaagtagtggagttaagcccaaatatataattgggttaaaaaggccataccattagtaaacaatcgattccgaagttgatccataccaatagcacacaatcaatttggccataccatttgttgagttcagtgactgctttgaaagaaggcacactaatgctttcgtagatacaaaagttaactaattcaggggaatcaaagtttggtttgcatgtagtttgtttgggttttatttttatattttattttagaactttgtttctttaaattaaagtttgcttgttaagctccgcaatattcactataaaaggcacaaacacatcaaattcatgagaaagacacaaacacattataaaagaaactcgcacatagagtttcaaaaataagagtaaacacagaaacttaatcatttttctcggataccaattcctcttgttccttcccaaacaacttatgctcaatatgttgagcaaaagtccgtggaggaaacttagccggagactcaacactcaccatctccggcaacggcttaagaacaatcttatcctttgggggttcacaaaacacagcccaagaaatcctaaccttctccttattcaccaacccacgatgaagtatactcttatacttcccattactaagaatctccaaagtatccccaatgtgcatcacaatcgaatcaggaacacattttgcagtgacccatttgccctcgtagaaaagctgcaaacccggaaccatgttgtgtagaatgaaagttaaagcgcttacatcggtgtgagcttccacaccgagtgctagctcaggctgaggacattttggatagtaatttatcttcatttgtagaagaagctcttctaaaccaccaacttctttctctagacggtcaggctctaaacctagaccgacagagagagccttgaagactttagtcgctagcaaacgaagacacttcgcgtactcactcgttgcttctctacaatcatcgaaaaacgttaataaaagattctaaaaccaaaacaagattttgttttctttagtaaaacaattcaaagcttacatgtaatcacttggtgtcttaggccaaattgatagatctctcttctcttcaggatacgcaagatgaaagaagtaatcttcccattccaattgtccactcgcgttgttagccaatttacttccatagccttgaatctttccagtggcttgatcgtttgcatacttctccttctcttccacagacaaactgaaaaactcttctccggctttcttgacacgctccattagatcagctggtattccatggttgatcaaatgcatcactccccaatccaaagatgcctttttcagctcctcaatacaattctcacggatcttttcatcgtctgactcgatgttctttagatcgattgtgggaacttgaggaccgtcttctttcttctcttctaggaaaacatcgttgatgctctcgagctcttcttttggacgaatatattcttttggaatcgatatgattccgctttttgctagactctcaactctttcaaccgcaaccatcttctttagtcttctgtttaaagctaaaacagagcagaaaacagagtaagaagtaaataaacttaaaaacaggggaaaaaacagagtaataaaaaaaatggatttgttttgtttttcttcttacactcttttttgtaattggttgcaagtaaatgaaatgtgcaaagactctttcttatatagcaaagtttttactatacttttagttagaagagtttgttaccgaactaagagacattgtagagctaccggtggttagtgctattgttgtgaggtaagtgcgtgactcacttcacggtcaacgggagaggatggttgggttgactgattggtcaaaaagattactactatatgggcttgggtctagactcccagaaaaggcccaatagaattaaacccataatcgctatcaacgtgttcttcgtcgcgtgctttaagcgtgtctccacgtgttcacctctactagttcttctactaaccacattttctttttgtagtttggaaatcaattactaaaaaaacaatttgactggttttcaatttcaaatagacaattgtatgtggatcaataattcttttggaaaactaaattatttatcttgtttgttttttaaaatttggaactcatttttattttaatggtttgtactaaagtatattatcagctgaattcaactacacatactacatgtcaaatttttttaaaaaatcaccatgtttcgaaaaaaaaatcttcttactcatctcacagtattttttttattgtataatcaaagcctaaaattatgtcttttctctattttaagtttttgttttgtttaagaaaaccggatatttaatgctgacgtggatattctgattatgaggatgagaggaaggaaaaaataagagaaatctgcctaggaatttatctccacacttctcttatctcctaatttcttccctccaaatttataataaaaccaaaaaaaaaaaaaaaaaaaaaaatcagaagaaacctgagaagctcacagtaaacacatcttcaaccacaggttcatacttactgaaaaaaacagaggaaaaaaaggagctcccttttctatctctaagggaaaatgggtagcaagatgttgtttagtttgacaagtcctcgacttttctccgccgtttctcgcaaaccttcctcttctttctctccttctcctccgtcgccgtcttcgaggactcaatggactcagctcagccctggaaaatcgatttctttgagaagaagagtcttcttgttgcctgctaaagccacaacagagcaatcaggtcttgatttggccactttagtctcgatttcgaacactccgccttagttttctgtttacaaagccatttggattcgaatttgttcacaattgggtttccaaagtttgagccttttgaaatttaggatatattattttaattcaacgtctctagctctgaaaatttatgtttttaagtcactaacttgtagtatccagactcgaatcctgttaaagttcaattctttgaagggtttgattgattcaatggctataactttggtatagtatatttgtttgtattggactttgttgactatttagtggttaactctgtactaaagttttgcaatgtcagaagttgtgtaactattaggttgcataagtaaggtatcaactttagatttgctatgaagttctcaattacagtctttttgtcttccttaaggtccagtaggaggagacaacgtcgatagcaatgttttgccctattgtagcatcaacaaggctgagaagaaaacaattggtgaaatggaacaagagtttctccaagcgttgcaagtaaacgctacaataaaccattttttttatagttgccaaaacatgatatatatctaatcttcaagagcctgagaattgcttttgtcttttgattacagtctttctattatgatggcaaagcgatcatgtctaatgaagagtttgataaccttaaagaagagttaatgtgggaaggaagcagtgttgtgatgctaagtaatcatcaactatgggactaaatttcatttctttgttttggtttctttggtgcaaagtcctaaatcttttattggtaatatgaaacacaggttccgatgaacaaagattcttggaagcttccatggcttatgtttctggaaatccaatcttgaatgatgaagaatatgataagctcaaactcaaactaaaggtttccattcactttttatgcttcagtgaaaatagacatacccttataagattggtttaagcttcaagtttatgattctttctgtatccatgtagattgatggtagcgacattgtgagcgagggtccaagatgcagtctccgtagtaaaaaggtaaatagaacataagattcattgttaatattagattatagatagatactaattttcagtctttatgaacttcctcaaatgtaggtgtatagtgatctcgctgtagattatttcaaaatgttattgttgaatgttccagcaaccgttgttgctctcggactgtgagtctctataccgagttttctattcaaacatccaaatcatatgaaacccatatttcgtctttgtttattcattcaattctgtacttgcagctttttcttcctggacgacattacaggttttgagatcacatacatcatggagcttccagaaccatacagtttcatattcacttggttcgctgctgtgcctgtgattgtatatctggctttatcaatcaccaaattgatcatcaaggacttcttgatcttgaaggtaagaaccattaccattactcaagattgcaaaagaaaaacatcaaagagcctttttatgaatgtttcttgtttcacagggtccttgtccgaattgtggaacggaaaacacctccttctttggaacaattctgtcaatctccagcggcggcaaaaccaacactgtcaaatgcaccaagtaagattttaccttcgaatatggtttcaaaagtgtaacatattactatctgattctttgattatctctgtttttagctgcggaaccgcgatggtgtatgactcgggttctaggttgatcacattgccagaaggaagccaagcttaaaccctgtgaggtacacatctcatttatagtaaattctttagatcacatggaagtcagagatagtaaaatttgctttttccagctagatgaagatgggaaaagaagaatgggttttgtcagaagcaaaatagattcgaagttaaatgtatatgtaagatcttccatgttagctctctctccttcacatgttttctgatttgtaagtattgtgtgtaagcaataagagatatataatatgagcacttcttcatctacctttgtagataaaaatataatcattactatagttaaatcaaattgtatacatgaaagaccaaattcgaatttaaaatgtttatttcgataactttacaatttcaaattaactttggtacatttctaatactattatgatttgtatctaaaacgaccttaaaaaatgattttaagtcaagaaaacgaaaagcatacacgattatatacatttgcttaccgaggcaagaaactatgagaaatgcatggtgttaatttggatgtaaattttatgaaatggtgtggaacataaagagattgattgagaagagaactaaagtcaagaacatatataatgaaaggacagacaaaggtaacaacattgcacaaaagaggataaagtcacacaaacattagcacgccaatgtctctctcttttttagtctaaaaattgattacaatttttttttatgaattttaattaacacagaaagtgtaatcatgatcatcatcttcccatgcctctatcatcattgatccaattttctcctccactactgaacctattaattgcttttacgttgatttaaaaattttaaaacctctacgttagaacggtcatatgcttatttaacaattagatcatgtcttctataaaggtaaaagagaaatctgacaaatgaagtgtaagtgtttataatgtttgtgtcccaaaacacacatcccccacaaaagtaaaaacaccatcaaaactttctttctttcctcttatcttcacttcctcttgtaaaccctagattctcttgttcctcttatggattcattctctttttgtatcatcatcatgatacttctcttatcattccaccaatctaagtctcaattgattcaatctacacatcttcttgatctcatgatcagagattacaccattagaaactttaagctcaatttcaacacaggcgtcactcagaaaatctatctcccttctaatttctctggtatcgatattgacacggtcaagttaaggtgtgggagtttgagaagatatggcgcaaaaattggagagtttcacatcggttcaggccttacggtggagccatgtccggagagagtcatgctaattagacaaaactttggttcgaattggtcttcaatctactctactggttataacttatccggttacaattacaagctcgtgtcaccggttcttggtttgttggcttataatgctaaccctgacggtgtggccaggaacccttacgaggttaatgttgtaggtaccgatcaaaacccaatcttaatcgatttcttgatcaacaaggcaactaataacactagccctaaccctacgaagaagaactcgtcagtcttgtgtgcgtgttttacaagcaacagtaacacaacgtttagcgagcaagtctcgccgtatgtgtgtaaaggtacaagacaagggcattacgctctcgtgatgaagacagaagctcaaaaagatgatcatgaaggtggtggtagtagtggtggagtggtggcatcatcgacggaggtgaatggtggcaacggaggaggaaagttgagccgttggaaagtggcggtggggagtgtgatagggtcagggattggagcaattctgctgggaatgttagtggtggcgatgttggtgaaggggaagaagaaagcaatgagagaagaaatggagagaagagcttatgaagaagaagctcttcaggtgtcaatggtgggtcatgttagagctcctactgctcctggaactagaactcttcctagaatttccgatgataggtataataaaaacactcatttgaatagtaattatccataattatcatttgttttctgatttttcttctttttgtgttaattgagtatcttaagataaatagttttgtagaaatagtttcaatggcttcaaaatgaaatttcatccatttttttttagtttttggttaaacggctataatcgttagttttctttttactaaaagtaaagacttttacagaatggagaattttctcttttttattttctataaaatggtcagtgaaattatgcaaaaaaatttaaaaaaatcagagagtccccccaactttcatactgtaagctttatttttttcttttcattttgatttattaatctctttttccaactttttaattaaatgtatatttctgatttagtgaagaaaatatacttttatcagtattgtgactagttaacagaattttccacctacacatcaacaagcatcttctccagtaagctattgttaatgcgaagtacggaaatataaacaaatcaccaccttcattgcaacttgcaatcaatttttactcattttagtaaggttttgtttttctttttctttcagttttttgtgatttagtttaagaaaaaataaaataaaatatagatataatttgatcaatttcttatagttgacagaaaaaaaatcttataactattgtcttttgttatatttgattggattattttttgaatatttttttggtaaattttcttttatatctttgatatttaagttttggtttatactttgtatctcaattctgtaagatatgaaactaagatttttttttttctaagattttagactttagcttattaagaaaattaaaattaatttcttataactgtataagtgtatttttctaaaatttcattgaaccatttttgactagtatatatctttttggaaaaatttctagaacatctttattatttaagtttttaggtctgtacttttgtgtctcacaattctcttagatatgaaattaaaaaaccaattaaatacaaatcagatctaatttttaatatataaaatcagcatgttttggcttgatttgtccatagatctataacatttatcaactatttttatatattgtcaacgcctgccatctaagattcttctacaagatcactagagtgttttaactgcttttagtaaaaaatgccaaaaacagacattaatccataactatttaggcccatcttcaagcccattaaaccttttcctcttaatccaacgattaagattgaatcagaagcttaaacctcacggtcctcacctgaatcacaccgcttaacttcacatgtcgttttctgtttttccttagatttcccgggaaaaaggaaataattaaaaaaaattggcaaaaaggtaaaaaagttaagttaaaaaaaccaaactacaataaaaaggacaaagagatgtttcaacaacacttcaacaaaaaagccttttgttcaatctgaagaaaaaaaaagagtcaacaaaaaaaaaaaaccaatggaagaagaagatcctacagcaagcaatgtgataacgaattcgaattcttcatctatgagaaacctatcgccggcgatgaatactccggtggtttcacttgagtcacgaatcaatcgattaatcaatgctaatcaatctcaatcaccatcaccatcatcactatcaaggtctatatactctgatagatttatccccagtagatccggatccaatttcgctcttttcgatctatctccttctcctagtaaagatggtaaggaagatggagctggctcttacgctactctgttgcgtgcggcgatgtttggtcctgagacgccggagaagagagatattactgggttttcttcttccaggaatatttttaggtttaagacggagactcatcggtctttgaattcgttttctccttttggtgttgatgatgattctcctggtgtttctcatagtggtcctgttaaagctcccaggaaagtgccgcgatcgccgtataaggtgacgatttttgattctggggttgatacattgtttagattttggtgttttgatcattgaatctggatcatgtcttgtgttttttaagtgggttgtgtgcattgtgtggaattgattgtttttttcttcgatgggtttttgtgtaatgtctgtagatttgggggttggggagcttagattcttgatctcgttgactttagatctttggtttcgataatgcatgaaacaatttgtgatctttgtgatgttttggtctctgagggtctagaatttgagtctgaggttatgtgatcttagatgaaactattattgaagaatgcttgttgttttactgttcttagtgttgttgtatatttagaaaaggttaaatcttgttactgggtttgggtaatttgtttgtgggcaatgttgctacatctgataacagaggttttgagtagtctttactagtgtagagtgatctagatgatgaagaatgtttgttgtttactgtttttcgatagtttttagtgtggttgtaaatgtgcaaagcctgatgttgttattggattttggatattttgtttataggcaatgttgctacagatgataacagaggcttctttctgttgtttaggtattggatgcaccggccttgcaagatgatttttatctgaatcttgtggattggtctgcacaaaatgttctagcagtgggactagggaactgtgtgtatttatggaatgcttgtagcagcaaggtgagttttttttgtcacttgcaaatttctaataaatcacagtagtttcaaattttgttttggtgtttgatttcttccttcaaaatccaacaggttactaagttatgtgatctcggagctgaggatagtgtttgctcagtgggttgggcgttacgtggaactcatctggctgttggaactagtaccgggaaagttcaggttagatctcatttactctttgtttttgtcctgttactaagaatttacgttactttgcaactttctgaatttagaaaacatattttaaagtaaactatttatagttacaacatgattagatttagaccttatcgtggactgtaggattcttgccatatcttttactggtatgatcttgatcattagtggtatgattattacaaagagtttttctttatcgagaagatatgctcgattaaagcattatcaagggcttgtaagtatttggaaagtgccctgaatgaagctaaatcctttgtggttaagatggaaagtatctgcatataaaaccttggcggataagattttcatatatctgaagaatttatgatgttctttctatggcatattcactttagttgtgtttttgtagatatgggatgcgtcacgctgcaagagaacaagaacaatggaaggtcatcgtctaagagttggagccctggcatggggttcatcggttctgtcatctggtagcagagacaagagtattcttcagagagacataaggtgtcaagaagatcatgtcagtaaattggcaggtcataaatctgaggtatgcggactcaagtggtcttatgacaacagagagctagcatctggtggaaacgacaatagggtatgtacgatcaattgatttgcggttacattagtcttcttgttaaacccccaacatagctaaaatggttataaatatttgcagctttttgtatggaaccaacattcaacacaaccggttttgaaatatagtgaacacactgcagctgttaaagccattgcttggtctcctcatgttcatgggcttcttgcttctggtggtggtactgctgatagatgcatacgtttttggaatacaaccacgaatactcatttaagttccatagatacttgcagtcaggtaaatttcttaacttgacatgcatgactcacaaaagataaccaacatttcatggttaatattcatctttgttcttatatattacaggtatgcaatctagcttggtctaagaacgtaaacgagcttgttagcacacacggatactctcagaaccaaatcattgtctggaaatacccaaccatgtccaaagtatgaatctctctgaccttatattactttccatcattgagcatcatcagttatttaatctgtgttttttcgtttgttcagattgctactctaaccggtcacacataccgagtcttataccttgcggtttcacccgatggacagacgattgtaacaggagcaggagatgaaaccttaaggttctggaatgttttcccttccccaaaatctcaggtaaaaaccaactaactctacttgtgtaattacttaatgatcacaaaaatgctatttctcagaagagctgattcgatgtttttggctgtgtttcagaacacggatagtgaaatcgggtcgtctttctttggtagaacaacaattcggtgagaagttactttcaaaacacacagaaaaagtcataaattcttgatttcttcagcagcagccagcttgagttggtcgtctcaaccaacttttttcacacgggagcagagagtcattaaattcttttacacacggatgcaacaagatctaacccttttgatttaatcacgatctttgggtttccatcaagatgcacaacattttcccccaaaattttccaaagtgtatatctttattcaatttttcttcatatatcaaaatatagtttcttttgtatttatttacttacgaacacaacattttataaaataagcccatgataataatgcaataattcgttaccattctcttatattacttgttcttcttctctttctgtatttggtgtatttggtcgtaaattagatagacgaatggggtcagagaaaaaaagtcatcttgatttggttataaaatgaaaaagatattgaagaaagagaccaaataaatccaagaaaataatttggaatcattaggagcaagaagtggctgatacgctttgcaaaaccaccagagagacaaagtcttttgccatctctttaccttcacgtttctccttagtttctcaccgttacaccgacgaattcggtccttaatatacgtctattgttactttggtgatgattctcatgaatatcttcatatttctaaactattcttatttgggatattagtataactttaaattggtgatgattctcatgaatgttttgatatattaaaatatatatgttcattaaacaacaatttattcatctttatgtttgcattgcagtagtactataccagtctgtcacctttaatattagctaatctgtaagaaatttacattttgatcttgtggatgagatacaatacaagtatacaactatgataaagacttcagagtagacacaaaataccatttgaaactttaaaatctgtatttaacctacaaataatcattattttcctataccacattatgtacaccaaaccaaaccaatatttagatccaccaaaaggaaagtcctgccatttccttttcactttgtacaaactaccaaaagaaaaacttgtaatttgatatttagtcactagagtttctccggatttggagtagcaattccctcagtctgagtcccagagtaaccatttacaccttcattactaagactatgagaccatggaatcgagctaacggttggaaaacaacaactacactcgtccgcacaccgagcctcgggaagagtctcagtcttgtgaccatcaggcgaaacagcttcccaaagcggaccccaacactcgactttgttgaactcattgacattagaatggaaatagacccaaacaagagcttcttgtagctcaggatagttgttcaacaagttcccatctccatgcacaaaagccttcaacacctgtatatatcaaaacaataaacattttgttttacatgaaaccaataaaaagtttcttatgaatttgggaacttaccacaggtagttctttgcaaaagatgaaatatcgaaactttgcaaagagatctaaaaggaaatggccaccgcttatgtgacaatgaacgtgaagcgacattttccctttcactttcttccattctgccacaacttcatcccggtatagcctatttgcccatccttgcaactataaaaaacatttctatacatatcagcctctaaagtgttaagagattctggtgaatatagacacatacataggttaaaacaatcatacataagcctctaatatttgctccaaataatcaaatacataaacattctactcctataaacagagccatgtagatatgttaagaccagagagagaggtgtttttacctgagagttgtttatggattgagaaatagctaaggttagtttagctgtaatgtcactgtgagtgagtgtgtaagtcctagggagcgttgaaggatgcttcttctcatcaacccctaagaagagtactttcaatttggatgattcgaaaatcgccggtccaaacaaccttgcaacctgcaccgatcccaaaagtttcaagttccatcaataaagacagaggcatagatatatccataactgagacacataaaacaaagatatgtcaaaatgattaagagaacaaatccttacgggaacaatcgattggttcttcttcttggatcttctattgttgaagaagagtgagctgctgctgctactgttactccgtttgtctgaataagctggtttcagcttcgttggtaacaacataatcgccgacaaactacacatctctgctctcttgaaacccaaatcaaaagcttcaatatttcagaaataacaacagaacaaaacgccactaaatacagagagactcctttcacgaagcttggatacaattttttcacgcgagttcttgcgtgttcgtacactgaaaccacaatcaaaaagattgtaactttaagaaataaatatataaaagacccaaaatttgagcttttcctttgcttgatgattgcttgaagctttggttttgaattttccttttgagatcttccaggaatttagggttctttgtgatgcgtattgagttggttcttgtgtttaaaagggattgttgcttcacgtttcacacttccgtgcccaaatctgaacactcttttggaatttttctgaacacgagagagtgccacgtgttctctaatctttgcatgagcttccccatgtgtcgtcatggtggggctaacaactggctctaaccgtctttttggataactttagccatctcgttgcgacaaagagacacagattcggctctaaccgaacctaactcacgtactgtagttgtcagtcgaacctaaagcaatacggtttagtttcggttcaatttaatgtcattcgactcgattactcggtttagttattagacctgtgaaactcgagaggcttcttcgcttgaatcgtcgtgaacaaggacaacaaacgcaggtattgatggaaccggaggagtcagagagtcccatgttgatccataaggatgttaaaaagggctgaaatttgtgatcaggtccaggtccattaaaaatatcgggctaaaattgggctggcctgttacagagcttttatttttttcttcttcttttacgttaagcgacgtcgtatcttgtaaacaacaaaacacgagtactgttttttcttcttctttctccttcaatctcttcctcaaatcactctttttggggttcgttttgtttgtgttgtaagcatccctgttgtgcatttcgtttatccaggttcgtattgcttacctaaacaagttcaagttttcgattttggtttctaggtgtttaccagtttcgccattttgtggtttattgtttggataatttgatttctttggattttgctgatacccatttgtgtgtatagaaatttgattaatctggatactaaatttcgtttggagaaacattgaaccaaaggaatgcgaaatcttttgatgatgattgaatagttttagtgcctgctaatactttagaacagagtcaattttttaaggtcatgttatagaatctgagtctacttgtcatttgctttggaacaggtgaattcttgcaaagccttgagcagctttcagatgataaagactttggtctctccttatagtgtatgtactctacctccaccactctttgagtcttattcttgtttagttcaatccacgtgatccagttttaattttatttaattcctcctatgcgtctgttaaagtcaactattttattctttatgtagggatttggatctcagaagttgaagtttgacagatcttctgagaaagtgaagacgagagcagtaagaatggagctcacaatcactcaacctgatgattggcatcttcatctccgtgacggtgatcttcttcatgctgttgttccccacaggtcttataaacatcctgcaatctttcttttctttccttgctttactttgttttgcagccacttttttgtttgctattggtgtttcttgtggaaccattgtttgttatgtatgaattcctcaatcacaatcttgtgctggcgttgatgcttgtgctgtacatgatggttaatggtgtatgtaattatgtgcagtgcgagtaattttaagagagcgattgtgatgccgaatctgaagcctcctgtcacctccactgcagctgccattatttaccggaaatttatcatgaaagctttgccatctgagagtagctttgatccacttatgacactttatttgactgacaaaactctacctgaagagatcaggcttgcaagtaagtacctgtgctttctccatcttgttgcaaactaatcagatacattttcatctttctgattgagattctacttgctaatgttcagtttatgcatatatgatcttgttattaggggaaagtggtgtggtttatgcggtgaagctgtaccctgccggagcaacaaccaactctcaagatggtgtcacggatctctttggaaaatgcttaccggtactagaagagatggtcaaacaaaacatgcctttgctggtaaataaatcatacaccacatagacttgtatttttgtctttgtcttgtctgaggaatgttttgattaggttcatggggaggtcacagatccgagtatcgatgtctttgaccgcgagaaaatcttcattgagacagttctgcagcctctaatccaacgccttccgcagctgaaagtagtgatggaacacatcacaaccatggatgctgtgaattttgttgaatcttgcaaagaaggttttgttactatcttattttcatttcttgtcttttggtttttgttaatctgcatagctcataacattttgttgattatagggtctgtgggtgcaacagtcacaccacaacatctccttctcaacaggaacgcccttttccaaggtggattacaacctcacaactactgtcttcccgttctcaaaagagaaatacatagtatgttcttcactttccttttgaacattaatatttcattttttcagcagctttcggaagatcattgcttttacttcattgtacaggagaagccattgtcaaagctgtaactagtggaagcaagaagttcttcctcggcacagatagtgctccacatgaacggagtagaaaagaatcatcctgcggatgtgctggtatttacagcgctcccattgccttgtccctatacgccaaggtctttgatgaggtaaactgtgtaacttcaaacagtttactttcccggtttgtgattccttatgttcataactttaacttctttaacattcaggcgggtgcgctggacaagttggaagctttcaccagtttcaatggacctgatttctatggccttccgagaaactcgtcaaagatcacactgaagaaatctccttggaaggttccagacgttttcaacttcccattcggagagatcgtccctatgtttgctggagaaacccttcaatggcaaccgttgaaataatgtggtgatttgaagttgtcaaattttttctcccaaataagtgaactcgtgtaccttttggattgaattttcttacggctgagttatgccctgcattttttgaggaataaaagcaagatactgaccaataatgtttattttgtgtttgaatctgtctattttctctatattgaatctaaatgacagtataattctcaatcagtgtgggtctgattcctagtcctcccgacgaagatgttccattctcgtaaaggctaggcagaaatgctgttgggtgaagtgtagatggactcattggccaaggtatgcgttcctccatattcactgatccgcctagattcggttcttctgtagatgggtccatgtaagagactttcgcgttagtttcatcttcagttatcatgtctgtagatgtttgcattttcccagcagaatggtccggtaaactggaagtcttgtcttcctcgtaagactttgtaagtgaactgtctctgctcttggaatttgaggactttctctgcatatgcataaacttttatttcggatatttctgccaaaacactcaagaaaccaagaaaccgtaagagtagagagatacctgcatcggctttgtgggagacgaatctgctagaattggctgaacagcttgagcttcgtctgttcttcttatttgtgaagcttgttttctagtgttatcgcgcatcttgatgttgatttccttacttgaagggtattttggtagacaagatggatcacaagccaatggctcagttttgaagtactgtttcacagtgaagagtataatcagttgaagtcacaagaacaacatttttgtcagaggaatacgtaaagtccaaacttactttactcttgagagcactagctgcagtgcctcggaaatctggatctattgagagcaaagtttctaagagcgaaataactgaagctggaaactgtttaaatgtctctgctatatgtgatccatatggatagatgggtctcagtggagttgaaagctgtagctttagttttgtccaataatcatctgaaggcgatccacacaacttgaatatcttgtgcagttggtctgtcttaacatgagaatacagagaacaaaaatctgaagctttgcttatctggtaagaacaagagtgataggaatctaattgcttacctcattttttcctggaagaataggctttccggcatataattcacctattacgcagcctgtgctccacaagtcaactccaataccgtaatgagaagctccaagcaaaagctcaggaggtcgataccatagagttgcaacatgggttgtcaaaggaacactgttatgaggatcgaagaacgtagctaacccaaaatctgcaatcttgaggactccatcaccgttgatcagaaggttcgagcttttcatatcccgatggagtacatgattagtgtgacaatgatcaagccctcttaagagctgcctcatgtagcatttaacctgaacagagaagaagaagaagaagagagtacctgagaatttgacaccaagtaatgaagagagtgtgaatagaagcgataaagaatacctgaggttctgagaaatgtacaccgagtaatgaagagagtcccaagaggtcatgttccatgtactcaaagatcaggtaaagggtagaggaatcgtggtctacaagcattaacccttctaatttgatgacattgggatgatccaacttgcgcaggattatgatctctctggctatacatttgatgctttctgagttgttgatatcgaaccggattctcttcaaagccacggtcttgttacgaagaagatctctagctttgaacaccttactgaatgttcctcccccaatctgttgcaaatacagagaataagtctctttatcatatgagaatcaataaagaaaggaagagaaagagcgagagacttgttcttgcttctcaaagtgagattcacgaccaggggtccaaccaacaagggcttcaccagctacagaaataagccacggtggccaaccagaggcagctaattccgatgagcgaggatgaacattaacaacgagaatactttcttctctcttcagctcctttggacctaatttatcactcatcttcaacaattctgtcaccttttgggcttgatcatttgctattcttctttctgatggaagagtatggaaacgaggacggttttccggcaatcctgttggtgccgccggtttattcctccgataagaaatgatacaacccatattgaccaaaagcttgaaagccacggcactgaatgtattacaaagagatacattgtgaatgaatatgatgatgaaattagagagagaatatcgaaagtgcaatacacaaacgcaaactatacaataaaagtgaaaaagaaatgtctgaacagaattgaattcgccggaaagcgacagtacgcaatccaacttattcgttacagagaccccactcctaaaggcttatgtccctaatcatttttattctctctgtatgttacgtaactaaatacttaaaccgattcagtttagttcggtttgttcaagtcctaatagatacaagtaatggaactgtaagttacaggtaaatttttaagtttaactctttgattaagaacatattaattattacatctcaatttttttggacgaaaatatataaagataaaaagttcttacatcatatagttaaaacattctttttgaagaagttgtaagattaattttgaggagggaattttttggattgtcttgtctcaggaggtccaatgaacaaaccagtctccacttccatattgtcatctatgttcacttctgatgatgataacgttgattgtgatgatgctattgttgctgttcccattccaagccacttttattttcacaatttcaccgaaaaaactcttctactcagcaacatattaacatatcataaaaataataccttttataagatgctaaaactgtaccttctccttcagatctttattttccttaacgagattcctctcctagtaagattttgacaaggaacagttatatgaagtattaataacgagatacaggatgactctatatatatgtaattacatttagagaaagcaaaaaaaagtttaagtatgaattgtgttttacctctgccttcaacttctcaatttcttcacggagtaattggtactgaaaataattgaatatacgaacaatctataagcaaatttccacattattaatagattatgaagacatttgcatgtatattccaaggaatctttcaactaagtatcctaacactaagtgcgttgttgatactcattgtttcaatgttatattgaggaatcatcaataaaattactcaatgttgcatggcctcaatgaggctgatgatatgattagtgaggccatgcaaaccattcacaatttcacatagacattaaataaagaacgcatgcatgcatgattagcgagaccatgcaaaccattcaattgttaacggtattgcatatataataataactaaaaatgatgaatttttttttgctaaatgaattgaatctaggttttaactatatcttttaattacttgtgtagatcactagattagtatggtaaaattatttttgtaaacgcaaagagccaaacacatgtataataacttccatcatattaagtaaacataaaattttctcatcaaatcttaatattctaaaattgcggaaaaacgattatagtatcttaatcctaatttccattatcactggaaatgagtataaataataccttcttggctcttatcctgctcaagcttcggtccaactgattctctaactgttgcagctcctcgatggaacatgcatcaatgccttctccaagcaattttctgcaattattcaacaatcaaagtatcttatagttcgtttataattttatataaacgtttctcataagaaattttgagtttcaaaaccgtttagatatctctagctgttcaatcttttttgtcaatccagatgtttcgtctctcgcttgctgtcaagtaaaagtagtatagtcggttaaatatttggaacacacaaaaaaaatatttataaaaaatatcgtacgtttacaatatgtaaaacccgaaatatgaatgagaatttacctgagaattatcatttctcttatgattattcccaatttcttttattcgtctctgatagcgttcaattgttgctgctatactgaaatgaatcaaatgaaaataaaagaaacgaaaatgtggagtcaaaaccaattgaagctatatatgcatatatgtgtgaaaagtatatacttatgtgactaaataaataaattccatttatttattgacatttagaatatatatcatcatgatttatgaccgttaaatattgaaactgaactgtgaacgaagagaatcacagagaatcatgcagatatggcttagttgcattgttcccaaaagttaggatatgatctcatgtttcgaggaccatatataatatatacatgtttattttctaaacaaaataataggttatatgaaaacaaaagagtgttcctctttacttcaaaatgcagaaaatatcaaatatattgtatttaagatttatgattcaaatcatgcatcaatattttacatggctacgccaatatacatataaagagacaagtatatatagatgcacatggacacgctcaaatcgaaatattgaaattaataagctaaacctttagagtatcattaagcagtgcgataacaacaaggattatgtggttaagaatacctagttaattgtgattaacctctcttgagtttgctcaaaagacatttcatagttaattgttaagtgcttaatcctttataatcaaatctatatttattcagcataaattatatcccaaagaataaaataagagaaaacgtagaaagaattaaaataattctgatctacacacatgcgatgacttctctacagttaatgctcaattaaatcacggtgtgtgttaaaattaagcaaaatagtacctcttaatttgttgctaaattttacatattcatgcatacatataaagtttcccatatatatacatccacatacacatatacaaaagaagcatctgtaattttgtaaactcgcatgaatgagaatgtgttatatcatgaactcatcatgtctgatttaaacatgtgcaaatatatttattgatatgtataatgcaaaccatgatcaaaactagcattatttactacaatgcttcgtctcatccctagcattatgtagatatatctgtcatcatcatatatgatatatttctactgacacacacactgtatatgcatttgtattacagcagggcgagatacatgtggacatatatatccaaataaggaaatttattgttaatcctgaaaatgactattttctaaatttataaacatgttgatagtatgtacagtcctaatttgaacaatataaggacactttatatactcaaaattaagtcatagatattgttacatacacatagcctagcagtagcactggtgtcaaactcatctttcttacaaacggataaacatcaagtatctcaaaataaaagttgtttgcatttcaaaatatctcagtaaatagagaaagtcagaaagatcaactcatctacagcgaaaaatggatggctcataacaagtatacatatacttgatatacacacacgtttcataggttgtagtgccataaaaatctgatgactacaactacaaaaagtatcattagtgtcagtcctataaaagtagtctaatttcttactccgatctacttttatatgaaaacaaaatcaccattatataactctcttatcagatcttgataatcatataaccaaaaaatccaatgaatctacttattacggtgaaaattggacccgattagcccctctagtcgaatcggatccaaaaattgatcagtgcaaatcgttttttcacaagtaaataaacaaaaaagggacatacctagagctagagaactcatagagtttggatcttggagagaagataaccaaagcaacttcagcatcacaaaggaccgataattcgaaggctttcttcaagagtccatttcttctcttcgaaaacgtcacttgcctgcttgttgcgttctctatcctcttcatctccgttttgcccctcaccatcctttacttctagtttattctttatataaatattctgtgtaaaatcacacaagagacaagtatttattcaaccaaataaaacgaatagtaaccagaaattagaactatatatatggataatggttcagatcaagaacataaaagaagagacatactccaactacaaaagtgaccaagaacataaaagaagatatggatttgaatttatttttctctgtaaatagaatatggatcaaccacaaacagaagatggaattcgagatttaccctatttgtaagtatgagctttggattgatgtgtctctctatgtgtataatctatcttctataagtgagtggagagaggaaaaataggcgagattttgggaagagggtgtgatagagattcttggaaagccctagatttatgatgaaggaggggagagaaagaaagaaagaaaaaaactaagtgtttttgattgataatttgacatcatagccttattcttttttgcattatatattaaatttgccattttctcttatggctacggatagtctatataaacctagacctgcctagtagtacatcacttttatttttagaaattgcattacgtaatttctttcttcttttggtaaaaattctaatgcaaattcaaggccaatctataatagtaataaaatatgtaagtgcaataattgttgacgggggaagaataatctataatgaagtgtgacaaggaaaagaatcatgctatatattatttcgttttcgaatttaattgcataatcagtttttttttaaaatattatatgttactctaaaagcctataaccaataaacccataatttatctaactttgtacaatcgtaagaaaaaatatatatatatatatatatattcgtatcatatttttcttaattttacatgatatttttggtatatctagtctaggtatgggttaattaatttatattgttggagtaaatgcaaacttacatcttaaacataattaagtgaaggagatatatattatgtaggtaatgggggagatcttggcacgtgtccatattaaccgacaacctacagatccggtgtccgtcaaagtgggtttcactagtgccacctgaggacatcaagcatccttgtccgttgccagctcatatcggacaaaataagtagttaggacacaccgtccgatcttcgcttctcttcaaacgtgcaccatccgatcttgttatctattttaagaaattaaaagacttcgacacaaaaatggatacaaatttatttcagtcacttatgtgcatatttaagtctatatatatctgatcaggagatacaatattaacaattgctgttttacttcttataatagtctcttgatttagagaagaagttgaaacaaaactcgttttatattttccacagaagaagcagaactttatgcgataaataaaagaagagaactttaatcgtgtgataaataacccgtccgtacaataaaaatttattataacaacgaccttcgcacaaataaaacagtaacacgtacttgtatatgttttcaatttcacatgtcaatatatgtcatcttcgcctcttgtttgatacgtttcttgtaatttataaccaccaccttctagcttttttactttattcgtttcctcgatttaaatatcttataatctttggcataagcaagtggttatccactattggatgcttttcacaataatacgttacaataacatttgtttattcttacatatcttggaacaggtgtcgcacgctaggagaggaccacatccctttcactaaatgaacgtactaaaatgctttgttaatttgcatttccctacaaaaatatagaaaaaaaaacctacgtgagaatcaatgtaatgatatactataacatcttcccatagttgacgaaaaagcaagtgtaggttagcctaaaaggagtagttatttacatccaattatctaatatccaaaatctatcaatggtcgtcttcatatatttgaatatttctacctatatgtaatttgaaaattcaaaccaaaatattctcttacgtaagctggttcctttatgctatttgtgaagtcactacccaatacaaataaattctgcgtgaaacatctgaactaaaatcttaaaataattccatcgatcttttcttatagataaaacttcaaacgatcttgctatactgctttttcgatgttatatgatctttagcataacgttttaactaatttactattaccgtttatatatgtcataaaagttttattctattataatattatggtacatgagctccgctgataaatatttgattggtctctaaaatccatgattagagtttttattcactaacagttgaaagattcgcctacataagggtaggcgtaacataagggtcaaatgttgaattttatttacacgcttgaatagagccaccaatacgggaccagctttgaccgtcataacaaacccggtttactaaaaccatactaattacggtttcgtcaaaatcaattttgtttctcgtcactcaatgctgcttataaaagccagtcccatgctcacttttcttgcttccttgacacacttcttgagaaatttcagcaaagtgtgtcttctccgatttcgcagacggttagatctcaacaagcgattctcatcgtcgtgaaccttcttctttaatggcgatcgataactctcgtcctcctccggacgaaatcttttacaagacgaagaagattttgtatcgtggacaaaggtgcaatatcattctccaggataagaatggaccatgtcctctcatcgccatttgtacgtacatcttctattctcctcccgattttactctcgctatggtttgtgaacttcgattagcgaacgaaattagggaaatgtatgtgttagtatcttgagatcttttagctcttttggtgttgatgatgatgatacattgtgaaattggggattagattcgttcgttcgttttcatcgattcagatgtatcaagactattgaaatgtgtttgttacaggtaatgttcttatcttgaaacacggaattaatctagacacttacaattctcaagtatctgaagaggatttggtgaatcttgtgatcgatgtactggatgatacagacgagtacattgatattgggctcatcagaaaacttgcttgtgggataaatgtcgatttgaaattcgagaggtcaatctttttgttatcaatatgttaaaccttttgatatgttacatagaaaatatcttatcgtaatgaccggaaatgttttacttgcttgcaggattacggattttgagttaacacctgagctagatatatttcgttcacttaagattcctttgtatcatggatggctagttgatcccacggtacatcattttgattgtgtttctttcttgcttcaatttgtagtaatagaaaagtttcaatatttattgtttttcctccaggatgtggaaattgttgctgcaatcggaggcagatctcgtgatgagttagagattgcgcttactactttagacacacagactgttagttctgttgattttgctgcgtctgcagagcatcttggattgggaaagggagatattgaagaagatgaaatggtgtcaaaggccttggcattatctgaaatggaagcatcgttaaagggaagttttgatactcagagagttgtgtctgggtcgttagatgtaaatcagatctctgaggatgacacattggtaacttctgtggacattgaagctggttgtgctaccacccttggcagtaatatctgtcagctgtccaaatttgatgatcagttttcttctacggaatcagaagattgtgatgttgggaataagaccaatgtaggtgaagaggtatcttcaacggaattgggagatgagacttttggtaatgttgagactgagaatagcagcaaaatgactgatgtgctgatctctgtggagaagactaatctggagtcgaccaaaaatgatatcatttctgaagctataactttggttaatgcaggtagactcatgggtatctctgcatgaacttgcatctggagatatgttaaattttcttactaaaatcacctcattgcatctccagatcttagtgaaaaatcccaggatgatgatgtctcccagtcagtttatgaagtccagtctcttcttggacaaagctctccggaagggaagggtacaaaagggctcacgcaagaagagggtaaattcttacacatccattcttacatatctacgcattatatctgttgtggataaagataactccattcttttttttcttctgagtttcaggtgaattgatcaaaggattctttgaagaaagtgtcactcaactaacttggcatgggtgcgtgatcttattgtttgctaaggaagatttctgtgattggctacattggttttatcttttctagttactgattatcatttcctccaggctctttaccttggaagatgaccttaaagaatgggaactttgtgtcctgttccgcaacaatcacttcgctaccatgctgcaggttatttacttatattatgtaaagctgttgtgtttctttttttggttcccagtcacttaaatcgataatcaggaagtgtttttgaagcgatttcaacagtttatacataacattctagaaggttaattctgttttcttttgcagcatgaagaaagactctatactttggttacctatgaaggctatcagatgcagcaagacttggtttgggaaagattcaacaaggtatttacgaattatgtattagttgtccttgtaaagagaagatgaattttgctatatttcaaagtctctttgattgctatggtttggttttaatactttcagattgatggcgattctgccttctttactggttacttcacgaaattcatcttcaaggatcaacagcacgcaattagtaaaactgaggtaagaactcctcctgcttttattattcatgtagaaacttacctggctgttactaaactaaaatctctttttgtctttctcagaattctatctccagaatcaagagtgaaaacatggatactactgagtaaatatctggatctatgagaacttaatatttccatctgtttaggctatttttccccccctttgtttctaaatctataacatttttaagattcgttctctttttttttggtttttatggcaggttcgatcgtctattggcgttggagttggagcaaaatgactgggctggagaaactggatcagaggtatactggtgattttaagtactgataccatcctctcagaatttaaaaccgtcgtaaaaatggtgtagagtaaacatagaaacataactcattttcatatatactctgttagtcctttagtacatgcacactttcatgtatttccattcatgaaactgtatcgaattgaaactgtgtatttcacaaaatgactgtgcatttttttcttacaattgaaactgtatcgaattaagtgaaagtttgaacaatgaataccattcatgggatgtgttaaaactgtgtgttacatcttttcaggtaccaataataagctacaagcacatatcttcttcattacaagaactgaaagaattcctaatatggcaaaatgaacaatcatcatgaaagcatgtcccttaccactgatgtgtttgtctttcttctttcatcttcttaataaagttagtttttttttttttggctttacaaaaagttttagagcaaccagcaaacagagcttattggcttttgccatactgttttggtcatatgttccagatataaatcatttcaattgaaatagaaacattatcactgtgtacaatttaattgtacatgtttgagaatactttttactgtgaaatcacaagtgaggttgaatcagttctgttaacagtttgaaatgccctctttcccttacgtaaaaggattgaaaacatgaacaagtcaagtctgaaatacacaaaaatggatcatatattactaacacttttataacatagaattcgaggacaatacatcatgtgatatttttttttacaattttgttatataaaaaaacagggatgaatatatatctctagactagagtctccttttttctcttctcttgcgttgttgtcataaaatctctgatctgaagtcctaactcctaaatttatttgctccctcaaaattgttatacgaccaaacaatgaggattttaagagatgctctaacctactaacgagatgaagaaggaagaagagcatcaattccttttttcctagtgataccagttggcacaccataacagacaggcgcagccccaatcaagtattgcaagttgcacgcatctcgagccgcggctatgaatgaaccgattttacgtctatgcttgtggttgcactcaatcttccctgacccatccacatctgattgagctggcttgttacgcgatgatggtttccttgacctcttggtgccttttagagtcattgctgcaaggtcattagctaatgactcacattggctgcagccaccctctgaagaagaatctgacctctcttgcaaccatgcttccaacaacgctttcccaaaccgatcaatgtctcggtctgttacgtcccatagagtcgccacaatggctggagatccacctaggagataagaaagtggtacaccttgtgggatgtagcagccttttagccatagtgaaccactactgcatcccattaagaaagttgcagaacagttatctagcttctctatttcacgcctaggtatatactgtgctcctgtcgtatcataaacagtaaaggatttttttttaaatcaatctcatgtaaacaaccagagacagattaacgattaaacggttcagaattcaagtgttagaggaatcataccgcttccatgaccaaagtatagaaagagatcatgagtttctaatgcttctgtcaactctatagcacttggttctgacccagctttaccctgaagtatacgcaataatggaagtttggagataaaggatcacaataaggtttaatataagtatgcttttgctatatgttacctcaaagttttgatctctgaaccaactctcaaacgtgacttgtgtatcggtgagatcaccaccaggattcaacaagtaaaatgaatctagcggatcaataagagggaaggaagcaacatgagattttgctggctctccttgaagactgcgcttctttagcacggcagatatgcaacctacggaaggcatgcggtacacctcctgtttccttagtattggaatattctcccaaggaagcatctaatcaaaatcagcaagttagtaagctaagaatagcaacagataaactaagcagaacttctcgatgacagtcgaactttctaatacatgtgcaggaaagtgataaggatataattgacgaacctgaacctcgggatctaacacaagaatgataggttctctattttcatgtccatcttgttgccctagtttgcttgctgcgtcatgtatcagttttaaggccaattcatgcctactttcagatatattagacgcagcagtaggagttttacagctatcttcttcataaagatatccccctctacctacatagcaaccatttcttaaagaaagctgagcaacgcatgcttctcctttaaagttatccgtcccacctccaagaataaccttcaaaagcatctcatttacttccattttgcacttggacttgagatcatttaccagctttttctgcgctgagtcaggcaatttgtagttcgaccattctccgagaagcagacacctccagggacccagccaggaagcttctagattcctagaataaaagaatggttatccaatgttgtttacaaacatgcaggctcgtacgcagttgtcaattcagaagatggatcaaaacacagtcctgtaaatgtaatatagacagacatgtgcacgtgttatagaaagagagccagcataccttaggaatattcccagacgatgattaagtttctttctctttttccaccacaggcccctactctctattgtgtcttcttcagtagtagaagaagatgagtggctttcctccaatattgatttaaatgctggagctacctcatcaaccacggtggtaccccatggacaaagccagggcccctttaaactcttgacttgagtcgcttcggtagagctaagatttgcactgtcatctgacatgtctagtgaatcagtgagatcatgagtacaaagaggaaacaccattgatcaaccagtatgcagttcatatttaccttctacaatcgaatctacaggtaaaagtgtggcaaccggttgactttctgggtttaggcgtgatatgagcacccaggcacaaacaggtgaacgaatatgcattagctcctgtaacaattggtttaaagcacctccaagcaaactaatgcagatgattgttgagcttggaagattgatgaaaaattctttagcgaattgtacaagatcttgagtacggtcaggagcaagcctgcaatggcgagtaagagaaaacagagtcagccaacagaaaattacaaaagcatgtctggttgcttaagttaaattatctcatacctgggtaagtccaaatcctcaggaaccatgcaactcgagcaagtagcctctgtgcactgaaaataaaagccgtcagatagaagatgaaacacatactttgtaaaagcaatcaataaatacgtcaaaatatcatcagatagaaagctggaaaaacctatcttacctctttatctgagaggcactgtgatttgtgtttttggctcaaatttgaaatgaaatggtaactgagatgggtaccaagcgaggcttgatggaaaaatgagacccaatgacttgctgacagctcatttccatcagattcgaatgtgaattcagaatttgaggaagaaagcagatataaagaggcaagcaatcttgaaacctgtcgggaacaaaaaacagtcttatacccaacaatagttaaaataaaaacaaaacaggcaacgacaggttaccgtcgaacatcccaagcttttaccttttgaaataatattggaacctctccgctgagtacaaatgctaacattaaccatgacactagttttgtgaaagggatatgaaacagatcacagcagatagacctgttgaaggtaacaatcaagaggttaagaaggatgataggtacacatttctaaagagcatacttgatcaatttagcatatgatgttttgcatcagggaggacaaaagctaatggcaagtgttatacaaacaatatgtctcacatacctactcttcctgcagtggtaattccgcaaattcaaccagcacaagttgtataatattattgcacgatcaacggcaaatacatctcttgtaacttctttcccgataaattccagcaactgactgacagaaggctggttgtggctggaccaggtgcttttgaataaaacagagatactatgcagtaaagcctcatgagctagatgaattctaccagagtctcccaaacattttcctgaattggaaagctaaactgtaagcagagatactcatcttctagcaatgcttcgtaatcgtaagtgagacgtgaatatataccatgtgtgtgtttttacgagaataaatggtcagaatacaaaagaaaagcatggaaatggagaataagaacaaactcattggcctcaaaactcactccaggtctttcatacccattacttttgttttatcaacaatggacgactttaatggttactgggtctcagctctcatctaaactattaagctattagattgttccaacaggaaaatgtcaaaaagccaacttcatatgcatgcatgcgcatttgagtgagaaaatgcataaggaattagatcataccaaggctaacaagtattgaggacgcaagcttcctatggcagagttcccatttcaaacttactaaattgttgagagacccagattctgttacttcttccgagaggcactgctgacgtttttctttgtagcaaatacaaaagccagggagtgcattactcgtgtccaacaaaaccctttcacccctagaaccaacagatctatcacataaattaggcttctttgaaacaacttcaggcacattagaacggttttggcattgctctctaagtgagtgacgcatagatcgagtcaaccttgatgttggctcagatatcaaatcctgatcctttgacaaacaagttttgttagctcttccacccctcctggagcctctgtttcctggtggctcctttatactgagctttgttttacttgaattatgtcctaaaccttcccctccatttctatcaatcactatctcctcagcaatttcttccccatgtgatctaatgcagcttttccatgctgagcaacagaattttcccagggcagcactaaacaagctttcagcatgcaagaatccatctgtctgtgaaactctatcaatttgtttccgagatatgtctccaagttgtttatccaatgtaacttccaacttcagtttgcactttacgcaagaaaaatctcgctgattagcaattaatatctcttttgcattttggagttccttttctgccagatccagacactgctttttgtggtatagatttccttgtgagattaaagaagaagaacaaagatcaagcagcttattaacaaaaggaataagaaaacctacaagaagagactgtactgttgaattaaggagtaggttcatacctaaggcagaagaaaatgcaactacaaaagggaatagactttgcgagcatgaaaaggctttcccccatgatagaatggtttctgcctccagtccattccctatgagctcattcagaattccaacctgcaaatttgacaccaaattgagaaacagaaaagtgatggaaccccactagactagaaattctgaacagaaacagaacctgaagggtgctttccaaataacattggagtacactccaaggacttaggtagcagcgattgatgtcccagagaaaatttccacatggccaaaaatcagttgctaacaatctgtagacttggaaattttttatgctaaaagtccgtatttctgatattttcccatcttcattgtgtttttcgatatgcttctcagctgtatacttaaatttatcttgaaatataagagtccttatcctataggcttcttttgcatatgaaagagcctgcaaaagaaaaggcttgaacaatcaacccaagagattataacaatgaaactggaagtaattcacaacaaaacttttgtggaaatagatgatatgtataactattttacctcagaaagttttccaaatgatatgagcctttcacagagatcataatagagatatgcagctgcaaaagatgaattaccagagagtgatgcctgcaatgacattcattagcaaaattggataatcaccgtagatattcttttgcgaggaaaaacctctatataacttaaatttcttacactggagatgagttctgatgctgcatctttaatatcgtcaattgtgatgtctgattgaaagggaccttcatccttattatgtaaatcatggaagttctgctggaacccaattaactttgcttttgaatctttcaggcaatccatccagaaatcaatgcatgtggatttgtcagcacaattctctgataaggtctggataaaggcatcacttatgggggaagggcataaggcatgactaagccttctacattcccacagcattgcaaggcagacctccaatttgacattcttccatttaaacaatctgaaaatcagttggtatatatgatgatggagctctgtacatccctggagatggaaaaaaagtatcaagggccagatagatatgaagcacgcactacaaagtgtgccactcaaaaaacatagtccaggtagataaaaggaaaagagataccttcactgacatcaaatcaatcatattatacagtaacggaattatattctctgttggtagactgtctccactatcatctaggctaagaatccttagccagagatttagtgaagtgctaatatcttgaaagactttctgcacaaaagagacgaggcaaaatgtttcaagaaagataaattaaacagtgaaccacagttcaccagctatgtaatacgcatttgtaccttcgagtttgggtcagcttcctgggtacaaaaagctctcaagcaatacgcaataggtaacatgtgagaagatggagaaccctcttcatttggcccatgatgtaactcaccctgctttcatacatacgaaatttggtcagaaaatatacaagcaattaatgggctattaattctgaaggtactaagacatataccaatatagagattgcttcagacagaaaacaaatgcactcggttatatgttcagttccagatgtccttgtcattcgtgctttccatatcaaaattcttgctctctctatatgcatatcctcagtgacataaacatccttcaagaggatatctgctatcttgattcgcgtttgttgacctagatttgaccttaaaggtaacactctgtcataggcaagaagctcctgcaaacatttacagaaaagagaaatgaaaaaacaaacagtatcaccaattttacatataggaaagtacatccaccgataaaaaaaagggaatttctagtagtgtggccctgcaatttaggacctgcgtaaacttttattcaaacattaactgaaaggttgttcagatcccaacctgctcaaggatttttccgataccccgctttgactttttttgagaagatgataacaatgagtacaaagttgtacaagaacctgccgcatccagatccgtgtgacattcccgctctatctgttgatagcccacactcagatacttgtagttcaattttttcctaaaggtactttatcaaaaaaattaccttaacccattgctttacaattgcctcagggcctggtaaccgtctaatcagatgttcagctgacaaccaattttctagaatatgaacaatattctgtctaatcttacgtctgctacatttctggagtatatccaggtagaatgcacacctattacatgcttcgcccacaaaatccataatggcatcttctgacaagtcattatcagatgaactagactgatttacaaacatatgacaatgtagttcaacacatctccatgataccttggagcacagcttaagcgcctcacaagcctgcaaagtagaacacttactctataaaatgtactatgaggaaaagaagaagaagaatatatcatttagatgcatggtccacacaagtaaagcagaagcagattttttaaaatcttatttgcacagaaaatctataagacgccaaaaagcatgtactctaccttgtttagctccttatttctgtacaaaacgataccaatattgtacagcgtcgcaattagatacttgagttcttgagattggatccatgggcttccaattacatcctcaactagatgggcacttatctgaaaaggaagatgtttgattactaagttacatttatgatcgatcacatgttcaggaacttgaacagtaaatttgccattgatttgtatgcattgcatataaataccatacctccaatttaagttgggttctcaatgagacaatgaaagcacccatagccgcgtttaagaaagctttgttattggcaatttctctatctcccttgtcagacgtgcacctaagaagagggcacaagagatgtgagaaatgcattcaacccacaaaacaagattttcacaacagaatttatattgtttcctctctctaagtgcactgaaaatttagacatcatcccacctgccaatgatttgcgtattaccatgatatataaatatatatatagattggaaaaaactggtagcaaaatgatgtatttaaagctgcataaaaccaacaacttaaaagaactatcttctgaaatcctcccaaatatatttaagttattttcactatgcgacaagcaaaacaatcgtccgatgaagagcacgacgtagaactagaagctacagattatagcataagggacagataatgatcaccttacctctgaaggaagagacagccatcacaaaactggagaaaggcatcgtgaatagtaattagatgagcagaggcgcatgacatttctgtctccagcacaatctttcttttcacagaatatataaagtctgcaagcggttggcacaagaatttcaaggcatctacgtattgtggccaacaagtaatcttgttcctgtctttacagctatcatgtgttttattgttgtagttcctatgcccaccaatcgatgatgaaccagtctgattgccctcatcacctgagtaactatcaaccatgccgagtaaagaaactaagctttgccatctagcatcatcatcaaacatagcttgaatcttccaatcatctgttgaatcttctagcttaatttctccgagcttggaattgcaaaccgtgatggacagcccggtcgaatacagtctaagaaccaaattaagttggggtattgcctgccaaccagtcaattataaattaactcatacaccaagataattcatgactaagttgaggcaagtttacatgccaaggagagtaaaactacctctacgaaaatagctgccatctcattcaatttttttgaaacttttgcacagtacatgtctcctgctgctcgaaacttgtgagcgcaataatcgactaggtcaaaaaactccattaaattctcattactttcatcctgaaaaaggaacactgttataaggcattggaagtttgcagtaaaacatcaactgagaggctagcagaaacctaaagtcatccaatctagcaaaagataaaggagcagtctgtggaaattgttactcgatgtacacaagacgatagataattaagatgcaagagatttgtgcaaacctcaaattggcaagataagctgcgcaacacagacattgaaatgtcaatggtcactgacatttttctatccttaaatccaaacagaacagaaagcacctcgcgagcaaactggaaattgggcattagattttattatctattagatgacagcatgtaaaagaaaagcagccgcaagaagggaagacatcaaaggacaagggtcaccttataaactcgatcttttgataatgcagatttataatgttccttcacagttaagtcgcagaaagaaatcactaaatccccattgaaacgctcagcttctctaacgagagaaacagcacatttacccatacttgtcaccatcgctctgtgcaacttttcatacaccttagcatctaagaccctgcacagtaccaaaattgaagcagcattggtctactactataaatcatagaagaaagttaataaaccctacactacactgaccttaaccagcctccgacttcctcaagcaaaagaagaactttccgataccgcttatcatctaactgctgactcattgccacagccctaaagatggccgccacagcatcaacaacaactaaagccatctccgcatctccatcctgaacctccggcaacaaccgggacttccgggatttgctatcagagcctcttagcttctccagaaccttaaacgcttcagtatacacattctcatacaaaccccaaacatcgagacaatgaatcatccttagcctctgagattgaacagtgtgaggcttacaagctaattgagcagagaccaattctaaacagtccaaacaaagttcataagcacggaacagatctaatgctgattcacgagcttccttatcagaattcgcgacggagagacgtttcggtaggagagagatcgatttgttgaggaaaggaaggaattgcttagctagggctcgaatcgtggttgctcggtcttgttttttccgggaagtggatagagtagagaaaggtttaaggtaatcggagaaggaagagaagacattatcgccgacgtcgatgagagagagaagacggaggtcgtcgccagaggacgccattgatttcgaaattttgagagttcccgctaattgaagatgcacattttctaggtcttacacagtttcagtcacttctaatttcaaaatctcattcgttgattcacactttacttgtagactgtagttaccatttgcagaatcgtagtgaagaatcctaaaccctctagagatgttctttcgcggtatccactgggctcgtgtatgattttaaaagcccattatgtttttgaaaaaggcccgtttttgtttaagcaggtttacagcaaagaataatttagctactgcctaaaatcgaaccacaatgtaaaactaaccgaactaaaccgaatcaaaatccgaaaatggtaaaaaaaactgaaccaatgcggattgagattatatggttcacaaattaacaccaatcatttgtttttgtcaagagctttcattctccacttctctttctcaacaaaatcagcatccaaaaacctcgacacaaactcccaaaccttaaaaacatcctcaaaattcgtcataaaccctcctaacctaacagtcaccactgacaatctcaagctcacagcttcatcacttcttctcttgtttccaatcctaaacttatgcaaataagcgcatcgtaaaccaatcttttccctctctgcaagcctctccaccatcaaaggatcgactttttcgccttgccaatcgaaaatgttgaaagaaatcgacggtcctcggcttggttttgtctttggtccgtagagtttgaccagaggcatctctgtttgatgatagcctggatgttgcagagtcctcaaggctcgtagtaaccataaagtcaacgactttgaccttctactgattagtattagtcctagagaatctgcgtgatctaatccttgaaactcaatcattgctttatcttgtttaaccgatgattcgatttcaactatctcagagctagaagtagaagctgccttgtggtcctcgtggtccacaggggtaatctcgttatatcctgcttgatactctgttttccatttccaagatggctctgcttttactgccgtgagattctccggattcgttggttcctctgacaaagctgtagagctagatttcttaacgaacaagcaaccgaaaccagaaggatcatcttgacctaaaacctctgtaaaagaacagatgaggaaatctggttggaacagagaaagccctaaagtttccatgtctttagaacctaaagcagaggtatcaagcaacacgtgccattcgctttcgcgagctaaactcatccatgagtaagaatacgaagctcctgtgaccagagattgaagtggaaacacaaagagtcctcttttacctcttctcttacttctagtgattctcctcttcagtttctccgatagaatctcagtgctcggccatgaaaactcggctgattggggttttataccctttttctctgagattctgatcatttcttcaactgcttcgtcttcgtagttgtacactgtgagaagattgggatttgttttgaaagagtaaagttctgctacaatcttgaaagcagaggaacggtcttgagttagaatcatgtgatattcagattcttcgagattcataaaactcgtgattcttttccttatccttgactgaaaccgagattcttcttcgaatgataacagttctttaccagagcttacttgcttgcaagacaaggttaagagagaatgattcaaatcggattctgattcggatatttctcgaaactgagagtaagagaacaagggttgttgttgaccaaagacgtgagaggatgatgagaggttttggtactctgtagaacggagatgatcggcttgattcgtctgcaagtaatctggaaaagctgtgatgagatcgtagaaagatgtacggagacgagggagagattcttggctggtgaatttggtgtttctggtcaggaaagaagttcctgttgtggttactgagaactcgagctcttctggtttctcagacatggaatgggatgagaatggtgatgaacagcagccattgaagcaagcttctgaagcttcttgtatgaagtgtgaattcatctttttctctacctctctctctctctcctattcctctgtgttttgtctggagaaaaggtaagacttgtgagttgtgtggacatatgaagtcaatgagattaaaaaagtgaatatttgggtccttaaaaaaagtattgttgttgtaatataaatgaatggtcaatcaaaagaaaagttgttgtttttaggaggaaagggaactcataccaaattttgcttctcttcaatagttgaatcaattttgttttagacttcaatttcgttgtgaatattgaatagtagtcattagtcaatcaatcaaaataaataaataacaataatgtatgaaaagaatattataggctcacttacgttgatgattaaacagagttgacttctctattttatgggtcttacatatattatttcgatttgagtagtagtcgtaatgagaattgtaaaatatgttgctattaagtgttgttataaaaaaaaatcaatattggtttatgaattttaaacggccagatgtttattgaccaatggccactaaaagggtccaccggagaagaagataaaagtgcttgccctaatttttctctctttcttgtcccatttgtttatgatatctgagtgattcaaatttagttacaacacgcagtcaaatttatgctcgtttaccgtattaataatacatttaaatatgaataaccaggaaacgatgattgagatacaatctctaataacagaaagttctatttgtttatgtcaaatggggctatatatgttgatgaaagtggatggcatttttcatgcacgtagacgtagaacctcgagggcgacgcgccttggacttggtcaatatctttctcattcttgtgtttacattacactttaatcattaatgttctttacacttatcacaatcacacatctaatgtatgtgtgtgcgtttatgcatattttacgtgtccacatatatatcatccactcctgactccactaccatgggtgtgtcgatgttgggtggtacaaattgctttttttttaatagaatagatatagtgtttgattaattattgaaaagatcaaactgtatactagtggtttgtgtaagtgtttcgtattttcatttggtataacataatttagttttcattataaattgcatattattgataagaatcaaaaagtgacttagggaaacaaatattttacgataatgaacaaatatgtcacatctttaaagcaaaatatatcacatcatcaatatatcaagatttatggttgcataataataaatcaagtttatgaaattctgaatctactaaaagattgtacaattgatatatatgtttcttaactaattaaaccaacttgttcgttcgaataacaaaactttaatttgaaactcctggttacataattcccagagacatttattaacagtttacgaaggaggagatcaccagccattctgaggatgtgatcgttatcttaatcaggtttgaacaatcaatctgaaacaacacacgctagctatatccttaataattgttacgtagacatatatatgtatatttttggtcaactatgtatgcatatatgtatggagtacatggagacttaaaattatgaatcatgagacaaattcgtgtggatactataaagtagtatatctttataagaaaataagaaaaagtgataaagaaacacatggaacatttgctagtggagagtttcattttcaacgaaccaaatcacaagtttattatgatttttatgtttttttggcgttattattatccgtgtggtatccactatgatcacaacaaaataaacagaaaaaccaagaaaaaaagtagaaagcgaagaaatttcaggaaaaaaaaatacagttttgttacatttcgaaatatgatatttcttagaaaaaaccatcaaaatactaaaatcagctgatgtgatgaaatatcaaagacaaaataaactaattttgaccgatttagagtgcgaggaaaagtaagagctgaggtccattacgcaatattgtcctctcacgtgatcgattttgtattaagtttgcctaaagagcaggcaaattgtcctttttgatgtgtgacactaaagtttttagtcaagctaccctatttattttataattgacatctaccttttggttctaattttcttttgtagtgcttagtgcatgaatattagctacaccgtttcgtttggctcaattctgaatcaattgtgttgattttgttaacttatttaatgaactcgcaaaaactaaagtctgaaatttcctctgacaaaaaaaaaaacactacaatagaaaataagtaagtagttgaaaagaaaacaagtaaaaaataaaaaaagttatgttgatgatttttagaatatatattcaatttgggttttatatcaacctcgttgactatgattaccacataataaacatttacatgacataaaagagctttatgaatttatatcaggacataaacaaaactattaacgcgggagattaacggtcaaaatcgttagggtaattgcatagatttgatttattatggggtaaaatttgtaacaagagtactaatacaaggagttataagtaaaacaagtagctacgatggacaaaacacaaatgactagagacggaagcagtgtaacattcaaaagcatattccgtccaaagaaaccggcgacggtaatcgtcgcgtcagcaatcacacgtgcgatcgtgccagcctccgtcgaaagcaaacctccgttataagttcctctcgatagcctcgacgacatgactctcgagagtaacgatagattgacacctacaaaaaaacattccgatcttgtggttaaattaaaagaaatagaagttttggtcaatttatgtaatgtgaatcttttgttaaccttcaagaacttctgcagaaacaaacatgatgagtcctgagcaaacgtattgtggcacagtgtagggaacaacgacatggaagctcagaagtattcctacacagaccataatctccgagaccaacaggatttgcctgtgacacaataaagtttatgactttagggaaactttgaggagaagagatcagtaaaaaaaacagagaaacttaccggtcttcgaacatgttgcttatatagcttccaacgacgaggttaactggaagaaccgtgagaccgagacaaaacaagaagatcgcaacagagctcgttgaccaaccaaagtagtaagtggtgatgacactagattcagagagaagaatctccattgcatacttgagcatgaagtatatcaatagttgaacctgaaaaaaacaatcaaatcaatcatcaaaattgcaaacttacgttttcagtttctcagaagtaaattttgagtctctatttacttttactgaaggtgtcagtaatctataagcagctaaaatggagtttgcaggtgtacgagaatcctcggaagcttcttcgcttccatcacattcatcttcaccctgttcttctatctcttctgatgtaagcagaagtggttgtttcatacctttctccagattcacatcttgaacagcttctatcactcaaaccaaacacacaccgctacaattagatatcgataacttctaccgatctaccaaagagaaggattcaggacatagacataccagagtgattagactcttctgaagtcttaggaatctcctcaggctcacgtgcaggctcacgaaacgatatagctaaccagaccaagtatataagccaagctacagccataacccaaccaggcaatgtatcttggttaaatgtaagtttatagatcttgaatctaatttgcaatagaccagcaagcgcaggaccacacgccattcctagagcacttgcactaacaaaacccgcagaagcttgcatcctgatctttaacggtacacagtcgcttatatatctccggttcactgctctcgccgatcccaatctgaaaaaaacagtatgataagaatataagtaatccatcaagaagtgatactatgagcattttgaagtctaaagagacttacccacagaaaagccgcccgatcaagagaaccgctattgaattgaagtcaaaagctaatgcatataacaagttcccaatgaagagaacaatgctactgaatatgagtggtttgaagtaggatctattggaccaggcactgaagtaaaccgaagagaagagctgagctacagccatagcaccaatcacaacaccacacaccgttgctgctgcaccgaggctcattgaatagtcatctgctgtagggacaatgatataggtattgaccatatagagaaacgtgttgaccaaattcaacaagagagacatgaagtgatatctcccatcttcttcttccccttcctcatcttgtggacttggtaactcttcttgcattataagcgcgtgctgagccatgaagtgtagaaagtttgttgaccgcgttagcctatccactgccgctctaattgagtccactacaggatcttgaagaggaagaactggttgatcataaatcgataagtagcttccttgattgttttgaagctcatgaaggttgcgagatacggctccaacaacagctccaaggccctataactcaacgttaggcttggaaaaagaaggatacatagtcatttgtttcatcttaagacttaacttaccacatgtctaaagacttgctggagttcagagtaaggatggttagctctagtcttgacataatagtttgtgaatcgataaccaaaccgtttgtcaaatttcttcagtatcttacggataccaatagcattcatctcaacgaaaaacaaaagcttgagaagatcttgcccaacagctctatactcttcctttagataagacatgtgggatatgtctggctgctcctggagagcatcgtgtgatccccttagtgtctgtagcctgcttgcaagcaacccttgttgctccaacatgaaaagagcgattttctcgatctagtatgcattcattttcaaaattagctttttataaagctccacacttttatcttcacagacactaaaggttgttgttacctgattatcaagcatccttgagaaatctttaagaacatgacggcgctcaagattgcctccttctaattggcgactatattgcttcactttcttcttcatcaatttgtaattgatataatatctacaagcgatcatgattaacattaggacaaacatttttacgagtttttcgaaaagtttatcgagaaattacccttgccattcttgaatgctccgttccttgagttttttcccgaaggctaccatcttctacactgaaagaaagtcacagagaagaatcagagataaaagaatgatcacatacacaaaactttttgtagaaaggactaccagaaaaagtcttccacctttctatatcaatgaactatgcagtgacactaaagtttacactgagacatgttgctacaagaaaaaaaagattcgagattgattgatgtgtttcgagatatatcaatattcatgattcaagagtgttatgtgttgatttggtcaaccagattctcggtttcagctaaagagtcaaaataattcacacaatgagagaaaggagaagtcaaaactacacaaaacatttacttaattgaaaagttagaacattctgataaatgtatgaacctcttatcttcgtcgttgcgttcttctcctagttcttgatgaattcagattctgttcaatccagctaagtaaaaagcaaaaacacgacaaaatcgaaatgagcgaaatcgcaatcgtaaacatcaaagagaacagagaaaaatcttcttaatttgaagaaaaccccacaaatgaattaaagattgaaactttaacaacctctgtgaacaagagacgagaaaaatctagagaatattacctctaaagttctcagagagaaagagaggtagcccagatatttctatgtcgcaaaattgtaaatttttggggccgctttctctaagctcagcagatacattagaaatattattttaatgagagttgaattgggatacggtgagaaaggaaacaaaattggagaagaaaccaaaaaaggaaagaagaagaatcagagagtggctctgtgtaatcacgttcgaagatttttatatacggtttataaaggaaggaggtggaagataagagtttgctgcatcactgtgcattgtggggtctatcttcatttgtcggaccctttcttctggttattgagataatgaattatcttggtaatagtgtacattctgttaaatatgattttcatgacggcaaaataaattcagaaaatctcattctctatatattacagaataataaaactgaatttggcatcaagaggtgtagtatcacatattgaagaagatagacaagtttgaatattagcttcacgaaaaagaaaagaaaaaagatagatataagtattatgcaaagttattaaataattttgtttctttttcaatatttttcaatctttcttttctaaatgtaaaacataagtaaatgtttttacatgatttgtctcctttcctagtatagaatctaatctacaatctgaagaagatggtatggcctagtatccctttttggttttggcatacctgaagcgtaatgtcatgtggtgtaatgctttactctaattacccttactctactcttttgttttacaacttagatgactctctagttagataatctaatcttgtaagtggtaaaagtgtgtgtcaaactttgaaagtggatgttcttccactgttgtatcgtttacaactgctgtttttaattaaaagggtaatacttatgagaaaaaaaaagaatctaatctacataatcgtgtgttgctagctcgtccatttactaattgtctgatgggaatatagatgaaaccgaggttatggcatgggatttcacgggagacgtattcttctttcttcacattatttgtcggattgagcatgtgttatgacatgagtaaacgaatcagagcatcttcaagacaattagggtgtgtcactttgaagattttccagacgttcaaatatgatttagaccatacgactaattttattaattttggtcaaaacaaatagaaagatttagtgaaccgtgtctcatgaaagatttgcggttttaataaacgatctttatagcgagcccaacgctctatggtgtggaagctcataacttatgcttgagtttttctcaagttcttaagaagaccaatattgatttatatatcaaaatgaattctataataaatgttttattctctaaaaagtattttcattttgtttttggtccattcatttttgaaaaataatcgtttcaagcatatatacctttctaatcccaacaaatatagacatcaattcatgaccatatggtccatgagtttcttactttcttgttgtcatgtcgtcattcttagacatctcttttattttattataagtggcagaaaagaaagaagaacatctctggttactactcttttttttttttttttacaatttataagaattatatgtgccattggttttcacgtggtcggtcttgtatgcaccagggtgcatgaatgggaaacgtggtcccgtgcggcacgggccgtgcctccattatggcattatgtaaaactaaggatgatgatctataaacctcaaaaatcaagttctcttgtgcatgcaacaagtgtcaaatactttatgtgattttcacacgaactttcctgtccatataaagtagtacgaaatacaagagcaaaactaattatagagcaaaacatacatgtatggcattaatttcacaaccctgaagacatatatgcatatgtgtgtttgagttgatttacattttctcaagaattcacacgtataatattggatttgaattcgaaaaatgatgtgatcaaacgcgtctgacagaataaaatgtgatacaattaacttctctggctcgtataacaacggtcctactccaattaatgtagttactggccagtggtgccgaggtacataattaaataaattcatatatgtaaactatttggtttcataaaccacctttgaaagattttagtgggtcctcaattataaagtttagttgaaaatctcttatttctaaattaggcgagaaaataatacaataatacaacagttttagtaaagtatctcacacagtagcccctattatatcatcacgtggacaatttgctaacgtgaccatccaatgagtaaaacatatcatcactctatacgttcgctttcggctttccaataaatttaggggacctaataagactgtcggaaaccatttgtgttatgtagaactataattaagcatatgtgatatgtttggaagtatacaatagtcagtgtgtaaaaactagttgtaatgatatttttgcagagaccaaaacaatttcgaaccaaactgaactagactttttattacatttgtttacgcaaagaaattaacggtattaaattaaaagaagaaaaataaacaaaatcgtttttaattactgttggtaacttttagtcgatgactttttgtaaactaatgtaattaatgaacagtattaaattaatttaatttttaagtttgaaagttgctatattgtaacacaaaaaatctgaaatggagtcgaggagaataaaaaagattctggaatcaggagattgattcctttctctcccacttttgattttagaaaaatggtgattagctatctgctcatatccatctccgaaaaaattggtgcttctcatttcaaaaccacattatccgctttgactcaccaccaaatcaaccaacgattaccatttttcgaatccaatctttcaaaatgtatttcttctagtgttacggcgatttctgggaatgatcatttaccattttttccgactgaatcgatcggagaattccaatcctatatataccgagcttttgcggttttcgaaggtgcgatttcgaagtttcgtactatttcttatatatcctcaacgtaattgattgacattagtatgattaatgatatgattagtgattgaatcagttcttatttatatatgatatgaaaataactattgtttgatcgctataagatttgttttttggtttattgagcagttcagagatattttgacagttgacaaagtttaggtagggcctgtgtgagtgtgaagatgcaagaagatttttgttggcatttaagaattgtgaggaaatatcaatagcacttatatatgttagtgtgtgttgttgatgatttttttcaaaagtggtgaactttcatattactggtgaatcaaatagttggaatggcagatagtagaggaatcatgattataaatgttgttccactattagaccacactgtgctgaatgtattcctttcttgctttgttctttctctaggcacaaggttttgtctgctgaaactgggatgttgaagttattctgctaaccattcttagtgctgtcaagctttggactgtcttcaagagttctaaggactacaggaacctcgagctatgggctctgataaaaattctgctcgttttctacataacctcaagatggagagggtcagaacgattttaacccatacttacccgtacccgcatgagcattcacgtcatgctatgattgctgtggttttgggttgcatgttctttatttcgtcggagaacatgcacagcctcgtagagaagttggacaataatttcaagtggtggtccatgtatgcctgcttgcttgggtttttctatttcttttcatctcctttcatcaaaaagactatccgaccaagctactcaaccttcagtcggtggtaagtgaatatcttttattctgtcttccatggggtctatatcaaaaaagatttaacacttaaaaggttttgttgtgtaggtacattgcttggattttagttgcagctttgtaccatctcccaagttttcagtcaatgggtttggatttgaggatgaatttgtccttgtttctaacaatttacatatcatccatagttttcctacttgtcttccacattatttttcttgggctttggtatattggtcttgtttctcgtgtggctggaagacgcccagagatcttaaccattcttcaaagttgtgctgtaagtatgctatccccaatcttgtagatcaaggttacttgctcaaaaacattattcttaaagaaaaatcaaatttcagtgtcctttatcttgtgtaggttcttagcatatcgtgctgtattttctacagccattgtggtaatcgtgcttttcagagacaaacacccctcgagaaaaggcattctagccgtttttcattatggaaaggagaagatggcaacagtacttggcttgcgaaatttactcacattgatgagctaagagaccaagtctgctcatcatggtttgctcctgttggatctgcacgtgattatccattattgtccaaatgggtcatctatggggaggtcagggtctggcttctgttataacattctaatttgttgtgtacgttcttatttgaccactctctgttgtattcctaccttttaatctacagttggcatgcaatgggtcttgtcctgattcatctgatgaaatttctcctatatactcgttgtgggcaacgtttattggcctttacattgctaattatgtagtggagagatcaacagggtaagtgtcaagctgtcagcttgggcatagttttttgttaaatgaatgttgtaaataaaatgattactgtttttacaatgataatgtacgttttcgttgtacggttaggtgggcactggcacaccctctgtctgtcgaaaattatgagaagttgaagagacaacaaatgaaacctaatttcttagatatggttccttggtattcagggtacgtctatgccaactgatcttttttctttttacatattttagcatctaccaatgtcttctttaaagtaggatacttgggctgatctgtctgattttctatttcagaacttcagctgatttgtttaaaactgtgtttgacctcctcgtatcagtgactgtctttcttggccgctttgacatgcgaatgatgcaggtatactatttcttatactgatgtgataggatctgatccttttatctttcctgatttgcttattatattgcttttttgtaactttccccatttttaaatgtgtaggctgcaatgaacaaagattgtgatggaaacaagagcaaggaacttttatatgatcattttgctgataagactgacttctggtttgacttcatggcggatacgggtgatggtgggaattcatcatattctgtcgcgaaacttctagctcagccttttatcaatgttccgctagataatgattctatatctctagaaaggggtaacatactgcttattgggggagatcttgcgtaagattttattacctgtgatttccatattctctgtttttttgtcaggtctgaatgtaacagaatagatgtctttctctgatattgcagataccccaatccatcagcgtttacatatgaaaaacgtctattttgtccttttgaatatgcgctccaacctccccattggtataaaacggactcaatttctgttaacaagcctgaattacctgatggggtgtctgatctaaagcattatgacggtcctcaatgttttcttatcccaggaaaccatggtgggtttcagctttaaacttcatttctctttctagtgatatgtttcacataattacatgcatacttggtgtgtcttggtattgcttctaattgtaatgttattactgaactttttagactggttcgatggactaaatactttcatgaggtatgtatgccataaaagctggttgggtggctggtttatgccccaaaagaaaagctattttgccctgcagctacctaaaggatggtgggtgtttggtttggatctagcgcttcatggtgatattgatgtgtaccagttcaatttcttttctaaattagtgaaggagaaggtagattcaacatcatctttctttctcaggctaaatagactttgcggatgctatacaaaatatattcccatcaactcgagctcttttcttcttttgttcacaacttatgatgttctgtgatattggttttgggtttttctttggtttgtgaaacgacaatattagagttggtgtcttctgtttgatactattgaattctaattttgttgctttgatcaatgtttttatcttttcatttaggttggggagaatgatgcagtgatcattatcacacatgagccgaactggcttcttgattggtattggaaagacgatactggaaagaacatgcgacacctgatattcgaatttttgaaaggaaggtgtaaacttagaatggcaggagatttgcatcattatatgcgtcattcatgtactcaatcagatggacctgttcatgtcccacatctccttgttaatggctgtggaggggcttttttgcatcccacccatgtgttccgctgcttttcaaagttttatggtgcttcttatgaaagtaaatctgcctatccttcatttgaagattcaagcagggtaaactttttcttgtttcttgaacctcttatccacggttactgattcgccttcttttctttgcattctgatattttatgttgtttgctgttatttgcagattgctctgggaaatattttaaagttcaggaaaaagaactggcaatttgatttcattggtggcatcatatactttctcttggtcttttccttgttccctcaggtgcggttttacacatctttgactttatcaaactctttttcatatgaactgtttcttgtttctccattttatatttattttctcagcaatgcagcctgacttggtcattaagacttttttgttaaaatggtacacattgtcagcatccactattaaatggtcaaactgagacaggccttgcatatctgtagtagtgtttttcctgtgcgaagaaatttttatgctcacttgcactcacgagaaagtttttatcttcattccttgttggtttcagtgtgagctaggccatatcttacgaggcgattcattttctggccacttggggagtttctttggcacagtttggagctcctttgtgtatgtaacagagcagtcatatgtgtctttcaccggggttcttatgttgctaataactgcaattatgtttgttccctcaaaaatatctcggaggaaacgactgttaattggaattcttcatgtttctgcacacctgatggctgctttgattcttatgttgctgttggaactcggcatagaaatctgtattcagcataagctccttgcaaactccggtcagtttcctttccatagaatgttgtggctttcctcattacaatgtcattgacacaagtggacaaaaaatatgtgatcctactttaattgatatttttttgtatctgtgatcaaaccttaatggattttgagattttcaaactttttgctacacagggtatcatacattgtatcagtggtacaaatcagtagaaaatgaacattttccggaccctactggcctccgagaccgtattgagcagtggacgttcggattatatcctgcctgcatcaagtatcttatgtcagcatttgatattcccgaggtaaaatcgtcaacttagccttcgttttagctgaaatagaaaactatttttcagccgaaagtaaagtatttgacataggtgatggcggttacacggactaacatctgtcgagaaaggaatgggagtcactttctcgaagcggagcaagccatctattatgcttctgtgttcctctacttttgggttcttctcaacccctgttgtatctttggtttttggaagtaacttatatatatccatcaactggcttcacatacactttgatgaagcattttcttcacttcggatcgccaattaacaaatcattcacccgtttccaacatcaaacctgatggagaccttgaagtcttcactctcggagtagacaaggtgagaaaaacaactctcgaaatgacaaaagaaaaagtttgtgattatagaattaaacagaggagtgtatgtgatgaatgagtacaggtgccaaaggaatggaagctggacaaggactgggatgcagagccgagatcgactgtgaaaatgagtcatcacagaaggtttccaagcaaatggtgtgcaacaacattgcagcaggatcctgtcaacaccgtaaagattgtcgataagtttgttattcatagatcagagaaagaaactggaggatcttagatagaatcaggttcttcactgatcctgtcgtttagaatgtagtcattagcgtttcccgctttatgaataggctttgagacgaataatgctttcttctgagagtgatgacaaaaataattcatatcatagttaacaatttaacagctcaatcttttgcaatttcactttagaatctaataacaagtctctgacacaactttaactctattttgtgtctccttcatccaacattattctataaaccctttgaatttgtgagataaaatatatataaatacatggcacattctcaaaccaatgacttcctttcttcgtcctcttctctatcaccatcgcctcctgcgatcctaaccgctggtctcgccggaatcttggccggagctttactatccattggaaccatcttcaatacaatccccattgctatcaacagcaagcctgatccgtgctgttccgttaacggctttgtgaatatcaaatacgacagcaacaatgtaacccctttcctagccgttgttatctacacacaacgaaatgtgattttagaccattgagtcaattaaaatacaaatgagtattcaaagataagattagatatttaccaaggcagttgtggcggctccaaagagagcaataagcgagagaacggagacttgaccgataaatgtggccatggcttcaaatacaagcactccatacacatacggatgctgcaaatataaacaaagcacaattggttttaaatatgtcaaccaatgaatcattaaaccgtttgactataaaatattccacgttggtacttaagttatggaatcaatgaatttaaaagagacaatttggcttttaaaaagtttggcagattcagaggcacgtcgtcggtcaatgatctctctcatttcgtggtaccaagaatcctacaaattttgactttttctctaaactgagtccaactccggtttgaatcataaaccgagtcaaatctatagaagtactttcaaagccaaataaaaggttccactctttgtcactttcacttaaaatggacgactatctcataaggttaacttggtttggttaaaggttgaccaaaagtcaaaccagaaaaaagagaacagaggttgtttacttacttgtgcacacgcagtccacgcacgaaaaacctctccggttaaaaccatgggaacgaacaagaacggtaatccaacaactgttgagcagaaaagcatctccatctgcacaacacacataacaagagttaatctcagaaacgaaacaaaacagaccggtaaaggaaaaccgaaagaaccgtgttttctttagtttccttgcctgagttgtctcaggattcattgtgaagatagcttcttgcagattacccaagaaagcatccatgatcaatgcaccggttatcatcataatcccaatcatactgaaatttggagacatttgcgcatcggctaatgtgaataggatcaaaccaagaacaagcaagaacgctgaaatgtattcatggactgggtattttcttctaagaccgggtataaacgctcccattatcatcaccggtaacacctaaaacatccgaaagatggtcattccgatcattctttaaactcaatttaaactcattgagactgtaattgggaaatgtggatctattaccttggtggatttgaacatgatttgagctggataattgagataagccaaagatcctttggttaaaccatgtgaacccatgagaacagcagagagtttgacataagttctcatcggattaactatatgctttgtggtaaagccttgaaggtagattagaaacaagtagacaaatccttgtataaacgtgaaataccacccaaagctacaaagacagagcaaaatcccattgttaacttttgttcaaatctaaaacttaaaagagtaatcaaaagttgacttttacctaaattgaagacgattataaacatattcctgcaaaaccaaagaaaaataaatcaagtcaatgatcatatatgagtacttgtagatccaatcacattctctaaaatctgttttctttacaaagatcacagattttttgtgatctctcacaagtttggagagagtttagttcgtcatgcaattttttcttcttcctctgtttttttttctctcagaaacaaaacatcaaacacttagcatgcaagagattgaaaatgcaaaaaaattataaatttacgagattcaggagctgggtatgtggaattatgacaaagaacaaacaaaaacattaacgttgattgattatgtatcaaaattctcgaatcaaattgcaaaaaagagagaaacgaacctcgcaaacaccgttaacgagataaccaaaaaagaaaccagaagtgcaaatgagaaactgttgccaagttggtttatcagacaaagagattccaaacagagatcttgtttgttcctccttcatttttcttttcttttctttgaggagagattcaaaggaagaaacccagaaagtgaattaagagtaattgatcaaacacatgtaaagtgatgactcataacggtattattatcactcctcgaaataacgaaaaccacaccacaaaaagggtaatcaaagaataattaaaaccaaattcttcactctcctcgagaaacttgatgaagagggaagagagagttaatagatgtattggtaaaagaggaggaggaagaagagagcttttaagaaggaaggagaaaacgcatgaagaagaagaagaagaagagactcgtcgcgtgatttgccacttcgggacacgttttttctccattgagcgttcttcttcttctttttacgtttcctgttactcttttttttaccggtaaaactcaaatttgcaagtaagacccttaacgtttatgtatgtttgatttaagtctgaaacttttgtttatctacacaccacgacaaaatttgcattaccagcgtggcacatttttttgtcttaagtcttttattgcatgatctcatgtttgctaattacgatcatatcatattattaccagcttggtatatatatatatataaaatttgggttttaatgacagtttgtgttgtatatgtgttgtttgaaaaatgtatttataataaattttggtataaaaataagaaaaataaatgctatgacttatcaaataaaattatctaaatttgtctataaaaaaaagtatcaaagtaaaatggaacaaataagggtaaaaattgatatataagaaacatatcaaatcagatcttgctagtcaaaattgtaaatttttatctacatttaggatctgtatattgactatgttttctaaataacatttgttaaaaaaagtgaaagaattcaaaaaagtagtgtgacaatttttacaaaaaccttaattagaagtctaaaatcatatgatatcatcaaatcttgatataaagtaaaaagaaagtgtgtcactgactctacacattagaaaactagaggcactaataaaaaaaataagataaactttaggggtgcgttttcatattttctttatttgatgcaaaagaaagttactacttcgagagaataagagaataaaaaggaaaatttaataaagataatcaatatggcttacgagtcaactttccggtttaagacagattgagtcattgtctcaatagacgccattacagtctgtcttttacaatttcatcatctttcctgaattttgtttttgttattttcggaagtgattgttaaatgcgttacagaagttctggtcatgtcagaattacatattgacataacatctggacacgttttggtaaagaaatcaatttactctttttcttttcatcttctatatccatattgagcaataaacttcacacatgcatattcattctttcaccaacagagtagttgttttgttctagttgaaaactctagtgaacaaatttggaggaacatatacaaaatgtgtaagcaaaataatgacgatatttagtcaatgaattgaaatgttttagaagaattaggtggcggtgtatggtgaacagtcgaaatatacattattattggctattagttctaaagaagcgattataatcgtcgtatatgaaatagcatatagacaaaatggtttgttttaaaatagaccgtttaataatagctttgattagtgacactgataagttaaaatggaatagaaaataaattaactatgagtctatagtcatacaaatatcatatatgcatataggcgtcgcaaagagccaaagaccatattctttttttttttttggtcaaaagccaaagaccatattcttttcttgaaataccaacgcgaaactcaacaataaatctgatatttattttattttttgttcaaaggcttaaatgagagagcttactgcaatattacaacaacaaaaaaattgcaattggtattagagattttttcctatcaaatttatttctattagaaggtcaagctttacgtgcaattgtattaatacataaagttacaaatgataatctctacacataacaaaattgatcttactcgtagatatttttcttgcttaaaaccatttgtgtggttcataataaacggaagacttcgatcgagagacttttgcatatgcaagcaacccatcacatttcacaaattgacaacaatattattgctagaaaactatagatttatgtagatatatattttattcttttttgttaaaaaaaaatcagacatttacattcaaactcaagcgagtaaaagaatcaaagtcgttagagaaacaatccagtgacgtacggtcaaatagtgtgggccttagcttcagccattttgtacagagtaccggaatcttaccaaacaccgaaggcaggtccagttacactagttagcggttacgtctccttctaattttcatagatgaattagtttttttcttctaaataaaatacgaatttttaataagattttgtgttattattgattatggacactgttactgccgtattatcatgcgcaaaacagggttggcaaacttataataggtgatacttgtacaatttatctatatacttattaattcaaattcaagtatttgtgtagctactactacaactagacgtgatagtcagcatatatgaattattctttctttgctaggaatatttttaaaatattataaaactaaatttttaaaagaaaagaaaaaaaaattatacacttatacgtataattttaaacaagtagtactactgtacaacttatatacaagtcctaaaacttagtaaattatatttatatcgttaaatttggcttattaatattaaggcatataactgaacatagcacgagtatgactttcttgtatacaataaacagaactatacaatatatatgtcctatgtgactacgtgtgattacaaaatgcagtgatatagcctataggtaatttgcccccaaaaaaaacaaactataggtaatatgtcgcaatttttggttagtgcaacaaatgcaaattattaaaatctaacaatatattagtaaacaagttttcaaatatcgaaattgtctccatgcgttcaagcgtctctctctcagcaacaatgatttggtacgtaattctattacataggggaattcggtttatttcctaaattatgggtttcttttcttactgaaacaataattcaatttttgggattcgaggttagatatatttatgcacagaaattaggttttgcttttaaaaaaaattgtaagagaaatttgttacaattttcattaaatataaaattaggaggatgcatgagatctctagtgactcaagtcatggttaactttaaactgattagttctatatgtattaactttaccactcctacgttaaagttaatccagctcagattagttgaagcccaaaaaaaactatagtttagggcccatttcacttaacggccgttcattatgcttgaaaccgctcaacattaacgtggtaatttattattatcctttttagacttatttttcatgaatttagatgatacagtagatgttgtcattagatttgtactagtttacttttaatgtgagattctatcaaccttctgtcgctgagattttaccgtaatcaagttcaaagtttagaagtttttgtttgtttcatcaatctctcattactcattaaacattcagacaatatatgtcataccatttacaaagataatagcactatatatcataaatttagtaatgcatatagtataatacatacatatgtggcaaagaaaacagtttcacaaggatatatcatggataagttcgtcaaccaaggaagtgaggaaaccattccccaactcttcgaccacatactctttctcatccccattgatacaaccccatttcatttccttcacataaatctctcttttctcgctcactttccaactcatgaacatattatattcatcgtcttgtctcctcatcacccattcttcaactatctccaccaacttatcctcgtctcttgtctcattattattgttttctttgaaaaaatctagcaacacattgtctactacatgagatgccagtaattggttttgttcctcgattattctagacttcactagagcaaacaaacggtttgctcggatttcggattgatcttcttcaatttctataatgtgagatttgtaatcttgtctttcctcatatttctctatgcgtttctctaaatccactggctcaagccgtaccaaactctctaatcttcttctttttctcatctgtttcttctcatatgtttctgtaaatgtcaatttataaaagattagttcatatgtttataaacctaattgttaatgcaactatatctatgcttgaatttgcgttgaatagataaaatctttgtcaaagggttttctcacaacaatgaaacttgtaaacgtaaaacctatgtgataacaagtaatgaccatcgattagcgaatattcaagaacataaggatatataatcagtgactttacccttgtgatgcgatggaggactaattgcatcatcttggaatgggcaatctaatatcgatattggactgagttgttctttttcttcgttctcgcattcctacaatttacagtgcttcaaataaaacaatagtaaatgggaaaattttatacgtaaaacgagagattatctctagagtgaggaaatagagtgagttggccaagtcaacctactttatgacaataacattatacatctctccacacctttacatatttatattagttccaaaacttgtataatatgtgtgagagattaaatagattacgaattttaaatggaccaaattgacgttgggaagtgagtgatattgtccgtagaatccgctttcgaagccacgaagaaaaatctgagccctcgatttcatcactcattaagtattttattcacattctaaaatctaattccctaccacacacacacgtgactcgcacgcacgaaccgacaactttcaaaaaaattccaactccactcaacttaagtcttaaaccaacatcatatcaatttacacgttaatttctagtattagttcacctaatggttcgctgttgtaataacttgtgatattaatggttggtggtgcattgagaaattgacgtgtcggatgatcactggatttggacgagcacgaaagatatcgaaacattgaaagtttgttaagtaatttactaacctctgtgttgtcgttgagagacgatccgtcactaacatgtgaccctacacaatccccactcatcataactactattactccgcttgatgactgagtcacttccgagtcctcgctactaaaactcgacgagtcaccgacggcgtcctttgacaatgttgcttcaccggaaaataaatccgtcggagaaatataataaatctgatcagacagttgatcttgactctcttgaagaaactccgcgaatgatctacaccgttggatctcctcttcacgatcatccgttctccgttccttctctccgacgtcgacgttaagttcacgtcgggaaagtttcttccagaagcttcttgagaaaagtcctttcttgttatctctatcacgagactgagatttaacggaggaagggaagggcaagagtttaacggcggtgagtaacgccgtcgaagctttatgaacggcgtgactaaacgctaatccgcaggtaatacggcgattgtggtggaacattcctgaccgttggatctcagcgttgaggagacgagggaaagatttgaagccgttggatgagcaagagctgagatcatcgagaaggaaatctcgtaatatcaatggctttaatcgtttcttgctcaccggaagggggtgatcggaggaactgatggacgtcatcggagaatcaaacgaagaggatttagttgaaaagcattaatgtgaatctaaagatatgagtgatgtctgatgtgtgagatatattgagagatagagatatagagagagtgttacgtttagtacgtatataagaagagttaggaagaagaaggttctatatggctgtaataattagtgatcatattatatttagttccttaatcttttggatttgaattacgtttgttaattattattttattcggaggttcgatggattttgaataggtgacagaggtcatatactcctattgaatttttaaaatttgcgaggatagactattactaaataataaatatacacaacaacaacaaaaatgaagtaatgagaaagttaaattgatatatactatatacaagctataggaaattaaagttataattgtatcaatgtttataagtaaaatacaaaatatagacaaaaaagaagaagaaggtgtggtagcgacgtgacaagaggatcagttattatgagtttcataaagattaaatagaatccaaatgattgattactatccttgagataacacacattatcgatttggtatgaggtgttccgtatggggaaaatgttttcacaagtctaataattacaaaattattgaaatacatgcaacataaaggtattaacaagacaaatattaattaagaatcacatgcatttcaaaattttcaatatgctttcttaactagtagatgctttttcaaacccgagttagtaccaagggactaaaggtatgattgcctaatagttacttcataataataactcacggctttcacctttttatgccttctagttctagtttttttttttttaggtcatagatattctttttaaatcatcaatatggaatttcaaaaattaaaccgacagagaagaagccgagtaaatcatgttggatttgaatgtgcatcattgaatgctgtgtttgaaaagatttttttttttatttaaaaaacacagttttggtctccacataaaatgtcaataatggtgtcataaatttaagataaactgcaaaatgaaaaactaaaagtttacaaataagaaacagttagctttgtttatgggttcaaaacggggggaataaagacctcgagttgaccttgtaaataagaaagtggacgagagattcttgcggcttccatgcagattttgcctaatcatcattaacactaccaccacgtgtgcacgtctttcagatttaattgtacttttcaaaagaaataaatttgctatttgaaatcgaataatgtaatttttattatttaagtaatactactttcagttctagatctttaacaggttcgatcactacaaaaaatgattgattataacgctgaaattagtggaagatatctgttgggctagctatcaaaattgggctctatattattagccttgctaggcaaaagaacgttatctcttttattggcaagactcatccattgaccaagcccatcttatgttgtgctttatttttctgcatgattattgattaatggtttgttttgagtgttttggagctttctttttgtcattttatcttatcttttcccaattactaccaacacaatttaatacaacgaaataaaatatggtaaaaatgttttgaccttttttgtcaccagtatctgatatttattacttattgaaaaaccaattgtatttaaacgataaaatgtcttccaatttccaccatgccgctttccataagactaacaagtctgacaattccttcatgttcctatgcatatcatttgatatgaatattacagagttctttcaaaatcattgatatgaagtacaaaaagttggttatggattttttttgttctcaagacaataatctataaacgaatttttgcccttaagaactcggcttaagactaaagaaagtcattagaatcctatcaaatgattcaaaaggcatgtaagccttttttgggtttatgttaaatatattccaaaccaaatagcatccacacagatgattgtttcaatgtttgcaaacttaagacttaaaagatataccaaatgaagcacgagcatttaagtaatttttttataagataatacgatgattgatgtcttactgtcttagatcccacgacaggttctatatacatatatagacgttaagtgtattaaattaagctattgaatagtatagagtactttatttactcttagcttatcggataatggttaatctcatataaacagaagttatcaagcgacaggacacaaaggtttgtttagttaaagttacatgcatgagaatgaataaattagactattaggattcctcctattacttaggatctttatggggttgattcattctatgccaaggatattatagatttttgaacatttttgactatatgacatcttttgtctcacaagatattgttgtttaattactttgatcatatgaagatattgtttctagaatgcatatggatgaacaaccattaagtatatgcggtaatactgattataggaaaatacgttatagacagtgtgatgagaattaggaacacaattgtgttaatgaaaaaaatttgttaattttaaccaaaacactattagattcctcgataaccttgccctttttccttgtcaagattaccttaacctaattttaagtcgacgtaaattaattttcacataatttgttaatgatatttgatattcaagatacaatgaaaaaatactctgaaatttcacataaataaaacataatcaaaacataataaacacttgacaacaattttagtccaaaaggaaatcaattctctttcgttcatatacaaagtaacagtaagttgtaacttagaaaattgatcgaaaatttgacttggaaaccctaatcatttctaaaaatataaatataaaatctctgaaatacgtaaattataatttttttatcatgttatttatatttgtttgttacttctatatttacatttgtatttatttttatttcatatagtttatatatatatatttttttctatttacagttgttaatttttttttttgttataatataataaacgatcgacatagctcgtgataagataatgttatttttgttccccatcatccttaagctatattaatggtccacattctatagaggtgaagcatgtgacatcgtattatatctatgcacaaacaataaattcttatcccaaaattaataaacactaataaaaaatattctctttaaactaattattattttctgttaagttctcttgaaactaattatgaaagcaagcctttttttttgccaaactataattttcccctcgattatatgatcaatagagtggtccaataaattgttttgaagtttagaaataagcattaagtaggtataatattctatataattcttctcactttattgcaagcatcaacatcgtcccaagttttatataaaatggtccataaaattttaaatcttagtatttcgtaacaacttgataccaacctctctgtatagctgcttaattttctggtatatgatctgtgtccatccctactagcttactactttactactacttcgagcagttacttatttgattttgtaaagaatccatttcgttttttttttttggcacatgaaaattacccataatggtcaaattcaatactattaaaagtgaggaagaaacgacatgagtcaatttgttacactggtttattatttaaagaatagaaatcccaaaaacgtctcaagtttcaactctttctatgctgagttgtattgtatgtatgtatctaagtatctaactataaattaaacgaaatacagacaataaattaatcgtgaataaaaaaaattcttaataaacatccaaatatcaatattttcttggaaacttatctccaaatggaaacaaaaatcctaataaacgtaaccatgattaaaagaaaagagttgcataaacatccaaagaaaaacaatactattatatatataaaaaatccaaatcaacatgaagaaagtaaaatgattccaaatagacatccaaaaatcatattttctttaaactttttttattggttttccacaaatgaaaatagaataaaatagtgtctctgaattaagacggagtcgtaacaaatgacataatggccggtcaaataaaccgccaaaattgttctgttataattaagactaatttctgagtcaaaaaacttctcttgttcccttaagggccttaatcactattaaccttaactagtgacttaatctcaaacttataacacacctttcacacatcaacaacaccttcttcatcatctcctttctctgtctctgtctctctcttctctctcaaacctgtaatcatggcagctcctttgttgatgatcatcaagaaccaaacagatcaccgacaagatccgaatccgaacccgacccacctttcctcttcgatccaagaagccaaatcaatcgccaaaatatctctcccactgatcttaaccggtttacttctctactctcgctcaatgatctcaatgctcttcctcggccgtctcaacgatctctctgctctttccggtggctcactcgccctcggcttcgctaacatcacgggttactctctcctctccggtctctctatcggcatggaacccatctgcgttcaagcctttggcgccaaaagattcaaacttttaggccttgctttgcaaagaaccacacttttgcttctcctctgttctcttcccatatctatcctctggctcaacatcaagaagatccttctcttcttcggacaagacgaagaaatctcaaaccaagctgagatctttatcctcttctctctccctgatctgatcctccaatcttttttacatcctatccgtatctacctccgatctcaatcgatcactcttcctctaacctactctgctttcttcgcagtattactccacattccgattaactaccttctcgtttcttctctcggtctcggccttaaaggagtcgccttgggagcaatctggactaatgtcaatctcctagggtttctaatcatctacatagtgttttccggtgtttaccagaagacttggggaggattctcaatggattgctttaaaggatggagatctctaatgaaactagccatccctagctgcgtctcggtttgtttagagtggtggtggtatgaaatcatgattcttctatgtggattgttacttaacccgcaagcaaccgtggcatctatgggaatcttgatccaaaccaccgctttgatctacattttcccttcctctctgagtatcagcgtatcgacacgtgtcgggaatgaattaggtgcgaatcagcctgataaagcgaggatagctgcgagaaccggacttagtttaagccttggtttaggtttattggcaatgtttttcgctttgatggtgaggaattgctgggcaagattgttcacagatgaggaagagattgtgaagttgacttcaatggttttaccgatcatcgggctttgcgagctaggaaactgtcctcagaccacattgtgtggagtgttgagaggaagtgcgagacctaagttaggagcaaacataaacttgtgttgtttctactttgtgggaatgccagtggctgtatggttaagtttctttagcgggtttgacttcaaaggactatggctcggtctatttgcagcacaaggctcgtgcctgatttcgatgctggtcgtgttggctaggactgattgggaagttgaggttcatagagcaaaagaactcatgactagatcatgtgatggtgatgaagatgatggtaatacaccgtttttattggattctttggatatagaagaaaatcttgtcttctagttttgatttattggcactaacgagattcgtttcattgtacactcttctaattcattattctaggaggaaacatttgattgttggattttcaaatttatgttgtgagatatatattggattttttttaaaatgtaatgttgttgatttgatttgattgtaaaaatatactttattagtattaaacctcatgtcatttcaaaaaaaatatcatgggagtgatttgttgtcatgagaatgactttagaaattgaatgtgtaaacataaaactatccttttcaagtggttcgagtgtaatatatatgaatctggttaagcaattaaaggacaagatagaagttggtttcgttgccgggaaattcttatgcaacaagaaaataaaaataattattaaacaccatgtttagtggtcctccataggcgcgtgacgtttaaggcgcgtgtaagtaacgtaacggaaagagttgtgaaactttgacgacggcgagaaaatactaatgtctccgtcaaggtcgtcgtttgtgacagccgacgccgtgaatgacccggtctctttgtcgtcttcttcgtttactctcttttcttccactaacccgacccgtttcagtgtatgtttttctttggggtgttaaattcacatgaggtgacaaaataccaaattagagttcaaatctgaataacaaaattgtgtccacttggttataacttattataagaatatgatattttgcattatagactattaaaaatgtaacaaacttcatggtgtggtggcaaggaacaaaaaaggcccataaggtgaaacatgaagaaaggagaattagttatgaatttgccactaaaatcaaagctattttcctcaactgtcccaacttgcttttatataacattagcttctaatgtccttcattctccatcacctcacttcctctttatactctcccttcaattattgtctacatttagatttttaacacaactgaatgacactataatgatttagaaaccaaatttgaacttctatacccaaacttttaactttgaatatgatgagaatatcatatcattttgcaaatctggtaaatttgatatccacgatcacagtactatcatatgagatgcgtgaagaaggaatagcacatccaacaaaccaagatgtatatcggtggagaaaaaaaaattactttcaaaagccagccttggattaaatagaccaataaatgtttagggagtaacaaattctacgaagaaaaagaagaagacatataaaagaataaattatgtaaccccaatagaataataccaattctagatcagctccaagaacaatgcttcttgtttgctcgttaaaccgatatcgtttagagtcgatgagcattctccatctccaaaagcacgccgaggatatggccttacctgtttttgatcacacaagagtttatcaaatcaactaaaagatgtctcaaatgaaaatttttatttagcattttatggcataaaccacttaccagcctataagtgttgggcttcacaactctacagatgtctataaagtcgaaaagtgactgcaaataagaagaagacatgattagtggttattaaggtttttcatatatttgaggataattgaagctggttttgggatatttacttggagtttgtcggatttaaagaaccggcggccatgacgggtgccatctggcagcctgacttgaagtgtaatggcgttctcttccccggctggtggctcttgaggcagagatgcttcctttgaaactaattgcctctccagctcctagtaagaaaaataaattggcttacacgcgagataactttcaagaatttgaggaaactcatccaagtactgcatacagcttagtatctatgatactttaaacctagtagcgatgctagtcctaactagttcacacacgggattagagtgactcatgtataaccagaagcacacctgttcctcttcgaccttcctgcgagcttcttcctcctttctctttgcttcttcaatagcttccactctagcagcttcttcctccaatcgacgagcctcagcttttaccctgtcagcttccagcgatgcaagatactcatcatcctgcacgagtttacatttcaacaagaataaaaactcatcatcatcagtatccttcgatgacctaaagggggtgaaactctctacccattacttctattcttgtcacaaggatagatcagtaaagagtattctccaatcaacttggggaggaaagaaacaaaaaatgttcctaacctgctgttctcgaatcaacctctgagctgtcaatgacggtgagggtggacgctgtgtcctttgcggataatgtgcataaggaacaccatattcactctcagaaatgccaccaaacatggcagcctctagcatgatagcttcatcatgttcctcagaagaaatgcctccccacttataccagaatgtaataagagtattagctcaggaatggaataactactctaggatacctacttaaaagtaatacaattatacaggtaatctgatcgttctcatataggaaacaaacatatatcttttgctacctcagaaggaaaaccattgccagcacccggtgaatgaatagttgcatcttctgcttcagggctccggggaagatcatcattaagtgagctccgagatccagaaaccgcacgtcttggtctgtggctaacaaggggttcctcttcctcctcaacataatcagggtcatcgtcatcatcatcatcatcatcctcagacagtgagctaggtgctgcgaatctacacatataaaaacaatttcttgggacattgtctaggaaacacagaagacaaactgatagactacaaaacagaacaaactaaccttccatttgaggctcgggaaccctgctgtactggaatagaaaccatttcagaagcttctctttctgaggatgaagccttccaaccttcactgcgcaacacttctcgctcagctgactgcactgtgacagattttgttacgtcatcaccagtctccattttggaggcctcaatagcagctcgaataatttgttcttctatatcattgtaatgttgcatattattttctgcagaaccaacaggtacagcatgcctactttgtccggttggagcagactgattatcatcatcacttacttcatctataatgaccgcctcttgggcagctggaccgtgagcttgagctgtctcggtcacatcctcaatagtaggagcatcattagattgacctgatggcccattgctgtctttaacctctataggtatctccctggcctcccttggatgactaacaaatgggggacgcgacataacaggatcattatcaaatagacttctcccaaagtttggatcacgaagcgggaacgggtccgttgttctagcttcagagaggactggagtcacaccatcatctatatccattgcatcatatgaattttgatctccatgagtaaagtatgcattcacagctctattgaggttcccacgatactcctgcaataatgatagcatgtaagttttggcaaacacgaggaacaccagccacacacaaaaaaaaaacttacaagttataatgatgctgagacaatagaataatgactaaaagataagaatgcacaaaggacacaataaaaagttctctaaacccaaactaaaattgtacacaagatgagttctgaaaaaaaattcattgacttcaataactaacttaaaccccacatgaatatctctaaaataccaaaaatccagaccaaaatccaaaaaagaacaaaacttttcacaactaatttcacaatgagcaggtataaactcgtttagatatcaatgaacaattaacaaaaccaataagcatgagaattctgtaagaagtccacataaaaactcaatcagataatcggataaactaaaattcaacacaattaactccaattgcgacctaaacgcatcaagatgagcttaacaacgatataacaaaagcgtagaggagatataattcgatgatccaacgaacaaccacttgagcgattcgagaaacttccaaaaatacttcaatcaaaaacaaaataacatctaaacaatagaaggaagacggaaaaaacccagggaagtgtaattgaatcacctcgagcttacgaacggcgacggcattggaagagccggtgatggtcatgaaggtgtcaatagcttcctgagtaggtgtcgccattagaaaagagaaagcttgagagaagtttttcgtcggagatttgtgtttggagctggagtgaaggaggaggcaagaattaatatatgttgtaaatcacaaaaattgcagtgaagaaaggaattggatcggtgactcttaagatttttaaagccttttttagggtctttcttcttttccattttttttaattctccttttttatttggtgtggattttcttaaactttattttctttattctttttgtatattttcggtgatattcaagatattattttcagagaacttgagataatatatggagtgtcctaatctgaataactaaataaataattattcagttgaaattggattttttttttcagagtctttatattttataaactggaattcgagtcaaattcagagtggattaaacttatctttttagtttttactagccaagaactttttgacctttttttttaacatgatattaattgttatagtgtatatacattaaaagttagataatttttaatgtacaaaaaaaaagttacataatttattttttttcacaccaattacatattttatttgtcaatttgacagtaaatatggaaataagccttaaaatgtaaaggcttttcggtccaacaacgaaaaaccaaaaccaaacccaaaactaaaatatccaaagatatcctcactttatgatcatcccaatcttccctctatatagtgcctttaaaggagctgtcatgttctctttcggccgtttgtaatataagaattgtcgtttttgtccaaaaaaaagggttggctttcagtttgtgtcccagaaacaaagtaaatctttagataaattgaaacaaaactagctttgtgactccaattaaactttgcttcctctaagaaaccttatggagagtattattctacaatgatttgaagtatactactaataattgattacatttaaattcaactataatttattgttattgttcttcaatcaacttgaactttgagtttattgggcacattacttttagaggaatgtgaatgtgaacattgaagagacgtgtattttattttcttcttgacaaataccgttggaggtataaaaacaccatcaaactcaggcccatttggcaatggcggcaacaagaatgggtattatattgaggttaatttcgtcaatcaccacttttaaatcgtgacaaattcgtctattatctctcaatcttcttcaaccttcaattacatcggcaattctacaagtggcagcatcctattagtaacaaacacacgtggcgtaagctaatgcgtcgtagtgtttataatagctggggtttgttaattatggcgtcacgagtgatttaagaagcagctgaaaaataataaacaatgagggaatgccaacgttttaaattatatttttaatttgtgaattttcatcagagtcggatcttgatgcgactgctcaaacagagtcaccggcgattacgatggccggaaacaactcggaatcgagtctctaccaggttttggtggagtggtgtcagaggatggagacgagtcaagcgagactaagggaggatgttgatgacttattgcttcaggaggagagtcgaaccggtaaggaatcggcgacgggattggagacggacacggagaaagaggctgaggtagaggtggaagcggaggcggcggattcctgggataatccgacggcgacttgggagagagctgtttcaggattctatttcgctgatagtgcgtatcggactttgatggattcaatgggacacgcgattcatgtaacatcagctgcgtctggagaaattacattctggtgagcttgataagttcttcttcttcatctatggtgtttgtagatcaggagcttatagttcttctaagtactgtttcattgaattgtgtgtttaagtagttaaacaaagttatatatagcgattcattgtatatgcaagtggacatttactatttgtttctgagtggagagattcttttattattattcaggagtcgttctgctgagaatctgtaccattggtatgctgaggaagttgttggctacagaactattgatgtgcttgtaaccgaagaataccgtaattcccttactggtatcaggaatagggtgtgccgtggagagacttggactggtcagtttccgtttcagaagaaaactggtgaactatttatggctttggtgactaaaagccctgtgtatgaaaacggtgagctggttggtgttgttactgtctcgagcgatgcaacccttttcaataggatgcatccactaagtaatgagcatcaacaacaagctcgtagtaataatagacatgaatcaaacttgagaaaacatcagtggcacctcccgaggcctcagatcgctgcagcatcacaggttccagttgtcccacaatattcatcagctgttgcttcaaacctggtagatctcacatcatgaatgttcgaagtttctcagtacttttttttatataataattcgtgtgcaacatgaatgattgtttgttttgctgttttctgcacaaaccaagaaggcgtcgaagcttctaccacagagaaatggagatgattccttcaatggaaatcataattcgaggagccgagatgaaaatgttccggttgttgcctccacaactttcgagaagtatggctcactggtaagtcttcgttggctccttaaacaagacacttctcattgacatttcttagaacgattattgtctcatgttataagctaaatctgcatatacactagtgtaggcggataagtttttggggaagctgcaaaggaagattactggcagccaaggaaccgaagataatgagcctatcttaagaaacggtatcaataagtcagcatgtggcagtggaggtagttctaaggcttctaatgcagttacctgcacggctttcagagacaatggcaatggaaaaccaaaaagggctgaagttagaatttcagatgtctatggaaatggagctgagggtttgatacataatggagatcgctttcagtatattgggaacctgggacaaagtaaacctcccagaggactagagagtggtttggtgtctggcatgcggggaacaaaaatgtcggacctaaatggtgagatagaagatgcttggaatactcgtcttagtgttgatcccttgccaattctaggagtcaacagcggtaggcaacaaagtcctgtcaaccaaaggaataatagattagttactgattcgtcatgtgagatacgatgggaagatctacaacttggggaggaggtcggaagaggtgtatttcatttaccaaagtcttacactcgttttcacgttttagatatgcaaattcaattcagatctgtgtcattgctgtttaaatcagattacaagtatttctgatgcgttacattttctcacaggttcatttgctgcggttcatcgtggagtttggaatggatcggtgagttttctgtaatttaagataaaataaggatgattctagtattagttgcacatggataactaactagtccaatctatttggaccaggatgttgctattaaggtttacttcgatggtgattacaatgcgatgactttgacggagtgcaaaaaggaggtatgtataattagttctctctgttatgaattgtttctagaagttactcgtaccagacaaaataaatcagttttgatcaataatatcttcagatcaacattatgaagaaactgagacatccgaatgtgctactatttatgggagcagtatgtacagaagaaaaatctgccataatcatggaatatatgccaaggtgagattattgacgtatggatctggaagtagtgttactccttatcgagtgtgttatattatgctgcaagaaattgcagatgaatactctgtgctaagttatttctatacggttttgatgattagagggagtctcttcaaaatacttcataatacgaatcagccattggacaagaaacgccgtttaagaatggcccttgatgttgtaagactctgatcttccaaaaacctccctcacaatgaaagaaaaaaatatgaaaggctgattatattcgggttctctgttgttgttgcaggctaggggaatgaattacttacaccgcagaaatccgccaattgtacatagagacttgaaatcttccaatctactcgtggacaagaactggaatgtcaaggtacaaacagttttctcaagttacatttatgaagacttgtaaaatgagtttactattgcatggactttcaactctttcttccctaggttggagactttgggttatcaaagtggaagaacgcaaccttcttgagtactaaatccgggaaaggaactgtaatgtttaacaaaagccatttctgattcttttaatccacaaaacagtcttggatttctgttactaaacattgttcaacttttttctatgtgcagccgcagtggatggctcctgaagttctcagaagtgaaccttcgaatgagaagtacgttggatataatattaacccttttttgttctcttttcgaagacattattcaataacttgaacatttttttggactaaaagctcaatgctttcgttgtaataggtgtgatgtgttcagctttggagtcatcttatgggagctaatgactacgttagtaccatgggaccgtttgaactctattcaggtacctctcaaattctgttcttatgagattatagcttgatcataagattgtagtaatcttagcaactttaaattaggttgttggagttgttggtttcatggatcgacgattagacttacctgaaggattaaatccccggatcgcatccataatacaggattgttggcaaacgtaagaagacgcatctgtaaattgtttcatcaaatacaccctacaaacttaggggcgatttttcttatattctttgttctaaattgttgaaacagtgatccagcaaaacgaccgtcgttcgaggaattaattagtcagatgatgagcctgttccgcaaaccagggtcaggtgcgcaagaagaagacgattgagaaggtaaacagtacatggttaaaggatagttcacaaagcaaaggacgtgaaaagaaaacgaaagcatcgtcctgatcacttactatacaaatgtttcattgtgttataccaaactactatttatgttttcattgaaagaaagaaagcaaaaatagctaaatcaaagtaatatacagtagaatcttaggttagtttagttaaactatgcattatataaactgttgtcggtttatgagctaagttgtaaaatgggatctaaaaaggcagaggcgcagaggccagaggaggactcagatgtaatttaagaagtaaaagggtgaaaaagagaaatacgagaaaaactgtgagattgatggtgtcttgtagtgaattgtaatgtagttggttttggtttgatggggtaagagaaggaggagtgacaattcgtaggcattgcttcttttgctttaatattctcttattacagcttcccatcactgcgtcgtctgtagcttctcagcacctaattataagagagagtcagaaccctaaataaaacttttttttcaatccttattcgtaattccacattacagcatcttgaaattgacgcagtcacaaaagcataattaaaaaaaaaaggatacaaagatgggtctattataccgagtatgtattgtgcatgcatgtgacgtgggtgaagggaacttctcttatagaagtattgaaaaaggagaaattttgggggattgaaaatatttgtctgtttgtctggttaggtcagaacaaatcacatcgagctgcatagtaatatttcgtttacaacacatggttgtgacctctagacaaataaactttttaacagttttcgctgttttgccttgcatgtatttcgtagtatttcaatttatatgtaactatatttcaattgaaacatctttaccatattattttcttttttgatgccaatttctttaccatgtgtttgctcttgtgttatttatgtgtgattgattgattgaccgtgtcgattacccaagcggaatcttgtaaagggatactccgtcaccgtaatacagtgacagcatatttaatttaaaataatataaagtcattgtaggatggaaaagtaatttctatgatattttcttccgaacattataaaatttattttgtcagaagtagagcagattaaagtttcgaagatggatactttcacttttttcttgtaagatattgattaggtatgattgaggctcatgatacgaaataatgtcagtgttgaactactaatttgttatgcttgaaatgcttttttataggtcagtaggtttttttattttatttttaggcatatttattctggtttagtttagttagttggtttctaaattttccttacgactaaaaaatctaatcccaaaaccaaacgaaaacaagaaataataaatcgaacaatatttttaataacaaatagaatatatatatatatatatatatatattatatcaaattattccaagatagagtttttcagttcattcctagttcctactcatatattcttaatttctattatctcaagattttatcttgtcctcatatctacgaattgtatgaaagggtttaataaccataatctattgcattgtcctatctacgtacaccataatcgcttgtgttggtggatctatagtaatctaaacaattttttatttccatggcgtgaaagtttgagccaacaactaacgatattaatcgtacaaatgagtttcatatttttttttgcaatctcatttcaaaaagtgaaaccaaaatttggatgcttctaattaaccataagattttttattaggtgcacctaatcttgttaataaattataatcttctttgattagttatgctcctatccagatttcatgcttcaactctatgattgatcaacttgcattattactgtaccataaatactttgccaacgaatgttagttgtgggggaaacaacaattccgctggtaattttgactgaattaaaaaattagagatagaatgcaaggagacacgtacgaacgagttcatacacgagaagcagttgaccagagtcaacaaacctgtaaaaagctaaagaaccaccgtccactcgcagtctactatatacgactaactaagattcatgcaggctcaagtttttgtacttgtatgacacgtggctagatcgtaacggccgtttagactgatgtctcttcgtctctccgagtctttgtcctgtctttttctcattgcatgagacataccgaagattccagtggattaattgtcggtccatttcttttttcctttttactactgacttcgagttagattctctaaagtagtacacgtgaaccataggattcgtttatgattacataaaacctttgttagtagtgtttgttcatttcttaattctggttatacatttgaaacatatgcaaatttatcactcgacttattaatcctaagttcgtaactaagttctttttggttaattagcttatatacttctcaagatttctgattctgacttatgctataaagtatatcttcgataagttgagtcgcatctctctcctcggaaaatattcttgtattttggacaaatttctcgtgtattgttttgatatttttgtggtcatgttgttttgtgaattagtatataagtagataaactacgtagttttcattcgtacaactatataaccaatcgtattcgacgaaataaatagtcagaaaatattctatttgttatgcaataatatctcactatacagtccaaaatattaacctccatataaatctgatagtaacaacaaacaattttttctctttgtcctataacatacataatacatttatgtttgaaagacaagagaagaacaaaaacaagaacccacaaatgtcaaaatagtgaaagaattggattccgacttcgatttcccattacacaaaacgacgtagcaacggacggcgctagctattacgttaagagacgaaaaacggagtagggaccaacaaaaaaacgtgatcatggatggattattaacgatagacattggattacggcgatggacccataaaactgacgtcatccgttatggggtccgtagtgtggtcctctaaaaagtattgacgctttttgtcatctctctgttctttaggactcgtcacaaattttacttcctcagattcacatgaccaaatcatgtaaccattttccaaataaaatctttacatttagatttagattcagaggaattgaattagcctcatcataatgtatgatactacatactacactagtgacacggaaattacacgacgaaaataaacaatgtgaagaataacgaaatttcccgggaaaagagagatagagagtgagacacacgcgcgagtgatgcgtgtggtagtaaatagaacactgtttgatgatactgctgcgactacttaactcttattacaaagctctctttttgttgtctctctcttgctctctctgcaaaactccggcgagaagagaacgttgtcgtttcattcgtatcaaagtcttcatcagcaatgggaaaagcgtcccggtggtttaggagtctattcggagttaagaaacccgacccgggttatccggatctatccgtcgagacgccttctcggtcaacttcctctaatctcaaacgccgatggagtttcgtcaaatccaaacgagaaaaagaaagtacaccgattaatcaagttcctcatactccatcgctaccgaattcgacgcctccaccgccgtctcaccaccaatcgtcgccgagacgacggagaaaacaaaagccgatgtgggaggatgagggaagtgaagattcggacaagcatgctattgcggtggctgccgcgactgctgcggttgctgaagctgcagtcgccgccgctaatgctgctgctgcggtcgtcaggctgacgagcacaagtgggaggtcgactcgaagtcctgttaaggcacggtttagcgacggattcgacgacgtggtggcgcatggtagcaagttttatggacacggccgtgacagttgtgaacttgcggtgattaagatacaatctatatttcgcggatacttggtaattttctttctctaaaatttatttcactcgttttataaattactttatgaagccaaaaatagaaatatacatgaattgcatttttttagtcaaaagtttataatttttgattaaacgaaagctgaatgaatacatttgtgttcatcatttacacgattttgcataattatatttttaattaggattagaaaagtataaaatggttatagatttgttaaacattcacggggattatcgtccagataacatttttcgatgtcgtaaaccttctgctgctaccacttccctagacgagtgataggacaattaaccttccatattctcatttaattattttaatatcttagcagagcacttgaatattctttgtaaagtaatttgctttgtgaataccaaatcaaattgtatttgctttttccttaattttatattcactggttagaaatttgtttttcaatttaaccgactcaaaaattgattccggtccgaacagtatagatgattctcaacaagtttaatgctaagtttaatattatatccattcttccaattaattcgatcctcaacaagtttaatgctaagttgttttcttttttttttttcttttagtttccccatttggttacgagtaaatgaaagatttgtataaaaatacttagtggaaaatcagttaacatcaaccaatacgaagaagtggtcgtactcttgttctattggttagtgaatgttattcactggaccactgtataaataacatggtgaatgctggctgctataattagtctatatttcagttcattctctatatgttatagtctctatgtagtgaatatactatgtctattaatgtttcgatgcatgcctattgaaactttatactttatagcttatggcgaatcttacaaaaaaaaaattttggaggggttttaagataatagtgtgtaagacaattcacacccaaatgtgtactcatcgacataagtcgcattgttcattaatagtcgattcatcttttctctcgtagagagtgactatacatgtaaatgttttttttatatatgtccctctatttaattttgttgaattcctcgtgaatatttcaaaagttcaatttctttaaaaggtcaatatgttttctttctttttccctttcttttggcgccaacttatatcaaaagtaatgctttttcaaatttcaatatgcttttgtggtcctgtccataatgagagcttgagctagtcaagactcttaatgtttttttaagagttgatacttagaatatgatcttgtgattattggctggcttatctccatttctaaggcaatttgttattgtttgattattttaattgtaggcaaagagagcgttaagggcactcaagggtttggttaggcttcaagcgatagttagaggccatatcgaaagaaagagaatgtcagtccatctgcgcaggatgcacgctttggttcgagctcaggctcgtgtgcgtgccactcgggttattgtcacgcctgaatcttcttcttctcaatccaacaataccaaatcttctcacttccaaaaccctgtaagccttgtaaaattccctatgattgttccttttaacctaaaacatgtcttttcgttcaaggtccctttttaacaactcctctgtttttctttaagggtccaccaactccggaaaaactcgagcattcgatctcttctcgcagctccaaactcgctcattctcatcttttcaaggtattacattttcagttgctgtttgtttcttctgtttttgttgcttgtggtcccattagttcaaaatttcagagactatacaagttactgacattgctttatgttcaaaacaaatccaatctcaagaattggtttataggcttctcattgttcctttgttagacttatccatttcacattccatttaaactaagagattggattaaattttcagaggaatggttcgaaggcaagcgacaacaacagactgtaccctgctcacagggagacattctcagccacagacgaagaagaaaagattcttcaaatcgacaggaaacacatcagttcttacacaagacgcaacagaccagacatgttctactcatcccacctcatcctagacaatgctggcctgtctgaaccagttttcgccacgccttttagcccgtcctcgtcgcatgaagagattacaagccagttttgcactgcagagaacagtcctcagttatactcagctacttctagaagcaaacgcagtgctttcaccgctagttctatagcaccgagcgattgcacaaaaagctgctgtgatggtgaccatccaagctacatggcttgtacagagtcctctagggctaaggctaggtccgctagtgccccgaagtctcgaccacagttattttacgagcggccttcatcaaaacggtttggatttgttgatttgccgtactgtggtgatacaaagtccggtccccagaaaggctctgctctgcatactagttttatgaacaaggcttatcccggttcaggtcggttggaccgtctcgggatgccaattgggtataggtactgagaacgttgttggaccctttaacctggttttgttgtagatcagtggattgagctttgcttctaattttctttgtttgtagtttggagctaagtggatttaatctaaaatgcaaatagaacttgcttaatcaaaatgtttgcatctctataaagcattgtcatttgcctagactttagttgttatcaaaaattttatgaatatgaaggaaaccaagagctataacagatatatttggtgtaataacaaaaacgtctaacactaaaaaaattgacaagaaaatgtcatgtccattgggatttagaggagtagcttagtttatggcaccacttacaatatctgttcaagctatctcctctgaatagtatcaccaatccagaagtaaacctgcacattggtataacatccatcaaaaccgaagtccggtttagtaacacaatcaaatgttctgaagcttaaccaacatgagaagaagaaatggtagttagtatcatgaaggatcaagaaagttctgaagcttaccctgcgacaaagacgatcgatgcaactatgcaaagcacgagttggcaagtgttgtacttgggtttaacaatggtaccaggcataagagaaacttggttttcttcccattcgaactgcggatgaatcaagagaagaaaaccgagtagaaaaccaccaaagaaacctccaatatgagcaaaattatcaacaggaggaagtgttcctaatcctaagttaacaccaacaatcaccaaaagcattactatagccacaccctacaaaacaagagataaaaaaaaaacagaatcaacgaaccaaaacaatagtcaagttgctaaatatagattgattcattgcgggttttcagctcataccttgttgtcataggttgtccagttgattaacaattcagataacattgctcctaagagtccaaacaaagcactagaggcaccaacagatatagcatcctcaagaaacaaacaagataatatgctcccacagaaacccgatacaaggtagatcgtcccgactcgaacaaaaccaaactgctgctcgagacgaactccaatgtaggcaacacaacacatgtttgctaacaaatgaataacgccagcgtgcaaccacatacatgttaatagtctccaaacttgacgcttgtgaactattttcccccacgccaaagctcccattttctccaacctactcaattcatagatcaattcaaaaccaaacctaatgcaaactcagaaattttgtctctgaaattacaatctttgttttgacaaaaattgggactttgactaaaatctgaattttacagtcctaaaatctcaaacccagatcataaaaattaaaacttttaaaaggaaatcaaattgctacaatgttgtgatcgagagataatgactcacgtagaggaagaaggaccaagaagaggattagacttgaaagactcaaaagagaatcgtccgaggaactttgcaagacatcgatggcttttgtgaggacaatcattatagtacattacaacaacgaaaacgacgacgttagcaatcactactattgggataatccacgatctccattgcatgtccggtgtcgtctcgccgccattattagtttctctgcttcctccttcaggatcttcctctgctgctgtggaaagcatttcacagtctagctattatagagctttaatatgcaatcgaaatctctgtgaattatctcaagaattttgattgttttttctcttcttcttgtttggtatcagaatttggaaacatgttgaattgtgctatacagtttttgaatagaagacttcaaataataacttgcaaaccagatgagacaggtaacgtaactgtgaacagagagatatttgctgtcaagagtttttttttataattgaaacgagtcaacggcaattttttgtttttttggttttgttttatttttcttgtctttaatatgtaaaacaaaaacccgaagaaattcgaaagttaatacttaaataattgtataagagtaaattagtactatagaatggttttgtgaatcaagttttttttttggtttatggttaattttagctaaaagttaaaattgatttaagaagcattgttatgttccctagtaaatgatttaagaagattgtacaatcagtccatgtagatgtagtgttgaattctaggtgaatagttagttatatatatgcttaatgattatatgaaccaaggtactgattaaatttattgtatataggctgaatgatttctcacatgttatatctcaagaatttatagggaatttggaaatatatatgatggatgaagacacgcatatatcggagatgatccaagatatgtcaatccaactagattaggagaaactgtgctacgatagtaagaataagcaaaactgaaataaaacaaccaaaaaataaaaaaaaatatctctatccaaagccattataatgtttgaaagacaaaagaagcaaaatgagacccacaaaatctgacggtcccacaaaaagagaaagagagagagagtctagtattattttaaaagaaaaatgtgaataaaaacgcaaattttcaaattttgtacgaaaaaaatatgaactttcgaaatgtcatttaaatcatttttttttttaaaatttttttgataaaatggtcaaattttgttgactagactatttcgggcatgccgtgaaattttcgtaaacaacgtcgtatttatgagctctaaaacgacgtcgttttgttagaaaaaatgagggaaaaatgcattgattaggttttgaactaaagacttgatgccaaatttagggactctctaccgctgaggtataataacactttaatatatttgtaagaacgcatatatatatatatatatatatatatatatactaacaaataacaatattcatttaattaaaaacatgcaataaattaaaaataacaaaattaaaaagaataccatacactccttaagaaggtagatatgcacaatgttaaacactatttgcgtttggcagagaaattcagtatctcataatttctcttatatttttcagaatctcctccttgactgttcacatgacaaactcacaatagggccacctctacacaagtttgcagagagccttccccctttggatgaggccattagtggctcccaaaggacacatctctggagacgaacttggagtgtttatggggactctcgtctctatcacggcctttgtggtaacttgcacgaacgagaatgtcaacatagtttcccggttatcaacggtaaagagtttctctataaatggttttatagaatttactagtaatagttagtgttgctaatgttaactctgaattttattttgttttaactgtactggacaaaggtgtagaagtcaaaccaaccttactcaaagggctcaattcactcccatgggtaatagttggaggagtggttcctattctagctggagggttcatttctgattggctcatcagagttgttgttacagcagcaatgcattggtcttaaagataatattggcttatctctggagtgtatcttatgatatccctatcagaaaggcatcacttgttgttgcgttgcagacttttctttccttacaatgattaagtatattaggatgataagaaatatatgcgatcaagagtaatgccgtagcaaataatcaatctaatcgagatgaaaagcaatccaatgaaatgattcaaataatatattttgtacaattttctcattttcacttacaccattaaaattctaattcatatttaaactaaagaattagttaacatttgaggaaaaaaaaccagatattttttattttgtaccatttttagtccagagtttgtgaaatctaaaaatatgacaaatagacaacctaatgatccagtatcaccaagtttggcagttagagaggttgcccatcctttctctttgaaaagtgaacacaaagatacttcgccctctagaaattaaaacattaagaatcatcatcaaatgacataagaaattaaaacatttaagtacaatcatcaaataacatatcaataaggaacactaacaagatatacttaccatcaccaagtacttcgatcaaatagctttctggcttttccaaatggaaattggcagatctcagtttaaaaactgaactatatcatatgtagaaaaaaactaatattttattagcaaaacaaattagatataaaaacaaataaaagtgaaagaaaaaattatatatttatatttaatgtagacagagagattttaaaaaattagcaattaattgaatgtaattcaataaagataaaattaaattaataatataaatctaaaataatatttttttgaaataaattttgtaggaattaaaaactaaatattatttactttaaagatttttgacccaaaatcttcctcaaacaatatatatgtagattcttcactaaaattatcatcttcagatttccttttcagaaaatgtagaaataatatgtcacgctcgtgtaaaaaagttagcgtcgaagatatgaataaatgtatcgatgaaattacttcatttaagaagaaattatgtttgacttgtgtatggtccacaaataactatgccatcctttaccggttaaagttaattagcgttaaagataacaacaaatctcttaaatctaataatgcaaattagttaatttaagaagaaaatttgtttgacttgtgcatggttcaaagatatacatactattataccaaagtatttatgttagaagtgatttaagaaaacttaatttaagaagaaattttgtttgacttgtgtatggttcaaagatatatttactattataccaaagtatctattttttttttttgtctaatccctagctaggtgtatatatattctactctaatgattcaaaaatattacatttatagggagaaggtgattatcatgattatcccaaatgatttttttcagatctttctccaaatactttatctcaataataattgtatacatataagaaaaactaatgatcttatatctctagtttgcaggttgatgaaaatgaaattagggtgtgtccttccactgatgtgcatgattttgacatgctatattatatgttatagccttctggtgggacattgctatggcgttgtagaggaagcaaagacattaaaaagtaaagaagatcttaaaatagagcaaaaatttaagcttatcaacaaatctgcggttaaaatcataaaggtttaccctctcaccatgttatagaataattgaatgtgtttactaaatatttctaacattagaatccatatcctaagtattcttggatctctataaatataaacacgataaaagttatgaaaatcatgtgtgatacatttcctaaagatcatgaaaacataataatagatttttttatttatgaatctatagtctattagtggtgaaaggtatcgttgcgtggatttctacaaacaaccaggacttgaccactcatccatgaagaaccacacatttcaccctaaggtattgcagtaataatataaattttcttgagagttacgagtatttatactctatgtatataaaaaaagatggtaattgagaaactgacaactgaaatttttgtttccattattttattgtttcatcaattgtaatgagataagttgcggatttagttttgctaaatagtaatatgatcagttaggcatctacatgatcaaataacattttattgaataatatcacataccatgtgaaaaattagacctctatataacaaaataacatgttacattaagaaatcaagtttctcgtaagttttaatatgataatatatccaatggttgccactttcttgactacaatattccattgtgccattcggtaaattttactctaataacttaataccttaattttaacaaaaattgatgttagatacacatataatggcaattttttctttttattcttaatatgatgtttaactaaatcctaaatggtattttgattagaatgacggtgatatatcaaacacttacatgtgagttcaattttttatttattttttctagtaggttactttaagaaaagtacgtttaatttattaaaatcaagaaaattcaatgttgttttgactaatttattaatttatatggattctaattatgtgtagatgcgcttgatgtcatatccggaaggattacaaattaagagacagacacatagtaacaaaacatttagccacttttggaagaatagtgtaggttgtcctattggtacagttcctatacttcaagtcaccaaagacactcttttgaaaatgaaatctttaaatggcgataattataatccgcaaagttcgtggagcaaaacatataaatctacgtcttctaatggacgtcatcatgtaagtgttttcttttatcattttatttttaagtaagaaatgtcaaacatacaaaaaacctttctaaattaatatttgataaaataataataactatatattaaataatttttatagcctcgagttttttttttgaaatcatatttaaatatattatctcattaatattattaataattgtatgaaattcttaatatatatattatgtaagaaaatttggtgaaatatgactctactattgtttttaaaataaaacttgcatttattcttagtaaagtttatttctaatatttttactccatcaaaaacgtgttgtgttgttttctagacatagtaattgttttttttttaaattgtaattagttctacaaatatattggttataaagaaaaagcttttttttgacataaaagttttaaaagtttataaaattagccaaacctctctataaattatgaactgatgatacattaatatatttataaattttattttgttgtctcgatattattaatttatagagatttattacatataataaaatgtcacaataatgagattagtgggctactaatgttagttttctcaaccattgtattcagtttgctgtgttgcggactcttaaagaaaaaacaaggcgttacaatggagcgtatatgaatactaatgcattcaatcctttggttggacctacgcagttcagctctactcggatgcattttcaaattggaaatgaattcatccaagttggttggactgtaagtcaattaattagatccgctatttttttatatactcgatgtattatggtgtatcattttctttgattaatatatctgaatcatattttctattcattttaggtacacccggcattataccacgactttaactctcggctattcgtatatacaaatgtgagcgggatagatcttgttttacgtttttataccatatgatttattgtcacatgttatatggttttatttaggcaggaggacgtgcgtgttataataccttatgtccggatggattcggaatgatactagtaggtcaagatcttattcctggacgacttaccgagcacagagatttaaactttgccataatcaaggtaagttcctttccaactattatagacataactcttcatgttttaggtattcaagaacgtttgagtatggaacaagtagtaatatgtagatgcatggagatgaaatatcgatatgggtactgaaaattagtgttaggattttttttcatattagattttaaaaatatttttgattttttctttaaatttctcttagtttgtataaagatagttcaaaaattgaattcaataaagatttttgtcaattatagttttaaaaatgagatcaggtattggtattcccaagttgtttttgctgatatttaaaatttgagtatccaaacattgataagaattgttagaaacagtaattgcatgttttaattatgtgaatcggtaaacgtaggcatgccaagcttttgtctataattttagtcttttttatttaatgtggattttgttgagtacaggacaaagacaacggaaattggtggttgttgatgggtactggcatattatgggaaaaaattggtgtctggccagcaaagaggttcaaagaaagttttggtacagagatcgaatggggtggtgaagtccatagcccttcgtccccaagtcctccgatgggtaatagccattatccgaaggggacccccagactagactcatatgtccgtttgatcacgacttgggacgaaaattataatgccgacaattttgtgaaaaacacagagagatattcagacggttgttataaagtgggagatacaatatatatgcaagattcttggagaaatgtaggacatcttattgtttatggaggccccaagtgtaattaaacttccatagtgcttaccattattataaaattgtaatgtctgaacatgatcagaagaaagcaagagaataaatttcttagtatgaaaaaaaaataatagaaaaagaaatttaagagaaatttaaagaacatcctcatatatttttatttaacttgtttgacttggttagaaagaggaagaaagaagaactctttatatgttccaagtttagaaaatattgtatttcttatatcatcatctttaggaaattccactacacattacctaatttttttatcttacaaaaatctaaacttttttttatttagatataacactgttaagtactttagaatttttttagaacttagacttaattttgtttctggttgagcttatagtccaaagtcaagtttcatttcactaccccattatttgaggtcatatcttacacgaatatgctcaatagtctacatgcactttagcatgtgtgtggttgtaataatgctcatttaatgggatcgatttgtaagaaaactaactaataaaaccaatgaaatattaagttttgtgttcgatgaaattgtgtgattttgatattgtctgagtaatataagtttatgtgattttgttgtcactagtgatgttaaactaggccttaagcatgcgggtccaaacatgtaattatgaaacttcaaaccaacagtaacacttggttgtaaaaacgtttttttttttgttttaattgaataaaatttcatattcatttagaaagaaataacttatcacgttgaagaggaagtgtcttcttggtaagttgggtgggctgtgaacttcggtttcacaaatgacaatttgccaagcgaagatcataagcccttagacataaaagagcactgccagcaaataataagtgacgtaatgttaatgattgaaagttctatttgatcaaaaaacagggagcggccatctatttatttttacttggtttagcattgtaaagatcatttttaaagaatttgatattatttttgattaaaaatcttataccattgggtttgaaatattaacaagactacaagagtctaacacatcccattataaatcaatctttttcttcttcttccaggtattgtacactatagagaacttgttctgtaatcaatattctgaaaatctcttatgtagcatatatagtttctttcgcttccgtaagttcctattgttaatttggtatggatactatatcctatattttagattttaattctcgctgcaaatgctcaatgaaatgcaggttgatgttaaactgctccaagaatccaatcaaaaaggtattgtaatctagtagctagcaaaagcattaaacgtaactttcccaagttgttgatgacaaagattcccaagtcatcaaccgtattagtttcccataccacatctcatctcaacatcaaggtaatattattatttttattgatttattagtcaaatatgagaaagcaaacaactatgttttatatcattctgtaagtaataataagttgttgcttcctattacttattctgtttttgcagccatctctaggttaaattttatagagtatctattatccagcaggtgcttgtgctaatgctactccattaactcgtacccgttctctcggtgcacctggtgcatccggttgaaatattgaccccggtccgcaaacaaaaaaaacatccacctacaatgtgtttcaagaagtattgagagtttttggtatcaataaatctaaaagaatctattgagatatataatggtaaaaagagtcaacaacacctcaacatctccgaaagcaaaaagttgatatgcaatagcaacacttggtgaaacacctgaaagggagacgtgaagtattccgttgggacgactagaatgtacagcaacacctacatcagtgagcatcggttggaaccatccactcaagtaaagtattctcccaataccctatatatagccaagcagaatcagagaaacaattggaaactaaaaaagcttctattgaatgattaagactaaaacacttaccatgcggtttcctcggattggtaacgacaccaagttggctcgtgaaacgcatcccctccctgacaagatgtagactgcctgacgagaagccctagaaatatatgccagtacactgacaatttcctgttggtcgaggttcaaaacatctcttttagaaaactcaagaggagaagaagttgtatggaaacagaactaatggaggaaaataaactacttacggctccatgcgggatcactaggattctgcgtgcggtgggtggtgacactacaaagaggtgaaaatgacattttcaagatccctcaaagaaaccctaattttgaagattggaaatatacttacgaggaggcggcatattacccaattgaatcacctgctctccttggccattaccattttctctgtgatgattgaagaaaaagagatcattatatatattgtttagattcaagactccaagattgataaatacaagaaaatataaattgtaaataagaaagaagaagaagaagaaaacagacgttgttggctgatccactgtaatcgaagagttctcgctcatgtttttccaaatcgttaacttaagcggaaagaaagaaattgaagtatggaggaatgttgcctcaatcggcatttataagtaaatcaatcaaaagtagaaacagtgagaaggggaaatatatttaggctagtgaagaaactaattaaagagttgctttctaattttctacacaataaatattttgcacggatgcaaatttgactatcctttgtttgactgttttcatagtatatctgagaaaatgttcaacctaataaatatttagaagtcaaataagtttttatccaattctattaataggaaaacggatgacaacctcctggatcatttcttagtatttgtcatcactcttcccctgaatcattgatcaacctgacaacctctataccaattcaaaagattgtctcccatttgaactaatattttcatatacatgaaaaatcctattactgtagccaaggcacttttgaagctaatgatcaggtaggagaagtgatttcaacccactgttgtaatacatgattgcataatcaaaaccaatctatggaatccacatttgaaatattttggcccgttttaaaatatttttttggtaacgttttttaacggatttttgatttctgcaaattttggcgcgctttccactttcaaactgaatttttgaaagaatctaaatggcatgcgatcataattaacactttttaagatgtaagatccttcatatttcataaccataattaatttgatagacaataaatgattgcataatgttccactgttgtgatagatgattgcataatcaaaaccaatctatgggacaaagccacatttgaattattttacagatctatacgacatattcgaacttaaaaaaaaaacaataaaaacaaacaaaactcagtcgtttttaaagccagtcgctagttatagtcgcagcgacacttaaacgaaccggcccgaagtctctcataaaaattgcgattgcgtttacatgtttacctaatatattaaattccaatttaaatgaaagaaatcaattttaatcaatttcctttttagcaaattgttttgattttttatttttttttggttgccatagacgacatttgttaggttgtttcaaatattggacttaaattttaaaattgaaaacaagcaaggttatgtgaaaaagcaattggtttacagtttaaggtttaggaaaaataagactagaagcagattaaaaacatttgatctcaaaaactagaaacgtgccaaattaaagtatcaacgaaatacatggagattttaaaaattatgatctcttatgtagattacagttttaacggacataaaaacgttgacgtaacatacatgaatgaaaggtgggtatattaattaggtaaggcagtgtgtggactgtggagactcggtttttctcactctcatcagtcatcactcatcattttgtagggacgccttggtagggtttacatattatcctgtcacctaagtgccactatcttcttgttttacgataattaccgacggccaggatcatcgtgttgtaatcagtttagtttacgcggagtctggtggattcaattatgaaagcagtgttcttcactagccaaaacctattaaaggaaaagctcgtaaatgtctacatcgaagatgctctcccatttagaaaaaaacatacattgccaaattactaaacatcaaaactttccactacacagcctagattatcccatccgtcgcctttgccttgaaatcagttttgagttatttcgttaaatgtagacaaatttgtgacaagaaaaatgggtaatttattcaagatccaaacacaccctcccaaacgatttcccacaccgaaatcgtttagtacatacaatttttcttctgcttttcaatgcttcgaatttctaaaacaaaatcagtttttaaaatccgattacaacaaaaaaaaaaatccttattccggagactcgaattcttcagatagcataaactcacacccaaaggtttatagacaccttttgttcacgtcccattttcttagtacagcagctcttcgaacacgggatctacgctttgtccccattctccattgtacatctccaagagcttctccgcaggcgtaactcctgtcatttcaaaaccaaatttcaccaccaggttatcaaacaaaatgtcggtgtggaattcaattatgcattaggaaacttcatttacctgttctgaccacttcatcgactgcgttcaagaaaccggcttccttgtagcctctgcgctctaaaccatcctgagaaacaaagagaaaataagtccaatagttagaagctggaccagacgggatagaaagctggctcgaagtttctaagagggttcatacaaacacacctttgcgagtttcaggacatcttcagcgacatgctttaacaaaccatccctaaaaggagtctttaagccagtaactgggacctgttggaaatcaagtattagtttattacaagatgttttctaactgtggaataagaaaatgtaaatgtggtgcgtcttgttattactttgttccttagcatctctctctctgctggagtccagtcagctgtcagatccaggatagcttggagactatcatcatcatataataaacccacctgaaatttgtagataaaatcaaaacaacagtcaatactttttgaaacattctcattaagcacgaaatatatatgtgctaatagatgtagttacccagaaagctggcagggcacacagcctcctccagggacctccatcagcacctctcatctccaagtatctcttcaaccgaacctagtgttatggaacgttgtcagacttcaacataagacagggaaatgaaagtcataggctgattgaaagactcttgaggcagatgattaacctctgggaatattgttgtcagatggttttcccaatcattatatgaaggcagttcaccagggagacagggaagttttccagccaagaattgctgcagcatgaagaatattatgagattagatataattcaagaagatcccatggttttcaatttgccaattccttgcaatgaaacagttatagaacctaacagaaaagattaaggatagattttgacccgaaatgtcattccagtacagtcgatgtatttgttctttctgtaggcaaagtacatagggacatcgagtgcgtagtcaacatactgctcaaacctataccagataagaacaaaagagagcaataaaattaagattagccatgctgtttcaagagaaggataaagatccaaagcatctttctatcttgaacacaaacatatgtaagaaaatccacagaatagcacatatcaattttccaataactcatcaagaatgcgagacagagtcattggtttttgagaagcttctcataccaaaccaaccaatgtaatgtaattgtttttcatagattaaacatcgatactcacccaaaagagtcatcgaaaacaaatggtagcattcctgtgcggtccttgtcagtgtctgtccatatgtggctgtcaaaacataccagagttataaggtgggagggaaactaattcaaaaagatatcggggatcataacaactgaatctagataccttctcatgctgagaaatccgtttggctttccttctgtaaaaggggaattcgcaaatagagccgttgctatctgttgaatttagataatagtgaggcaatggttagtcaaaatcgttaataaaagtttctggttatgccacaaagagatcgagcttctcacaggttgtaaagcaagaccagcacgaaacttcctgatcatatcagcttctgagctaaaatccagattaacctgtcaagattgcaagtaatgcagtttctataagtttcaaaataagattattgatgagaactggaaagtttagtttaaggaaattatgaaaaggcgcaaagtcagaatattaatctaacctgaacagtacacgttcggagcatcatatcaagaccaagggtaccaactttcggcatgtagtttctcataatgtcgtatctcccctgcacagaacacattacactatgtcaaatcttactgcctgactcgtcataggaaaacttaacacaaacaccaagaaataatccgaacgttggctatgtagaatcagataatattatctgaattagaaacaaacagatgttaactttcttcaatcttaagaatagagaaagcgtcatacctttggcatgatgggtatatcctcccgacgccatttgggctggaagccaattcctaagaaaccaattcccatttcctcagcaactgcttttacctgtgacatccgtagatagttggttatttgtcacgttttagggtgagagcattggcaataattatctttgaaattacctgataaagatgtgaattgacttcagcacaagtttgatgcaaagtctcaagaggtgcaccactaagctcgaactgacccccaggttcaagtgaaatgctttgctttccctggtcaacaaaaggacagaacgagttatctacagcaaaaaaaaaaaaaagactgaaaccttataatataccgatcattgtgttgtatatgaagctaacatgttctacaggctgaaaatgtatataaataataaacggctcaaaagatgaaacacaggagaatgttaacctgcttcagaccaatgatcttgtcaccttccattactttttcccattcaaatctttcagcgataccattaagaagctcggctatttgatcatacttcatagggcgcaaagtattgacctcaaaaccaaatttctcatgttctgtacctattctgaaaactcacaatgttaagttagcaaaacagaatatttctccaatagacaaacaatctggatgaattcaaacaataccaacaccgtaaaagagcacaaacaaagaaatatgtcacaattacaaacactaagtagcattttaacagaacatataagcatcaaactgtacctatatttgtcctttgttttgcatccagaggcaagataggcaatgagatcctctctcgtcaacggctcagttgcaactacagcctcttccgttggaggacttgccgcaacaatcaattgatgccctctcttactcctcttaacagaatggagaagcattgatttggtagatagactcctagagtaggagctaccaaaagcttctttcatcctcaaaacatccaaattcctcacgccacccgaaacaacagctttagttccagcctttgaacaaactccagaaggaacaacagtgtatgatcctcctgcttgagacaagagcgccatggtatatatagctcctgcaattataacaattcatcataagctatgagaaatcacaaataactgcatttttctcaattctaataacatatatcacataattagaatcagcagctaccacagaattgaactatcatctggaagaacaaatcaaaattcgtgtatcaccaaaccagaaacaacaacaacaacaaaaatcaaatcaaagcaaaaatctgcaaaaattcgactctaacaaaaccaaaatcatgcaacagccaaaaaaaaatcatgagaaaaagcgaagattcaaccaaaaaaaaaaaagcagaacaaatcaatcaaaaaccaaaatccacaagtccagaaagcgaagaagaagagaagcaaatcacacctgaaattcgtcaagcttgacggagattgagagacaccgtcgaaatcaagaagaaagcttaaagagcaaaaacgaatcggcgtttcaaatttatatgcgactgagagagaaatgagaaactgataaaaaaatgaaagaaagttgatcagtggagcatgagccgatcagtggagctgagctgtctataaaagaaagttgataaaattaataatcattgtaataaaagattctttcgttttttgcctcttacttttccatttctcacaaatttaaccctaatagttttttaaataaccagtttattagtagtttaaacaaaggttaactttatagtgtgtataatgaattaatgatatttctattctttatagtatactttaaacgaggtttaactttacgatatttaatttagaacgtaaaataatgaaaagtgtgtcactaaccaaccacatgacctcagataaaatactctataggaaaagaaatatatatactactataaaaaacagtatcattatctatttggtttgattgtgtcgacaaaaaaatcttggttctgatgaacgaaaattggcgttatgtttttatatttcctacttcttagtaggtggaatcaaatcctgcttttataatcaacaatttaatgatacaaaaacatgtgaatggtagataatgaatcaccatcaaaagttctacttgtgtataataatatatatagatacgggatggatttgacaatatcccaattataacaatggaaggctatttgtctatattgttcatggaatagtatggtaccatggtggtcatttaccttatttttagaaataactgtatttttagtagtaaacacaattatggctatatatcacctaatttctctatctgagtttgattttgtattcgtgacaaaatcatagtaaaacaagtttagaaattttgtttactatttggtaatctacaaaatccttcaaattccatggtatttttcacatactttcgagaatttggttttctcaaaatgagaaaaactaattattgtgttaagtttttttttttttttttttttgaatgttataacacatttgagttttgttataatttaaaatcttaaaattcgagcttcgttctaatttcattatatcgcacagattgactctatctttttttttttttttaattgactctattcaaattttactacaagatccattattgtgttacatatcgatactcctatgaattatgaagctgtgctaaaaaaacatgtggcattagtaatttatttatttgatatcaattatggctgccattgaaaaacaaatagatgcagaattgcttgcgtttgcatatacgtaacgtaagtaaaaactaaaaactcttgtagcgacaaaaatagaaaaacaaaaaaaactcttgtaattgtgcacttctatgttgtatgtttaaattaatatcaaatatattttatcgaacacatgaatgaataagttataagaaggtaaggtaggtggacacgtgcgtgactcaaaaatggcggccatgacttctaatctccacaccaccaaagccttaaacggaacccacctccacagtttcttcctatacattcgtcactcacaagtcacaccgtttcaactttcacgaaaacttatctaaaaaataataattaacatttgacataatggaaaatcacattaatatatagccgtcaaagagtgaagtcagaaatcctaaaacgatacggaattaagctggagtgtgctatgcagactctttcagttaatcttttcctttatattccaaccttaacgttttctaatatccacgagaaaccctaaactttcgatttcacattaaagaccccaatcctcagcacaaagtaactaaatgcatcagacatagtagctagctatttgcgcttataatgatttgaagttaccaaaagattttcttcctagggattaagagaaaagtaacatctgggattgtcatggcaagcccaactcataagtctcaccgaagcccaactacacatattcttaatatggccgaagaggtagatgatacacaatcttgaaaagttgttctaagtggctgttggtgttggattctcacatttgaactcggcctattcaaggcccataaagaaagcttatataggtaacatcgagctacaacattccggagcttcatgactctcaccaggcccaagtcacatcagtttagctcgtgatggccctatacagtttgagcaagtcaaaataaaacgggcatatctaacaaattaaaaaggaaacgttaaattggtagacatcgagatggggacgttatgatttgcatggattgactaaggaggtcgtatagaccagggtcacttctttctagaaaacaagctagaaaatagatcaagagccttttttaattccaatcttttatctttgtaaatcagttcgattttcatactaatcgactgatattaacctcgattctttctcatgatttaaaaccaccataatggatattgacatcgacagtgacgtaactcagtgtgtaccgataaaaagattgtactacaagagtgagggccggggcatattcaacagccgaaagaatgaaaatcaatcaaaactttaagagattatgtgtcatatactcatattatgtgaaatccatctcaagacagttcatcgttcatttgttctaacttctaagacatattttaaaagctttattggttttgtcttataatttagatttaaaattattctcttattgttgagtttctagtttttctttttatgcttctatgactagaaatactttacttataagttaaaatatatatttttaaaatataattcgaattcattgaactaagacaattgttaaacttgttcgtttaggttaaatggttaaagagatatttgtctgatcatagaagaataaaagggaaacaatgactatataaggagtttaaaaaaaaaatgtaatttgaagataaaaacgaaaaaaataaataaattaatgtcttgaaatgtattttatataataagataaaaaaattcatttgatctccataatccttatttagataaaaacaataatgaaaaaatcatttttattaaaaaataccaaattaaaaaacaatcatataaagaaaaatcttattttctttgtttaaaaaatctaataccatatacatttactgccaaaatcttttcctaacaaagtgtttacaaaattattatattcaaatgtttggtagctaatgtttataattctaaagtataaaaaggtaagatatctgactacaaaatcttttcctaattaagtattgtagacggattttttacccttttttacttttgacttaataaataattatgaagaattttttttttcaattagataattaaattagttaataatttgtaagaattgaatctttgaactctatcatacaaagttaaactattaaaaataaattttacaaaaattattgtatcgcaccaaattttaaatagaaaaaattagtttagagacttctgattcggtccaacaaacggtacgatttaaaattacaacattaatctaatatctttctttttcgtattttaggagcgaaacaaagacaaaaatttaaagctgttaccatccaatttgagggttgtaaaagcaaggagaaaaatctatatatctagagtcctccaaagacacttataagttctcacacacaatcttttatctttcattgtttctctcactctctcttgttgtgaattctttcctttgatctttcaggtttgcaagttccaaatggggaaaaaatctaagccgtttatattatcatcagatgcacctaagccccctcataggcagccttacaaagctcttctgataagcgctcagtcatctaaagtgaattcaacagatggtgaagcaactggttcgcaaatgaagccgcggaaacaaagaaaagccccttacaaagctcttctcattagagctcgatcaccaggactaagtgaggaaagctcttcggagagtgacttttcctatgaagcggattgtgaagcatccgattcatcatcagcggagagtgaagcaaccaatatgaagccgatgaagaacaaaactgcgagaaaagctccagaagcgaggctagcagacaaagagcaaaacaagaggagaaggatctcagagaagaacaataatcctgaagaaaccatgtcctgggaaccagaagttaaaaagactctttgaaagaagatttcgacagaagaagcataaagcaaggctaaggagaaaccatgatctcatgttctaaaattgtagttcgatcttatcttttattttcttaattctgatttttaattttgtgttctatcataaacattatcatcttgctgagaattttaatccaatattttcttttgagccttcatcgtctttgattccaagtgttgttagtgtaccaatgagatttggattctctttctttctttattaaaaagttccatccatatacaaacgatgcatgttgagaacatacgttttttttatttgaagtgattaatggctaagttaattagatggctggagtttgttacagtggataagaagaggcttaagctaaaccacttaatttattcattaacttgtaaatgtacatagaatactttttttttttttagtttttatcctttgtcttaacatttacttttttttttgtttgattatcgaaaatccgtcataagaggtccatgtaacctacaattaaatattgaagctatagagtgaacatcaacacatgattttgtataggaaagttgaagatgtcaatgaaaaaaatcttgacccatattaaatctatttcacatattcaaaatttccaaccaatattaaactttaagattcagaaacctaaagattttctccgaattctctttattgaagatagtttcaaattccttcaccaactctctcacaaaccctagaaatgtgagaaaatttcttgaacgtccattcttaaaattcagctttaacacgtgagttaaccatttgtgtcgttttattgtaaaactggcatttaaggggtagattttgtatattttaatagacattattaatattggcagatgacagttcatagatttcaaaactaggaaaaaagaaaattagtggttttgtccctatataggtttccttttattgctattaaaacgaaatatctaaaattatatatatatatatatattattgatttcaaaactttttttcttttttcttcttctttttttacctctttaaatttaaaagtaaaaaaaaaacatatttatcctaagaactaattagactagagatatgattattaaaaccaattaattaaaaacaaaaaggttcagaaaaacattacagaaatcatattaaatatggctatctatctgtaaaacgaagctaagacatatccaaaatttgcacaaaaagacatatttcagacgttaaggagctttctgttggtaattttttctagtgtttttgggatttaccttaccaaccccatattgattactagatattgtacatgtatttgttatgattaaagtgtatgtgtggatgaaagtttaaaatccgttatagatagatatatttgtaggttatttgttttatcccgttacttgctaaaaatatttaactgccgagacgacttactacatagtttttttttttgtcagcaaaccttttccgtatttcgaccagaaaatctaacagagacaattactattctgagattctaaccgaaagattatataggtaaaataattttctgttggttggtaaatttttgagtttttttttttaaaattgtgaagactctttttccttggtggtgagtacaactgaatatttttggattttgtttttggtgattcagtttctaggttgcccaaattattcatcatttatcttatattaaatatgaaattattagaacgggttgctaattacgatatatatatagatataatactttgtatttttttttataacccgcataagaaagctgttaaccaaagaaattttgacctaactattgaaagaagtgttgatgagcaaagataaaaacaatatccattgccaagtttgagggatttgaagttgaccaccaaagaagtggagatggagcagagaaagcggaagaaggagagtgaggaaatgcttttgaataagaaagcaaagttagagtggagaccggaggattatgcgcaggcaattggattatctcataagtgtactggtaagggtgaaaagaagaaatgtcattacaagacatttcagtttcatgccaataaatatggactggtgagttttgttttgcttttcagattatgctgatttgaagattttgacatttgactgattacaacatttatctagtatttgagtgtttactatgctggctaaattgtatgtgatcttttcatttgatatattgcattttttggatgtaaatctgaaacttttttgtttcatatcatcttatgaaaatcttaaaccagtactagttttgtcactataaatgcgatctatcacttaatgaaagtttataacaacaatttttaaatcaagtttagatcaacttttaaagagttatgccaagcataacaactttttcaaaaacaattgtgtaataagactcaaacgatatttatagtgaaacctatttttgtctccacttctttcattgtatctattgtattaccatttctaatagatttttacttcttcttgtttttttttttaaatcttcataggaggactcagtgctattggttccagaggatggagaaaagccctatgttgcgatcataaaggttagaaaataataagaagaaaaactgatatgattttctgttgttgtcttatcacatataaattctttgttggacaggatatttatacacaaagaaaagaaggtcacgtgaagcttgaagtgcagtggctttatcgtccagaagaggtggagaaaaaatatgttggaaactggaaatccaaaggctcaagagacctcttttacagtttccatcgcgacgaagtatttgctgaatctgtaaaagatgattgtatcgtgcattttgttcaagagaataagcaaatcccaaaccgtagaaagcatcctggcttcatcgtgcagcatgtttatgataatgttaagaagaagcttaggaagctcacttttaatggctttgacttgcagcaaaagcgtgaaatagatcattttgtggaaaagacaattttgcgaataggccatcttcgtgacattgtgaaggagcaaaagactttgatctcgaggagtaaaagaactgttcctcaaagctatattataaaagcggtggaaacaagtcgtgaaagcaataatgtggttaactccatcttggaaagttttgatttgttgaccggtgattcggatcgtgacaagagtttggaggagcttctggaagtagttaagcccaagtgtcgtacaagtagaaagaagcaagctggtgattatgattctttctggccaaatgatgttgtttcggtggtgagtgctcttgagcaggctttatatgattctttgaaagacgatatagcaaagtatagtaacaaggtggagattctggttggtaaactcaaggtcagcttacttcatttttctcctccattccattttttttttggtcaatgagccatgagttactaaacgtgcaagcccaagggttagacaaacatttaattctaaactatgaaatgtttttggtttatattggagaaaatatatgttatgctacgtttatcttgtttatattggagaattttagaaattgtttagaggtgttttcagtttgttgtaaattcacattttaattatttttttggtatttgagtgtcttcgtagtgatctcttatttttttgtttgcagaactcacgagtgctagctagacgacttcttgatggcgaattaaaacctgaacaaattataaagatgacgtgttatgagctattggtaatctctttcagtcacagacttttgaatcttaattataaatgtttttttgctgcctactatatcgggataaacttcaaagcggattcttttagtgaaaatggaatttttctgatgaaccaataccactgaacctgaataacaaactagttaattattaatcactctttaatgattttgacatattaattaaagtgactaaggttagcttcttctttttttccccggaatcagcgtggtttcacttttgatgaattaaaggttgatttggaggaaccaatattgaaggatgatgcttcttcatccatctccaaaagtgttgggcggaaagattctttcgaagaataaaaaagggaaaagaacccaaaaaagtctccatttatattttatttgtccgttttatctcctttaaaaacctttgttcgtttattaaaccctttaacaaaaaaaaccttcgtttatttaaattttggcaaaatcaaacatccgagttaacggctgttaactttttaacggatgttaaaattaataaccttaaattaataatatatttagtgttatattgcttcctcctttaaatcttctaaggattttttcctaagatttctttcaaactatgttgaagatgatgacttctttcatgatttattatgtaaaatttcaattattaatgcttagatatttttagactgtcatattggcatgtatgcaattcaacaacgaatggtatgtatgtatgcaattcaacaatgattggcatgtatgcaattcaacaacgaattagaaatattgtatgtatttggtttttatttccggtaatttgctttatatcatagaacgtatgagattttgtagcactatgttcttatgttttgttttagtattttttatgtaagcaagcattttcttttggataaaaatgttaagtaagcacttttagagaataagcttgcacgcgttttataggttttctcccatttgttacttctgcatgttgtacacacttcctttgacatcgacacatacaatatacggcagaaaattctttagctttttccacgatctctctatttgatttcagtttcttcttctcctgtcataatttcctaggagaggcctctactcatcaacgaaattttattttttcctttccttcttatatattttattttattctctcttcccatatacatgactatattcatttttttaattgcactaattctagatttttctatagagaaaatcaacactaaaccaacaaaactcgtcaccgtttttttgtcaccatatatagatttaggtaaacacatgcacttacagcgtgactgcccaagtttagaacgttacttttgtacacataaaccaaataacattgcattagcactaatggcaaatgaaaattcatacaattttggatcgttgtaagttaattacagattcacaagaaaaaaacatgaatggttgactcacactatataatcaattttacttttattgccaataaaaggaaaacaattcaaattttatagtataaaatattttttatcattcaaacctctttcttcatttccattttttacctccttctctttctttttaaatatctatttaaaagtggaattttgtttttcacatttattgtatgaacgaattcttttatattgtcttcacctagttgttgatctagtctgtaagaagcaatttcatcgctgtcctcctatctttatggccctgaggcccatgaggccatgatatacgggcttcatctcaatcttaatggggttgtacatcacaaatgcacattatattcttctcgacaaaggactaagaactagggtttggcaccgctatgactgcttgcttcccaagcaattgatcatcaaaagtgagtgggttcaagtaattttgtacacatcaattttttttccctttttcgtctgaaaggatctaaataatttgtatcccatcttggtgaaatctatggatacgattcgattgatggttgagtttgatttcttcgaaataaattttgatgttgttttgtaagagaagaaaatacgaattgtaaaataccgaagagatgctaataataattgtaaaacagctaagagtcttggcatttttctttactttaattcgtcttcttcgatattggttgctctctctcgctttcttgttgacttcgtctctgatcatctttgttttttttcctcgtggaccatttttttttttgtttgttccaattgtgaatctctgccttaagagagattccatagcctacggtataattgtaaacatttgcggttgactcaacaaaaatctaaacacaagtcaacccaaggcacattgatgggaccaacttgtaaattatttgtacatttatgtgcaaacaattcaaaacaccgtgacctcaattctagtaacaatctcctagagtattagaaaatgaacaccaaaatccaaatgttgaaatttgcagttagttctagtttatgaaacaagtttgtctttaacgaggagctaaaatagtaatcgatgcagcatcaatggaacaaagagaagacttatccatcgatggacctgcttgttcatgattactccggaagaaaaatccaggtggttgaggtacagcgagggcgatcgagctagtagtaagcatttggacgatcgctgacatggttggacgattttcagtatcttcttggacacataataaggcaatatggatgcatctaattatttcgtttctttgataactatctcgaaaggaagaatccacgaggtctagtggtgacccgtcactccatagcctccaagtctattgaacaatttaagacttatatgttatgaatgtttagtagagcaaaaaagtgtaagtgtttattatactcacatatgtaaccaagtttccaaaactagcatccatctgatagaggctgctatttttcctcccgcttataatctcaagaactaagacaccgaagctatagacatcagatttcattgaaaattggccatacatcgcatactcgggagacatgtaaccactgccacgatacataaatgtttgagttaatagagaatttttatatttaatagatggcaagaccaaaacttactaggttccaactactcttctcgtatgggcttctgtttggtctatttcaaaaatcctcgccattccaaaatctgcaactttcgggttcatatcagcatccaaaaggatgttacccgcttttaggtctcgatgtatgattgtgagtcgtgaatcttgatggagatacagaattcctctagcaattcctcctatgatcttgtaccgtgtagtccaatccagctggctctgcattctagaatctgcacatccatatagttagaatacctaaaacatgagttccaaaaggaaatatctttcctaagctaaatcttaccaaacaagaagtaatcaaggcttttattagacacaaactcgtagacaagtattttctcttctctctccaaacaaaatccaagaagcttgaccagatttctgtgctgaagctttgccacaacaacaacttcgttcttgaactctttctcaccttgtcctgatgttttcgatagtctcttcacggcaacttgtactccattaggaagtgtgccctaaaaagattgtgaattaaacagagccatccccttatttgatcctcttatgcaagtaacaaggaaactcaatgaaccggtagtagtaccttgtaaacttgtccaaatccaccttgaccgagtttgttacacatcgaaaacttatctgttgcagcttcaataaccttgaaatcaaactgcagtgaccctgcagttgtgatgtcatcctcttctgcaaaatatttaagaattcaaatccataaaagtttaagcaacggacacatagattttggaatctttaccatcatttgcacctggtgtatcataagtcttctttgctctctttgatgcatggaagctaaaaacagctacacaaataagaactgagatagcgactggcacaacaattgctatgattatcactgtagaatttttgccttttcctgcataagtcttagattagacatgaactaaaaccaaactaactattaggtaaataaataaaacagagctctaaccaggcggaaaggaaggagttgaaaccagtggcagtggaggagccgaaaccggcggaggaagaacagttccctctatagtttccttgtaaaaggggtaaacctcgtaccttgagttacaacttgggacaagaaatcttcctccaactttgttgaaatataattctttgatggattgttgaagacacattacacaatcttcactagtcagatcaggaatgcactgaaccgatgcataaagcgactgagacgaactgaaatccgacttcttaaccgcgaatttcttgcttgtactattagccgcttcctctgcagactttttcatcagagaaagcactgcatcattaaaccggtcagattggtccgccgtaactttctgagtgttccaagtgattattgtagttgtggttacagtatccatgaatatattcctgtctgagtatccaagcatgcactcatcatactgaatcaagaactctttcccacctggacatcgactccgagtgtctttagcagcaaagatgacgcactcacggcaagattctggcgagagatctcctttgcagagataaagtccgaacaccatgtcggagttttgaccctttgtgagactatgagatcccaaagagaagtaagcattgttagaagaaagagaggtcaaaagtgtttggagatttgagaagtaaatggagtttcttgatatcctgttagtacaaacatggccaacgtaagtagggtcttgtaattgtgcagaaactctcaagcttccaatgaagaaggttagaaggaagagaaagtttaatgaggtataagcagacattatccaatttcttcacctttcttctctgttttttttttcttacttttaatgattggtttatgagtactaatgaatgaatgtgaaaccagccaagccagtcaaattttggtttttgtaaaataatacaatatcttgcaagtcaaggtcaactagacgagtaacatcaacttgtattgatgttaactaaaatgaatcaactataaaaatgttagaataaacatgtgaaagcgaaaaccagagaaaatacaattataaatttttaagttttcatgaatctgtttccggaaaaagatgaacctattggagttggatatttaataggtttgtgattattcagcaagccgcggagactttgggtcaataagacaacaccgttttacttccttaccaaagaagtaacaaacgaacagttacaagttaaaacagtaacttcccaaaccctagttgcttcagtttctagccttcactgcttcatcaaaccaatcaacactcttagtggaaggttgactctaaagattgtcgttgacttcatattttagtacttttccttctgaactttacaactgtgtataagaattttagagtcattttgggaaacaaagaactgaaacttgcctacttacatcatttcatctctctgttcctcacaaactctcttgcttctgcagaaaaccgtacttacttatcacatctctgttccaacaaaacaaactgattgtgtaagaatcagcagataagccattaattctctgcacccttttgttttcactctctagtaaataaaattctagacaagagtatcttacacttacttgtcaggcactaaaatattatgaaacaaaaatggaagtaatttaactaagaaaaatcgaagcttgaccgaaattctgcgttaagctttgctacaacaagaatctcattcttgaattccttttgtttctaataccaagttgtagtaggctagtggttcccaacttttaaggagctcccgtttatacactcattattgggctcaactggtgatatgtggatcactgatcaaataactaaattttgattcaaattcaagttaattttaacgtgggcttttcccaaataaaaatatatgttgtttaagagaaatgacaataataagaaaaagaatcatttactttgacttgttgactcttatagtcaccacaacccatcttatactacacgctagtgatcagcttataaatgggagctctatgatgtgaaactcaaatcaaggtactcaaacaatgtcttctcttatatctttcaacttccttttccttttctcattcctcactagctccttcacagcttctgctcaagatcctttttacttaaatcattattgtccaaatacgacaacttactcaagtaacagcacttactccaccaatctcagaacccttttgtcctctctatcttcacgtaacgcctcttactccaccggattccaaaacgccactgcaggaaaagcccccgacagagtcaccggacttttcctttgccgcggagacgtctcaccggaagtttgccgtaactgcgtagccttttctgtcaatcaaaccttaaatctttgtcccaaggtaagagaagccgtgttttactacgagcaatgtatactcagatattctcacaagaatattctatcgacggccattacaaacgaaggagaatttatcttgagtaacaccaacactatttctcctaatcaaaaacaaatagacgggttcacaagttttgtttcctccacgatgagtgaagctgccggtaaagcagccaacagttctagaaaattatatacggtgaataccgaattgaccgcataccagaatttgtacgggctgcttcagtgcactcctgatcttacaagagcagactgcttgagttgtttgcaaagttccatcaatggaatggctctttccagaataggagcaagactttactggccgagttgtactgcaaggtacgagctttacccgttctacaatgaaagcgccattgaaacaccaccactaccaccaccaccaccaccaccaccaccgagggagtcgttggtgtctactcctccgatatcatcttcttcattacctggtgaactcattctccgtcctctctttttatttcccctgctttcttgaaatactagtagggaaagttttgttgttttgattaatttttgtatttttatactctgtggcattatctgatcttaagccaatgatctttaaaaagcagggaaaagtgggaactcaacagtgttagtggtagccgttgttgtgctggctgttctgcttttcatagctttagttggttattgtttccttgcaaaaaagaaaaagaagacttttgacacagcatctgcatcggagggtaaagattactaacaatcttaattaggtttgatatattagtggtcgtcattcatcagcctctttagctgattactaagacatttgttctgtttattgtgcagtaggagatgatatggcaaccgcagactcactacagctcgactatagaacaatccaaactgcaacaaatgattttgcagagagtaataagattggtcgaggtggttttggtgaggtttacaaggtatactataatatcttcaagtacaccctaggttaagtacttcgtattgattctttgattggataacgagatgatgctgattaaaaagttaaacggatagggtacattttcaaatgggaaagaagttgcggtgaagagattgtcgaaaaattcaagacaaggcgaagcggagttcaagaccgaggttgttgtagttgccaagcttcaacacagaaatttggttaggcttcttggattttcattacaaggagaggaaagaattttggtctacgagtatatgcctaacaaaagccttgattgcttactatttggtctgttgcatttcaatgattctttgaccattaatcttgaaacttggggttgctaatctcaagatttaactgtaatccatggatttgcacagaccctacaaagcaaattcagctggactggatgcagcgatacaatatcattggaggaattgctcgggggattctatatcttcatcaagattcacggctcacaatcatacaccgtgaccttaaagcaagtaacattctcctagatgcggatataaatccgaaaattgcagattttggaatggctaggatctttggattggaccaaacccaagataacacaagcagaatagttggtacctagtaagtcttccacttaacatctcataacttataatatgttgaacattttacattgccaacatatacactaaagttttgttgtggattccagcggttacatggctcctgaatatgcgatgcatggccaattctcaatgaaatctgatgtctatagcttcggagtgttagttcttgagattataagtggtaggaagaatagcagcttcggcgagtcagacggtgcacaagacttgctcacacatgtaagttttaagacaatcaatatatacctctcttacattacattaagtaatgttagctagaactgattgcttgattggtattcaaggcttggaggctttggactaacaaaaaagcattagacctcgtggatccacttatagcagagaattgccagaatagtgaagtggttcgatgcatccatatcggtcttttatgtgttcaagaagatcctgcaaagcgtccggcaatatcaaccgttttcatgatgctcactagtaatactgtgaccttaccagtgcctcggcaaccagggtttttcattcaatgtagagccgtaaaggacccgcttgattcagatcagtctaccacgaccaagtcttttccagcgtctattgatgatgaatcgatcacagatttatatccgcgctaaatatgaccttaaacttcatgcttgtaatcaagcttacgcaaatgtttacatatttgtagaattgtggatgtgatcaaccctaataattttttagttttgatttggtttgttaaaaccatatgtattttgttttgattttttaataatgaataattagtctagtctcaacatcaccaccgattgaaaaaaatgagagagggagagaacacttggaatgttggcattacagtttggttcattttaaaaatttgggcaatccaaaagctataactttggagttcatttcagcgtctaagagccaagaggatatatacctgctttgaagtcacaatgtatggttatgatcttgaatcattctagaatcgctttagcaatacctccaatgatcttgtaccatttgatttggaaacagagactaaacagagtacagtgggaaggtgatttacatgatttgtaatgtggtgaagtaaatgaaatgtgaactatctatcacgtcaaaagtttttttttttttttttcttgttgtaaagtaaactaataactaatacaatattttgaaagacaaagtcatctacacgaggaatttaaatgttagactaataaaacatgtggaagagataaccagagaaaatagaattacaaaattccaggttttgacgtctatcaatctatttccgagaaaaataaaaaatattgggtttgaatattatttaataagttgatgactattctgcttggcgccgaaactttgggtcaataagacagcaccgttagacttccttaccatacaagtaacaaacggaacagttattaagttaaaacagtcatttcgcaaccctagttgattcagtttgtagccttatttagaatcagcaccaatcaacgcgctcagtggaaggttcgcctacaaagaaataggctttgatttttagagtctttttttttggaaacaaggaactttacaaatatgcctagacttatatcactcacatctcttttcataccttctgcactttttcctataaattatttttcaattttttttatataaaatattttcatacatctagatggatccttcacaacttttgagattattttgttattgttttatggattttgatattcttcataaaatttaagttttattaattttcatgatttttaaactccattaaaaattgtgttattcaaaggcttaagtttcattaaaatatatattgtttgtaaaattttattcataaaacaaaaaaaaaaaactgtggatatcctttacaatattaaaattattctataactacaatactctctacaatcttaaaaatctctcatttcttgaaagttgaaaccaaactcccatattatttaagaggtggagaaacaatgattaagtttttgggttttgctcaacaaatgtttttttggatcaatgatccaaagattccaaacactaaactcaacgtcttcttccaataacttttacttttgttgttaataaaaatgacataaaaaagattaatcgtatacagtacattgagtttgattgacgactgactttaaagtcgtaacaaaccaccgtatatttcacgttaatcaaataatcagcactagtcagagagagaatataatttgtcagtttataaatggaagctgcataatgtgaaactcaaatcaaggaactcaaagaaaaaaccatgtcttctctcttccctttcatattccttttccttttctcattcctcactagcttcagagcttctgctcaagatcctcgtttcctagcctattattgtccaaatgcaacaacttactcaagtaacagcacttacttgaccaatcttaaaacccttttgtcctctctctcttcccgcaacgcctcttactccaccggattccaaaacgccacggtgggacaagcccttgacagggtcaccggacttttcctttgccggggagacgtctcgccggaagtttgccgtaactgcgtcacctttgccgtcaacaacacctttagtaggtgtccgaatcagagagaagctgtgttctattacgaggagtgcatactcagatactctcacaagaatattctatcgacggccattacaaacgaaggagaatttatcttgaggaaccccaatcatatttctcctattcaaaatcaaataaaccagtttactaatttggtgttatctaatatgaaccaaattgccatcgaagcagccgacaatcctagaa

SEQ ID NO: 615 - DNA, 85785 bp, Arabidopsis thaliana
gaattctctttattgaagatagtttcaaattccttcaccaactctctcacaaaccctagaaatgtgagaaaatttcttgaacgtccattcttaaaattcagctttaacacgtgagttaaccatttgtgtcgttttattgtaaaactggcatttaaggggtagattttgtatattttaatagacattattaatattggcagatgacagttcatagatttcaaaactaggaaaaaagaaaattagtggttttgtccctatataggtttccttttattgctattaaaacgaaatatctaaaattatatatatatatatatattattgatttcaaaactttttttcttttttcttcttctttttttacctctttaaatttaaaagtaaaaaaaaaacatatttatcctaagaactaattagactagagatatgattattaaaaccaattaattaaaaacaaaaaggttcagaaaaacattacagaaatcatattaaatatggctatctatctgtaaaacgaagctaagacatatccaaaatttgcacaaaaagacatatttcagacgttaaggagctttctgttggtaattttttctagtgtttttgggatttaccttaccaaccccatattgattactagatattgtacatgtatttgttatgattaaagtgtatgtgtggatgaaagtttaaaatccgttatagatagatatatttgtaggttatttgttttatcccgttacttgctaaaaatatttaactgccgagacgacttactacatagttttttttttttgtcagcaaaccttttccgtatttcgaccagaaaatctaacagagacaattactattctgagattctaaccgaaagattatataggtaaaataattttctgttggttggtaaatttttgagtttttttttttaaaattgtgaagactctttttccttggtggtgagtacaactgaatatttttggattttgtttttggtgattcagtttctaggttgcccaaattattcatcatttatcttatattaaatatgaaattattagaacgggttgctaattacgatatatatatagatataatactttgtatttttttttataacccgcataagaaagctgttaaccaaagaaattttgacctaactattgaaagaagtgttgatgagcaaagataaaaacaatatccattgccaagtttgagggatttgaagttgaccaccaaagaagtggagatggagcagagaaagcggaagaaggagagtgaggaaatgcttttgaataagaaagcaaagttagagtggagaccggaggattatgcgcaggcaattggattatctcataagtgtactggtaagggtgaaaagaagaaatgtcattacaagacatttcagtttcatgccaataaatatggactggtgagttttgttttgcttttcagattatgctgatttgaagattttgacatttgactgattacaacatttatctagtatttgagtgtttactatgctggctaaattgtatgtgatcttttcatttgatatattgcattttttggatgtaaatctgaaacttttttgtttcatatcatcttatgaaaatcttaaaccagtactagttttgtcactataaatgcgatctatcacttaatgaaagtttataacaacaatttttaaatcaagtttagatcaacttttaaagagttatgccaagcataacaactttttcaaaaacaattgtgtaataagactcaaacgatatttatagtgaaacctatttttgtctccacttctttcattgtatctattgtattaccatttctaatagatttttacttcttcttgtttttttttttaaatcttcataggaggactcagtgctattggttccagaggatggagaaaagccctatgttgcgatcataaaggttagaaaataataagaagaaaaactgatatgattttctgttgttgtcttatcacatataaattctttgttggacaggatatttatacacaaagaaaagaaggtcacgtgaagcttgaagtgcagtggctttatcgtccagaagaggtggagaaaaaatatgttggaaactggaaatccaaaggctcaagagacctcttttacagtttccatcgcgacgaagtatttgctgaatctgtaaaagatgattgtatcgtgcattttgttcaagagaataagcaaatcccaaaccgtagaaagcatcctggcttcatcgtgcagcatgtttatgataatgttaagaagaagcttaggaagctcacttttaatggctttgacttgcagcaaaagcgtgaaatagatcattttgtggaaaagacaattttgcgaataggccatcttcgtgacattgtgaaggagcaaaagactttgatctcgaggagtaaaagaactgttcctcaaagctatattataaaagcggtggaaacaagtcgtgaaagcaataatgtggttaactccatcttggaaagttttgatttgttgaccggtgattcggatcgtgacaagagtttggaggagcttctggaagtagttaagcccaagtgtcgtacaagtagaaagaagcaagctggtgattatgattctttctggccaaatgatgttgtttcggtggtgagtgctcttgagcaggctttatatgattctttgaaagacgatatagcaaagtatagtaacaaggtggagattctggttggtaaactcaaggtcagcttacttcatttttctcctccattccattttttttttggtcaatgagccatgagttactaaacgtgcaagcccaagggttagacaaacatttaattctaaactatgaaatgtttttggtttatattggagaaaatatatgttatgctacgtttatcttgtttatattggagaattttagaaattgtttagaggtgttttcagtttgttgtaaattcacattttaattatttttttggtatttgagtgtcttcgtagtgatctcttatttttttgtttgcagaactcacgagtgctagctagacgacttcttgatggcgaattaaaacctgaacaaattataaagatgacgtgttatgagctattggtaatctctttcagtcacagacttttgaatcttaattataaatgtttttttgctgcctactatatcgggataaacttcaaagcggattcttttagtgaaaatggaatttttctgatgaaccaataccactgaacctgaataacaaactagttaattattaatcactctttaatgattttgacatattaattaaagtgactaaggttagcttcttctttttttccccggaatcagcgtggtttcacttttgatgaattaaaggttgatttggaggaaccaatattgaaggatgatgcttcttcatccatctccaaaagtgttgggcggaaagattctttcgaagaataaaaaagggaaaagaacccaaaaaagtctccatttatattttatttgtccgttttatctcctttaaaaacctttgttcgtttattaaaccctttaacaaaaaaaaccttcgtttatttaaattttggcaaaatcaaacatccgagttaacggctgttaactttttaacggatgttaaaattaataaccttaaattaataatatatttagtgttatattgcttcctcctttaaatcttctaaggattttttcctaagatttctttcaaactatgttgaagatgatgacttctttcatgatttattatgtaaaatttcaattattaatgcttagatatttttagactgtcatattggcatgtatgcaattcaacaacgaatggtatgtatgtatgcaattcaacaatgattggcatgtatgcaattcaacaacgaattagaaatattgtatgtatttggtttttatttccggtaatttgctttatatcatagaacgtatgagattttgtagcactatgttcttatgttttgttttagtattttttatgtaagcaagcattttcttttggataaaaatgttaagtaagcacttttagagaataagcttgcacgcgttttataggttttctcccatttgttacttctgcatgttgtacacacttcctttgacatcgacacatacaatatacggcagaaaattctttagctttttccacgatctctctatttgatttcagtttcttcttctcctgtcataatttcctaggagaggcctctactcatcaacgaaattttattttttcctttccttcttatatattttattttattctctcttcccatatacatgactatattcatttttttaattgcactaattctagatttttctatagagaaaatcaacactaaaccaacaaaactcgtcaccgtttttttgtcaccatatatagatttaggtaaacacatgcacttacagcgtgactgcccaagtttagaacgttacttttgtacacataaaccaaataacattgcattagcactaatggcaaatgaaaattcatacaattttggatcgttgtaagttaattacagattcacaagaaaaaaacatgaatggttgactcacactatataatcaattttacttttattgccaataaaaggaaaacaattcaaattttatagtataaaatattttttatcattcaaacctctttcttcatttccattttttacctccttctctttctttttaaatatctatttaaaagtggaattttgtttttcacatttattgtatgaacgaattcttttatattgtcttcacctagttgttgatctagtctgtaagaagcaatttcatcgctgtcctcctatctttatggccctgaggcccatgaggccatgatatacgggcttcatctcaatcttaatggggttgtacatcacaaatgcacattatattcttctcgacaaaggactaagaactagggtttggcaccgctatgactgcttgcttcccaagcaattgatcatcaaaagtgagtgggttcaagtaattttgtacacatcaattttttttccctttttcgtctgaaaggatctaaataatttgtatcccatcttggtgaaatctatggatacgattcgattgatggttgagtttgatttcttcgaaataaattttgatgttgttttgtaagagaagaaaatacgaattgtaaaataccgaagagatgctaataataattgtaaaacagctaagagtcttggcatttttctttactttaattcgtcttcttcgatattggttgctctctctcgctttcttgttgacttcgtctctgatcatctttgttttttttcctcgtggaccatttttttttttgtttgttccaattgtgaatctctgccttaagagagattccatagcctacggtataattgtaaacatttgcggttgactcaacaaaaatctaaacacaagtcaacccaaggcacattgatgggaccaacttgtaaattatttgtacatttatgtgcaaacaattcaaaacaccgtgacctcaattctagtaacaatctcctagagtattagaaaatgaacaccaaaatccaaatgttgaaatttgcagttagttctagtttatgaaacaagtttgtctttaacgaggagctaaaatagtaatcgatgcagcatcaatggaacaaagagaagacttatccatcgatggacctgcttgttcatgattactccggaagaaaaatccaggtggttgaggtacagcgagggcgatcgagctagtagtaagcatttggacgatcgctgacatggttggacgattttcagtatcttcttggacacataataaggcaatatggatgcatctaattatttcgtttctttgataactatctcgaaaggaagaatccacgaggtctagtggtgacccgtcactccatagcctccaagtctattgaacaatttaagacttatatgttatgaatgtttagtagagcaaaaaagtgtaagtgtttattatactcacatatgtaaccaagtttccaaaactagcatccatctgatagaggctgctatttttcctcccgcttataatctcaagaactaagacaccgaagctatagacatcagatttcattgaaaattggccatacatcgcatactcgggagacatgtaaccactgccacgatacataaatgtttgagttaatagagaatttttatatttaatagatggcaagaccaaaacttactaggttccaactactcttctcgtatgggcttctgtttggtctatttcaaaaatcctcgccattccaaaatctgcaactttcgggttcatatcagcatccaaaaggatgttacccgcttttaggtctcgatgtatgattgtgagtcgtgaatcttgatggagatacagaattcctctagcaattcctcctatgatcttgtaccgtgtagtccaatccagctggctctgcattctagaatctgcacatccatatagttagaatacctaaaacatgagttccaaaaggaaatatctttcctaagctaaatcttaccaaacaagaagtaatcaaggcttttattagacacaaactcgtagacaagtattttctcttctctctccaaacaaaatccaagaagcttgaccagatttctgtgctgaagctttgccacaacaacaacttcgttcttgaactctttctcaccttgtcctgatgttttcgatagtctcttcacggcaacttgtactccattaggaagtgtgccctaaaaagattgtgaattaaacagagccatccccttatttgatcctcttatgcaagtaacaaggaaactcaatgaaccggtagtagtaccttgtaaacttgtccaaatccaccttgaccgagtttgttacacatcgaaaacttatctgttgcagcttcaataaccttgaaatcaaactgcagtgaccctgcagttgtgatgtcatcctcttctgcaaaatatttaagaattcaaatccataaaagtttaagcaacggacacatagattttggaatctttaccatcatttgcacctggtgtatcataagtcttctttgctctctttgatgcatggaagctaaaaacagctacacaaataagaactgagatagcgactggcacaacaattgctatgattatcactgtagaatttttgccttttcctgcataagtcttagattagacatgaactaaaaccaaactaactattaggtaaataaataaaacagagctctaaccaggcggaaaggaaggagttgaaaccagtggcagtggaggagccgaaaccggcggaggaagaacagttccctctatagtttccttgtaaaaggggtaaacctcgtaccttgagttacaacttgggacaagaaatcttcctccaactttgttgaaatataattctttgatggattgttgaagacacattacacaatcttcactagtcagatcaggaatgcactgaaccgatgcataaagcgactgagacgaactgaaatccgacttcttaaccgcgaatttcttgcttgtactattagccgcttcctctgcagactttttcatcagagaaagcactgcatcattaaaccggtcagattggtccgccgtaactttctgagtgttccaagtgattattgtagttgtggttacagtatccatgaatatattcctgtctgagtatccaagcatgcactcatcatactgaatcaagaactctttcccacctggacatcgactccgagtgtctttagcagcaaagatgacgcactcacggcaagattctggcgagagatctcctttgcagagataaagtccgaacaccatgtcggagttttgaccctttgtgagactatgagatcccaaagagaagtaagcattgttagaagaaagagaggtcaaaagtgtttggagatttgagaagtaaatggagtttcttgatatcctgttagtacaaacatggccaacgtaagtagggtcttgtaattgtgcagaaactctcaagcttccaatgaagaaggttagaaggaagagaaagtttaatgaggtataagcagacattatccaatttcttcacctttcttctctgttttttttttcttacttttaatgattggtttatgagtactaatgaatgaatgtgaaaccagccaagccagtcaaattttggtttttgtaaaataatacaatatcttgcaagtcaaggtcaactagacgagtaacatcaacttgtattgatgttaactaaaatgaatcaactataaaaatgttagaataaacatgtgaaagcgaaaaccagagaaaatacaattataaatttttaagttttcatgaatctgtttccggaaaaagatgaacctattggagttggatatttaataggtttgtgattattcagcaagccgcggagactttgggtcaataagacaacaccgttttacttccttaccaaagaagtaacaaacgaacagttacaagttaaaacagtaacttcccaaaccctagttgcttcagtttctagccttcactgcttcatcaaaccaatcaacactcttagtggaaggttgactctaaagattgtcgttgacttcatattttagtacttttccttctgaactttacaactgtgtataagaattttagagtcattttgggaaacaaagaactgaaacttgcctacttacatcatttcatctctctgttcctcacaaactctcttgcttctgcagaaaaccgtacttacttatcacatctctgttccaacaaaacaaactgattgtgtaagaatcagcagataagccattaattctctgcacccttttgttttcactctctagtaaataaaattctagacaagagtatcttacacttacttgtcaggcactaaaatattatgaaacaaaaatggaagtaatttaactaagaaaaatcgaagcttgaccgaaattctgcgttaagctttgctacaacaagaatctcattcttgaattccttttgtttctaataccaagttgtagtaggctagtggttcccaacttttaaggagctcccgtttatacactcattattgggctcaactggtgatatgtggatcactgatcaaataactaaattttgattcaaattcaagttaattttaacgtgggcttttcccaaataaaaatatatgttgtttaagagaaatgacaataataagaaaaagaatcatttactttgacttgttgactcttatagtcaccacaacccatcttatactacacgctagtgatcagcttataaatgggagctctatgatgtgaaactcaaatcaaggtactcaaacaatgtcttctcttatatctttcaacttccttttccttttctcattcctcactagctccttcacagcttctgctcaagatcctttttacttaaatcattattgtccaaatacgacaacttactcaagtaacagcacttactccaccaatctcagaacccttttgtcctctctatcttcacgtaacgcctcttactccaccggattccaaaacgccactgcaggaaaagcccccgacagagtcaccggacttttcctttgccgcggagacgtctcaccggaagtttgccgtaactgcgtagccttttctgtcaatcaaaccttaaatctttgtcccaaggtaagagaagccgtgttttactacgagcaatgtatactcagatattctcacaagaatattctatcgacggccattacaaacgaaggagaatttatcttgagtaacaccaacactatttctcctaatcaaaaacaaatagacgggttcacaagttttgtttcctccacgatgagtgaagctgccggtaaagcagccaacagttctagaaaattatatacggtgaataccgaattgaccgcataccagaatttgtacgggctgcttcagtgcactcctgatcttacaagagcagactgcttgagttgtttgcaaagttccatcaatggaatggctctttccagaataggagcaagactttactggccgagttgtactgcaaggtacgagctttacccgttctacaatgaaagcgccattgaaacaccaccactaccaccaccaccaccaccaccaccaccgagggagtcgttggtgtctactcctccgatatcatcttcttcattacctggtgaactcattctccgtcctctctttttatttcccctgctttcttgaaatactagtagggaaagttttgttgttttgattaatttttgtatttttatactctgtggcattatctgatcttaagccaatgatctttaaaaagcagggaaaagtgggaactcaacagtgttagtggtagccgttgttgtgctggctgttctgcttttcatagctttagttggttattgtttccttgcaaaaaagaaaaagaagacttttgacacagcatctgcatcggagggtaaagattactaacaatcttaattaggtttgatatattagtggtcgtcattcatcagcctctttagctgattactaagacatttgttctgtttattgtgcagtaggagatgatatggcaaccgcagactcactacagctcgactatagaacaatccaaactgcaacaaatgattttgcagagagtaataagattggtcgaggtggttttggtgaggtttacaaggtatactataatatcttcaagtacaccctaggttaagtacttcgtattgattctttgattggataacgagatgatgctgattaaaaagttaaacggatagggtacattttcaaatgggaaagaagttgcggtgaagagattgtcgaaaaattcaagacaaggcgaagcggagttcaagaccgaggttgttgtagttgccaagcttcaacacagaaatttggttaggcttcttggattttcattacaaggagaggaaagaattttggtctacgagtatatgcctaacaaaagccttgattgcttactatttggtctgttgcatttcaatgattctttgaccattaatcttgaaacttggggttgctaatctcaagatttaactgtaatccatggatttgcacagaccctacaaagcaaattcagctggactggatgcagcgatacaatatcattggaggaattgctcgggggattctatatcttcatcaagattcacggctcacaatcatacaccgtgaccttaaagcaagtaacattctcctagatgcggatataaatccgaaaattgcagattttggaatggctaggatctttggattggaccaaacccaagataacacaagcagaatagttggtacctagtaagtcttccacttaacatctcataacttataatatgttgaacattttacattgccaacatatacactaaagttttgttgtggattccagcggttacatggctcctgaatatgcgatgcatggccaattctcaatgaaatctgatgtctatagcttcggagtgttagttcttgagattataagtggtaggaagaatagcagcttcggcgagtcagacggtgcacaagacttgctcacacatgtaagttttaagacaatcaatatatacctctcttacattacattaagtaatgttagctagaactgattgcttgattggtattcaaggcttggaggctttggactaacaaaaaagcattagacctcgtggatccacttatagcagagaattgccagaatagtgaagtggttcgatgcatccatatcggtcttttatgtgttcaagaagatcctgcaaagcgtccggcaatatcaaccgttttcatgatgctcactagtaatactgtgaccttaccagtgcctcggcaaccagggtttttcattcaatgtagagccgtaaaggacccgcttgattcagatcagtctaccacgaccaagtcttttccagcgtctattgatgatgaatcgatcacagatttatatccgcgctaaatatgaccttaaacttcatgcttgtaatcaagcttacgcaaatgtttacatatttgtagaattgtggatgtgatcaaccctaataattttttagttttgatttggtttgttaaaaccatatgtattttgttttgattttttaataatgaataattagtctagtctcaacatcaccaccgattgaaaaaaatgagagagggagagaacacttggaatgttggcattacagtttggttcattttaaaaatttgggcaatccaaaagctataactttggagttcatttcagcgtctaagagccaagaggatatatacctgctttgaagtcacaatgtatggttatgatcttgaatcattctagaatcgctttagcaatacctccaatgatcttgtaccatttgatttggaaacagagactaaacagagtacagtgggaaggtgatttacatgatttgtaatgtggtgaagtaaatgaaatgtgaactatctatcacgtcaaaagttttttttttttttttcttgttgtaaagtaaactaataactaatacaatattttgaaagacaaagtcatctacacgaggaatttaaatgttagactaataaaacatgtggaagagataaccagagaaaatagaattacaaaattccaggttttgacgtctatcaatctatttccgagaaaaataaaaaatattgggtttgaatattatttaataagttgatgactattctgcttggcgccgaaactttgggtcaataagacagcaccgttagacttccttaccatacaagtaacaaacggaacagttattaagttaaaacagtcatttcgcaaccctagttgattcagtttgtagccttatttagaatcagcaccaatcaacgcgctcagtggaaggttcgcctacaaagaaataggctttgatttttagagtctttttttttggaaacaaggaactttacaaatatgcctagacttatatcactcacatctcttttcataccttctgcactttttcctataaattatttttcaattttttttatataaaatattttcatacatctagatggatccttcacaacttttgagattattttgttattgttttatggattttgatattcttcataaaatttaagttttattaattttcatgatttttaaactccattaaaaattgtgttattcaaaggcttaagtttcattaaaatatatattgtttgtaaaattttattcataaaacaaaaaaaaaaaactgtggatatcctttacaatattaaaattattctataactacaatactctctacaatcttaaaaatctctcatttcttgaaagttgaaaccaaactcccatattatttaagaggtggagaaacaatgattaagtttttgggttttgctcaacaaatgtttttttggatcaatgatccaaagattccaaacactaaactcaacgtcttcttccaataacttttacttttgttgttaataaaaatgacataaaaaagattaatcgtatacagtacattgagtttgattgacgactgactttaaagtcgtaacaaaccaccgtatatttcacgttaatcaaataatcagcactagtcagagagagaatataatttgtcagtttataaatggaagctgcataatgtgaaactcaaatcaaggaactcaaagaaaaaaccatgtcttctctcttccctttcatattccttttccttttctcattcctcactagcttcagagcttctgctcaagatcctcgtttcctagcctattattgtccaaatgcaacaacttactcaagtaacagcacttacttgaccaatcttaaaacccttttgtcctctctctcttcccgcaacgcctcttactccaccggattccaaaacgccacggtgggacaagcccttgacagggtcaccggacttttcctttgccggggagacgtctcgccggaagtttgccgtaactgcgtcacctttgccgtcaacaacacctttagtaggtgtccgaatcagagagaagctgtgttctattacgaggagtgcatactcagatactctcacaagaatattctatcgacggccattacaaacgaaggagaatttatcttgaggaaccccaatcatatttctcctattcaaaatcaaataaaccagtttactaatttggtgttatctaatatgaaccaaattgccatcgaagcagccgacaatcctagaaaattctctacgataaagaccgaattgaccgcactccagactttctacgggcttgttcaatgcactcctgatctttcaagacaaaactgcatgaactgtctgacaagttccatcaatagaatgccattttctagaattggagcaagacagttttggccaagttgtaattcaaggtacgagctttacgatttctacaacgaaaccgccattggtacaccaccaccgccgctgcctccgttggcatctccttcactatctggtgaacagtttcttctacctttgccctgtttacttgatctttgcagtattaccaatatggaacgcagagttttcaatttttgttttgttataagtctactattttcttactaaagcagatgatctgtttaaacgcagataaaagtgggaattcaaatgtggtcgtggtagccgttgttgtgcctatcatagtcgctgttctgattttcatagctggttattgtttctttgcaaagagggcaaagaagacttatggcacaacacctgctttagatggtaaagattcaagtccttaattggtttgattaatgtttttgactaatatattttgtctttctttttctgattactaagacatttattttgcaacagaagatgataaaacaaccatagagtcgctgcaacttgattatagagcaattcaagctgcaacaaatgatttttcagagaataataaaattggtcgaggaggttttggtgacgtttacaaggtataatattatatacttctacataatttatcgattgttttgttttctttttgctacaacacatttggataatgagattgataaaaatggatagggtacattttcaaatggaaccgaagttgcagtgaagagactgtcgaaaacatcagaacaaggtgacacagaattcaagaacgaggttgtagttgttgcaaatcttcggcacaaaaatcttgttaggattctcggattttctatagaacgagaagaaaggatattggtctacgagtatgtagaaaataaaagccttgataacttcctatttggttagttgcatttgatgatttgtttcattgattcgttaaccagtcctgaaacatggttagagctaactactattcatggatgttcacagatcctgcaaagaaaggtcagttgtactggacacagcgataccatatcattggtgggattgctagagggatcctatatcttcatcaagattcacgactcacaatcatacaccgtgaccttaaagcgagtaacattctcctggatgctgatatgaatcctaaaattgctgattttggaatggcaaggatctttggaatggatcaaacccagcagaacacaagcagaatagttggtacctagtaagtcttccacttgactactctctcacatgttgaacattttattttgataacatattaaagtttttgatgtggatatccagcggttacatgtctcctgaatatgcgatgcgtggccagttctcaatgaaatctgatgtctatagtttcggagtgttagttcttgagattataagcggtaggaagaacaacagctttatcgagacagatgacgcacaggacttggtgacacatgtaagtttaaaggaaaggagttatatatatgtacctctcctcatcctacaataagcaatagttgcaataactgtttgactgattgattctaggcttggaggctttggagaaacggaacagcgttagacctcgtggatccattcattgcagatagttgccggaagagtgaagtggttcgatgcacccatatcggtcttttatgtgttcaagaagatcctgtaaaacgtccagccatgtcaaccatttccgtgatgctcactagtaatacaatggctttaccagcgcctcagcaaccagggttttttgttaggagtagacctggaacaaaccggcttgattcagatcaatcaacgaccaacaagtctgttacagtatctattgacgataagtcaatgtctgatttagatcctcgttgaatatggtgttattaaaccttacgattgaaatcaagtttaattaagcctatatttacatatttctaaacttgatgaaccatgttgatcctttagttttgatttggtttgatatttgttttcaagaataatcaatttagtctcagctatcagcatcaccaccgattgaaaaattcattacctaaatgagagggagagaacacttaatgttggcattagagttttgtccattctaaaaatttgtgcattattttggagttcatttcaacaaaagaatcgctttagcaatacctctaatgattttgtgccatttgattttgaaaacagagggaaaacagagtacagtgggatggtgatttgcatgatttgtaaagtggtgaaataaatgaaatgtgaaccatctaacacgtcaaagtttttttctttctttcgttgtaaagtaaactagttgaatttctaagttttgacgcctatcaatctatttccgagaaagatataaaataaaaatattggagttgaatattatttaataggttgatgattattctgcttggcgccgagactttgggttaataagacagcacagttaaacttccttgacagacaagtaacaaacgaacagttattaagtaaaaacagtaattacacaaccctagtttgattcagaatcagaaccaatcaacacgctcagtggcaggttaacttgtaaagattatctttgaatttttcttttagggctcttccttgtttaactttacaactgtgtattagatttttaaagtcattttttgaaacaaggaactttacttagatcagtcccaatctctcttttcctcacaatttacgacatttaaaagaaaaaaaatcgcttacattgactactgacttagtcgtaacaaaccgtcgtatacttcacgttactcagtactagtcagagagagtatcatggaagctccacgatgagaaactcaaatcaaggaactcgaaaaaaacaaaaccatgtcttctctgatcttattatgtatatagtttcaatgtaaatattatggttttgtataggtttaattggagtctgtataggtttggtttagctggtttagaggctttggtttaggcctggtcaaatgtatataaacccacaattgtatcttttaccagattaatgagaatgagattgtttactaatatggtatctgatgcagatgcttccacatcttcatcttccattgatattatgccttctgctaatattcaaaatgatgtccctgaaccttctgttcacacatcgcataggagaacacgaaagcctgcttatcttcaagattactactgtcattcagtagcttctttaaccattcatgatatttcccagtttctctcttatgaaaaagtttctccactttaccattctttcttggtttgtattgccaaagctaaagaaccctcaacctacaatgaagcgaaagaatttcttgtgtggtgtggtgctatggatgatgaaattggtgcaatggagactactcacacttgggaaatctgtactctacctcccaataagaagcctattggttgcaaatgggtgtataagataaaatacaactcggatggcaccattgaacgttataaggcacggttggttgccaagggttacacacagcaggaaggtatcgattttattgagactttctctccagtctgcaaactcacatctgtcaagctcattcttgcgatctctgccatctataattttactcttcatcaactggacatttccaatgcgttccttaatggtgatttggatgaagagatctatatgaagcttcctcctggatatgctgctagacagggggactctctccctcccaatgctgtgtgttacctcaagaagtccatttatgggcttaaacaagcctccagacaatggtttttaaagttttctgttacactcattggttttggttttgtgcagtcccattctgaccatacctacttcttgaagatcactgctacacttttcttatgtgtcttagtgtatgttgacgacatcatcatttgcagtaacaatgatgcagctgttgatgagttgaagtcccagctgaaaagttgttttaaactcagggatcttggccctttgaaatactttcttggcttagaaattgctagatccgctgctggcattaacatttgtcaaagaaagtatgcattggatcttttggatgaaacaggtctcttgggttgtaagccgtctagtgttcctatggatcccagcgtcactttctctgctcattcaggtggtgactttgtggatgctaaagcttacagacgtctcattggtcgcctcatgtatcttcagattactcgtcttgacatcagctttgcagtcaacaagctcagtcaattctctgaagctcctcgccttgcacatcaacaggctgtcatgaagattctgcattacattaaaggcactgttggtcaaggtctgttttattcttctcaagctgaaatgcaacttcaagttttctctgatgcttcatttcagtcatgcaaggacactagacgctctacaaatggttattgtatgtttttgggaacttctctcatttcctggaaatccaagaagcagcaggtggtctccaagtcttctgctgaagctgagtatcgtgctctctcttttgctacagatgagatgatgtggttagctcaattcttcagggaactccagcttcctctctccaagcctacacttctcttctgtgacaacactgcagcaattcacatcgccaccaatgcagttttccacgagcgcaccaaacacatcgaaagtgactgccacagcgttcgtgagaggttggttgcaggtttgttcaaattgattcatgttaattctcatttacaacttgcagatccgtttaccaagccactctatcctactcctttcaagcttatgatgagcaagatgggtttacagagtatctttctcccatcttgagggggactattatgtatatagtttcaatgtaaatattatggttttgtataggtttaattggagtctgtataggtttggtttagctggtttagaggctctggtttaggcctggtcaaatgtatataaacccacaattgtatcttttaccagattaatgagaatgagattgtttactaatagatctgtttcattttccttttccttttctcattcctcactagcttcaaagcttctgctcaaaatcctttttacctaaatcatgattgtccaaataggacaacttactcaagtaacagcacttactccaccaatctcaaaacccttttgtcctcttttgcttcccgcaacgcctcttactccaccggattccaaaacatcagggcgggacaaacccccgacagggtcaccggacttttcctttgtcgcggagacctatccccggaagtttgcagtaactgcgttgccttctccgttaacgaatcgttaactcggtgtccaaatcagagagaagctgtgttctattacgaagagtgcatactcagatactctcacaagaattttctatcgacagttacatacgaaggagaacttatcatgaggaaccccaataatatttcttctattcaaaatcaaagagaccagtttatagatttggttcaatctaatatgaaccaagctgccaatgaagcagccaacagttctagaaaattctctacgataaagaccgaattgacctcactccagactttgtatgggcttgttcaatgcactcctgatctcgcaagacaagattgctttagctgtctgacaagttccatcaatagaatgatgccactttttagaattggagcaagacagttttggccaagttgtaattcaaggtacgagctttacgcgttctacaacgaaaccgccattggaacaccatcaccaccaccactgtttccggggtctacgcctccgttgacatccccttcaatacctggtgaacactttctttcttcttcctctgttttttgctctgtttactatatcttgaaattagtgataccaatagggaaagttttgttgttttgattgattttggtatttttatactttctggcattgtctaatcttaagccaatgatctttaaaaagcagggaaaagtgggaattcaacagtgttagtggtagccattgttgtgctggctgttctgcttttcatagctttagttggttattgtttccttgcacagagaacaaagaagacttttgacacagcatctgcatcggagggtaaagattactaacaatcttaattaggtttgatatattagtggtcgtcattcatcagcctctttagctgattactaagacatttgttctgtttattgtgcagtaggagatgatatggcaaccgcagactcactacagctcgactatagaacaatccaaactgcaacaaatgattttgcagagagtaataagattggtcgaggtggttttggtgaggtttacaaggtatactataatatcttcaagtacaccctaggttaagtacttcgtattgattctttgattggataacgagatgatgctgattaaaaagttaaacggatagggtacattttcaaatgggaaagaagttgcggtgaagagattgtcgaaaaattcaagacaaggcgaagcggagttcaagaccgaggttgttgtagttgccaagcttcaacacagaaatttggttaggcttcttggattttcattacaaggagaggaaagaattttggtctacgagtatatgcctaacaaaagccttgattgcttactatttggtctgttgcatttcaatgattctttgaccattaatcttgaaacttggggttgctaatctcaagatttaactgtaatccatggatttgcacagaccctacaaagcaaactcagctggactggatgcagcgatacaatatcattggaggaattgctcgggggattctatatcttcatcaagattcacggctcacaatcatacaccgtgaccttaaagcaagtaacattctcctagatgcggatataaatccgaaaattgcagattttggaatggctaggatcttcggattggaccaaacccaggataacacaagccgaatagttggtacctagtaagtgttccacctaacatctcatacgttaaagtttgttggaaattttattttgccaacatatatactaaagttttgttgtggattccagcggttacatggctcccgagtatgcgatgcatggccaattctcaatgaaatctgatgtctatagcttcggagtgttagttcttgagattataagtggtaggaagaatagtagcttcgacgagtcagacggcgcacaagacttgctcacacatgtaagtttttaggcaatcaatatatacctctcttacattacaacacgtaacgttagtagctagaactgatttattgattgatattctagacttggaggctttggactaacagaacagcattagacctcgtggatccacttatagcaaataactgccagaatagcgaagtggttcgatgcatccatatcggtcttttatgtgttcaagaagatcctgcaaagcgtccgacaatatcaaccgttttcatgatgctcactagtaatactgtgaccttaccagtgcctcggcaaccagggtttttcattcaaagtagtcccgtaaaggacccgactgattcagatcagtctaccacgaccaagtctactccagcatctattgacgatgaattgatcactgatttatatccgcgctaaatatgatgtttaccttcacggttgtaatgaagtttaagcatatattttcatatttctaggtgtgatcaacccaataaattgtttagttttgatttggtttgttaaaaccatatgtgtactttgttttgattttttattaaagaataattagatatggagagaaatgagaaatggagagaacacttagaatgttggcaattggcattaaagtttggtccattctaaaaatttggccaatccaaaatctgtaactttggatttcatttcagcgtctatgaggatattacctgctttgaagtcacaatgtctgattgagagtcgtgaatgatgaagatatataatcgctttagcaatacctccaatgatcttgtaccttctgatttgggaacagagggaaaacagagtaatgtgggaaggtgatttacatgatttgtaaaagtagtaaaataaatgaaatgtgaaaccatctagcacgtcaaagttttttcttttcttactttgttataaactaactaactaatacaattttttgaaagtcaaagtcacctatatgatgaacatcaacttttattgttattcaaatgttagactaaaacacgtggaagtgacaaccagagaaaatagatttataaattttctatgttttgacgtctatcaatctatttccgagaaaaatatgggttggaattgaatattattgaagtgaggttgatgattattccgcttggcgccgagactttgggtcaaaaagacagcacagttaaagttccttaccagacaagtaacaaacgaacagttataagttaaaacaataatttcacaaccctagtttattcagtttgtagccctaattaattttcttactcaaaaagtttagtttcactaaattattgtcgagatatcagttgcttgtaatcttattcataaaacaaaataggttatttcaacaaggccttttccaataatttgacttttgttgttaataaaaaggaatgacataaaaaaaaatcgtttacattgactttgattgatgacttatggtcgtcacaaactattcacgttaataaatggaagctgcatgatgtgaaactcaaatcaacgaagtcgaaaaaaacaccatgtcttctctgatctcttttatcttccttttccttttctcattcctcactagcttcaaagcttccgctcaagatcctttttacttaaatcattattgtccaaatacgacaacttactcaagattcagcacttactccaccaatctcagaacccttttgtcctcttttgcttcccgcaacgcctcttactccaccggattccagaacgtcacggtgggacaaacccccgacctggtcaccggacttttcctctgccgcggagacctctcgccggaagtttgcagtaactgcgttgccttctccgttgacgaagcgttaactaggtgtccaagtcagagagaagctgtgttctattacgaggagtgtatactcagatactctgacaagaatattctatcgacggccattacaaacgaaggagaatttatcttgagtaacaccaacactatttctcctaatcaaagtcaaataaaccagtttatagttttggtgcaatctaatatgaaccaagctgccatggaagcagccaacagttctagaaaattctctacgataaagaccgaattgaccgaactccagactttgtacgggcttgttcaatgcactcctgatcttacaagtcaagactgtttgagatgtctgacaagatccatcaatagaatgccactttctagaattggagcaagacagttttggccaagttgtaattcaaggtacgagctttactcgttctacaacgaaactaccattggaacaccatctccaccaccaccaccgtcgccaagcagagcaaattgatgtgctgctttttacgtcgaagttttggccaagttgtaattcgttttgctctgctttacaaattgacgtgttgctttttctctgcgtttaaaattggtatcatcgaaataaagtaactcagtttcttacaatcaaagagataaggattgtgaagcagctaatgagtcttcttattttgtctttacttcagtcttctcgtctttgatagtgaattgctcatctagctttcttaatcttagacttggtcaatgttttggcttttctcatactaaaccaattaatacataaaatatttaatttattttctattacaattatctagatatttttagctacacgtgattgaaacgtgtctcaagctacaccaacgctcttcctcacaaactgaattcgtcgtcgatagtggttgctcttgctatcttgatgtttacttcgtctgatcgttgaactggcccgctgcaacattctgagtgttccaagtgattattctagttgtgcgtaacaccgtaacagtaaaaatgagctaaggaaagcgagatgcaagggagaaccaacagaagcataagtttttcctctgttattactaatggaaaaaaactttctttttcattttctaattccttgtcagatttctcagcttctcttctttttgttttgtgtaagacttggtcggagtcttagattacgctgatgattaaaaactactaaaaaagaaaaaaaaaagaatattacgcaaatgttctcgatgcattgaccaagtcctcttctggttctggctccattttcacatgcaggcccataaccaattttaacgagatttgttgcatgaaaagccgattgtttttccttggcagtaacgaaaaaaaattagttactttttaaaaactagggttttgaataatatcattaaaatcaaatagaacgaactagggttttggcatcatacaccgcctcattcaattattaacaaagctgagtcttcttcacggagaaatcacggctgagctaggtctcatataccttgcatcaatatcttgggcctttactaggatcggagatacatcaaacataaaatacttctcggttttattttctctttccttatgtatatgtgaatgcctttaaaaattttgattgccttttttctcgttttggaatagtcatgagaagctgagaaccaaaaaggaaatatttctcacctttgcaactagctagatggagcttatggatgcaaaattcgttttaaaacacattgtattcggatgatgtcaaaatatttcacattcatatagcaaattcatgtttatatattccgatattaactttaaatattaaaacttatatgctgtagattcatatccgggtgaaaacacgaaaggacttatgatggaaccattatatggaacgacgtcatgtggaatatcaagttatttaacttctcgcgagtaagactataaaaagtaatagaataattagtaactaacaatatcagataacgataggcagatgatttggtaatactattttagtatcactacatcacaataaccatactagcatatacgatatacaaattaataaattatcgtgcttaaaacaaaaacctattatcaaccaataatttcttcgcatcagtggcgacaattttttcagccccagaatgattctttgaagaatagtcaacaaagattcctaatttcaacaattctgttcaaggaaaagtacgaaacaaattctactgctagctagtttctctcatgtatatctaaattctattactagtaattaagatctttgaaatcatgccaactgctacatttattttctcttgaaaatcccaactaccttttttttgatcaaaaaaaaaaaagactttagagttcaaagcttgaatttagagttattatgttttaaattttgacagttttgataattttcttcattttaaaatgattttatattttccgtaatttttttctatatttcatatattaaaaaaataagtaatggattagtagctaaacacaagaagttggacaagacccgacaatttaatacgagacgcgttgaccttgaccttgacttttcgtcagcacaaaacgttatctacggtagtcactgagagagaacaaacaatcaaatttgtttcatatatcactcaaagcttgatgagaagaaacacagatcaagaaagcccaattatgtcttattactcctctttcttcttccttttcctcttctcctttctcacgagtttcagagtttctgctcaagatcccacttacgtataccacacctgtcaaaatacggcaaattacacaagtaacagcacttacaacaacaatctcaagacccttttggcttctctttcttcccgcaacgcttcctactccaccggattccaaaacgccaccgtcggccaagctccagacagagtcaccggacttttcaactgccgtggagatgtctcaacggaagtttgccgtagatgcgtctcctttgccgtcaacgacaccttaactcggtgtcctaaccagaaagaagccacactttattacgatgagtgtgtacttagatactctaaccagaatattctctcgacactaataaccaccggtggagttatcttggttaacacccggaatgtgacatctaaccaactagacctgttaagtgatttggttttgcctactctgaaccaagccgccaccgtagccttgaacagttccaaaaaattcggtacgagaaaaaacaattttactgcgttgcagagtttctatggactggttcagtgcacacctgatctcacgagacaagactgttcgcgttgtctccaactggtcatcaatcaaatacctactgacagaattggtgcaagaattattaatccgagctgtacttcaagatacgagatctacgcgttttacaccgaatccgccgttccaccaccaccaccaccaccgtcaatttctactcctccagtttcagctcctccgcgatctggtcagagctctgtttttttcctctgttttttttttttgccctgatttcttgaaattggcaaaaccaatatagagagttttcttctatctgatttttaagcaaataatctttgaaatgcaggaaaagatgggaattcaaaggtgttagtgatagccattgttgtgcctattatagtggctgttctgctttttatagctggttattgtttccttacaagaagggcaaggaagagttattacacaccatctgcatttgctggtaaagatttcaagtgataaacgatctttaatgtcaatgctcagcttgtttttcctgcttcaaagactttcattgtgtaacaggagatgatatcacaacagcagactcactacagcttgattatagaacaattcaaactgcaacagatgattttgtagagagtaataagattggtcaaggtggatttggtgaggtttacaaggtaaattatagttcccttgagctgtgttttttttttcttgaaattttaagccaacacttttggataatgggatgatgctgatgaaaacaacagggtactttatcggatgggactgaagttgcggtgaagcgactatcaaagtcatcaggacaaggtgaagtagagttcaagaacgaggttgttcttgttgcaaagctacaacatagaaatctggttagacttcttgggttttgtctagacggagaagaaagagtactggtctacgagtatgtgcccaacaaaagtcttgattacttcctctttggttagttgcatttaatgctttgtttcaatgattcttgatacttggggttacgaatgtttagagatctcattgtgatttatggatgtggacagaccctgcaaagaaaggccagctggattggactcgacgatacaagattatcggtggagttgctcgagggattctgtatcttcatcaagactcacgactcacaatcatacaccgtgacctcaaagccagtaacattctcttggacgcggatatgaatcctaaaattgcagattttggaatggctaggatctttggattggaccaaaccgaagagaacacaagcagaatagttggtacctagtaagtcttcctcataacttctcataagttgaagttttctgaacattcttttgttaacatagtttttgttgtgggtttataagttgaagttttctgaacatcctttggttaacatagtttttgttgtgggttacagtggttacatgtctcccgagtatgcaatgcatggtcagtactcaatgaaatctgatgtctatagcttcggagtgttagttcttgagattataagtggcaagaagaatagcagcttctaccaaacagatggtgcacatgacttggtctcatatgtaagttttaaacctatcaagttccatatttacctgaacatagttgcaagtgttgattgattgaataatattctaggcttgggggctttggagtaacgggcgaccattagaactcgtggatccagctattgtagaaaattgccaaaggaatgaagttgttcgatgtgtccatatcggtcttttatgtgttcaagaagatcctgctgagcgtccgacgttgtcaaccattgttctgatgctcactagtaacactgtgactttacccgtgccacggcaacccggtcttttctttcagagtagaattggaaaagacccgcttgatacagatacaacgagcaaatctcttctagggtctgttgacgatgcatccatcacagatatacatcctcgatgatgatgagtttttcccttcatacctgattcctgaatctattggtgttgaaaataagttaaaaacttcttttgttatagaatgtttgtattgtaattgtaaccacaagcaagtataagatatataccatttacacgtttctccatgaagacgtaacagtgacttttccctccaaattaagcttacacaacgatctagcaggtaatttgattcagcatgaagagagtaaaaccagtaatcgagaaacgattcttaaagaactgtgaactgttcataagcattttacagtggacactgtacaacatacaattacagataaacctgctatgtttcttatgtccgtggacaaataatataaatgtcatctgaccatttttctgttacaacttttaagctatgatgaggaaccacatcaatttttacgaactaaatgaggaagacttgcttgtatactgatcagactctgatccttcagataccagtttcagttgcctgcttcgtgggaaaaatcccggtaggcgaggcactggtagagtaattgtgttactagtcagcattaagatgattgttgataacattggacggtcttctggattttcttgaacacataacagcgcgatatggatgcacctagtgacttcattactctgataattccttccaaaagttggatccaccagctctaatggtgacttgtttctccaaagcctcgaagcctaatacaatgaacaattaagtaccttggtcatatgttttaaaatgttaaattgttgaaagttgaggactttatgctcacataagtgaccaagtttcctgcagtactagtttcatccatctggtagacgccgctgtttttcttgccgcttataatctcaagaactaagactccaaagctataaatgtcagatttcatggagtattgaccatgcatcgcatactcgggagacatgtaagcgctgaaaaacatacaacacgggttaatatgcaatagaaaatggtttagtgttcagctactacgagcagaacttactaggttccagcaattctgttcgtgtttccttgagtttgctccactccaaaaatagttgccaatccaaaatctgcaatttttgggttcatgtctgcatctaagagaatgttgctggctttgaggtcacgatgtatgattttgagccgtgaatcttgatgaagatatagaatccctcgagcaattcctccaatgatcttgtatcgccgggtccagtctagctgactttgcttttccgggtctgcacatatcgacaatcaatcagtataaagctgaagcaggatcctttgaataagaaaaattattgacaggaaccataccgaaaagaaagtagtcaaggcttttgttgtggacaaattcatagatcagaatctgttcctctctttccaaacagaatccaagaagtctaaccagattcctatgttgaagttttgtcacaagaacagcctcgttcctgaactcccttgtgccttgtcctgactttttcgacagtcgcttcacagctacatcagttccgttagaaagcttaccctacgtacaatgaatgaaacaaacattgttggttatttccataaaccaatatgaacttagaaaaaatggaaaacagagaccttgttaccttgtaaaccgcaccgaatccaccttcaccaagcttattacttgttgaaaacttgttagttgcggcttcaattgtcttaaaatcgtataccaatgaatctgtagttgaaatatcactttcagctgcaaagaatgggtgtattagtttcgtgtttcccgtcttggctacgggagtatacatgctgataacgaaaggaaacaataaagaggtaaaacacaaagaaactaacattcagtcttagttctttggtaggattttcttctccggaaaagaacaaatcctaaaaccagcagtatcaagatggcaataacagtgggaacggtgatcgccacaacaactccagctgagattcctttgctatcttctcacaacacatagaaaaacaatgtcatatatttaagtttttttgttacaatgatagttttctcaggtggaagactaaccattgttggtcgggttgtcctgatcacctgcaggttgtggcacagtcacaggaggttctggaggaggagaagccaccgtaagattatcaaaagcgttagaatatgtatacaaatcccaccgcaaaaagcagcttggccgcataacaacacctcctcgcttctggctacagcacgactgatagtcaattgcgctttgtcgcagacagttttcacaatcaccggaggaaagatccggcgtgcattgcatcaatgcatatatattcaggagaggtgtcaagactgctgaatcagctgagtaatggttatcacttgaagaaggtgtgctttttgctgtggaagctgcagaaatcatacgacccattaatccttcccatattttcgtaaactctgttagatttgagtctaggtctccagtgttggtgagccaatttcgcgggttcagatcagcagatcctgagaaagaagtgttggagtagcgcacatagcaaagcgttggctcacctggccatgaatacgcctctgtttggttaggacaattctttaaaaaaaattcagactctttcttgatacaatcagaacagtcttctgaagttgatcctgggatgcacatccctattgcgtagacacggttcggttgttgtcctatggaaccgttgtagtataagccgtcttggtccgtgacatttgaaggaagagaagagaggatgagacggcgatttacgtcgtaagtaccgttgggtctgaaagtccccttgtccgtcgtgcatgtttgtgctgaaactgaagcaacaccaaaacttatgaagaaaaaacagaggactgaaaacaaactcctctgcttcattgtttcttgaagattaaagcaaaagctagatctttgtgtttagtgtttgacgcatctgtacgtttcttaccagtttaaacaagcaaaatcgaagcttctctccaaaattttcaaatattgaattcgtcaaattgatgacagtggtcctgaaacctacaaatatggtcacgaaaacgagtgtcaaaagtcaaagtcaatgtcaaaagctaaaagtcaataatattttctttgttcacattatataataagggggttgttgaatattgattggaatgttgactcagataatgacataaaggataaagtattcatagaatcaaacccagtgacgcagaggcagatggagaggaacaagaaaagtattgggctaaagtgtcagtgtcattaatttcacaaataaaccggcttttgtcataggctgctcagcacattcccagactatacatatacatttggcaatcaaagcattgtaaaagcctaaaagaaaaaaacagaagattagcataccttttttcgttgtgttctgttcgtctcaatttatagcctaatcagtgtctcttgggttgagtcatgtaagaatgcgtacatatgaatcacgccgaaaccagaagaacatgtcgtaattggctgaaacagagtagcaacgaaccactagtgtgagtaacaacagcaacaattgagtccaaatagaatgcaaaatatttcataacaaagggctgatattacagtgtagacattgatagagtttgtttataacttcgagccagtctacaaacagataaaacacctaaacatggcttctgactgtttcaattatcttcaacgaggttccagatctgtaatggttacatcattgatagtttgggaagtgggcctgtttgcagactggctcgacctccaaagctggctgtacataatttaatcatcaaatcatgaacacacatatttaccaaagcttataaataaggacacaacagattagtgatagaggtctatcaaattgatgcagtattatcccatgtttgctctcttaccccaaataagcatcggagacggattacatttcccaccggaaaacgcagttggcccggagcccttagctaaatcgtgattatgccattaaacacatcaaaatctaacaaaagagcacaaacaaatccgataatcaatatcattaaacgccattagaaccagaatgctaaaccctaaatccgagctcagaagaatgcgcaaaggctgattccgacgaagagagtgaagaagaaaagtcggtaatagcgtttggtttccggttcatatggtataggtttagtaaataaaccggtttgggtaaatattcgtagaaattcgtctaccggtaaagccaaaccgaatccgtctaatttacagagcttttttacatgcataacaacatttgcgttactactatacatgaattggtatgtttataaaattttgaagccattcgtatcagaaatcttcaatacaacaaaccaatgttacaatgtagaaatgataaagagtttgtatgaaaaataactttgagtgactcacaaatcttacataactatggatcatcacatttcattttcaagtgaaataatacctcacatgtggaatctgcgttgttttcagtaacaattccaatttgtcaattggaacagcaacttcaacgaggatctagatttgtaatggttacatcatttttagtctgagaagtacatcccattgtaaattggctcgacaaaaagctatcacgttctttgttttgcggaacaaagaatccaggtggttgaggaacagataaaatgagggaactgttagtgagcatcatcatgattgttgacaagttgggacgatctttaggatcttcttgaacacataggagtgcgatgtggatgcatcttataacttcttctgtttgacaattctctgatatggttagatccacgagctctaatggtgatccgtttgtccacaacctccaaacctgtacaacaatgtaatcattaatcaataactaacaaacaaagttagattggatcatgcactaagtttcttctttggtactcacataggtgaccaaattttcagctttagtatctgcttggtaaaagcttctattcttcttgccacatataatctcaagaatcaaaacaccgaagctatagacatcagatttcatcgagaactggccatggatcacgtattctggaggcatgtaaccgctacaagataaaacacacaagaaagattaaattagaatgtccaagaaaatattcttgaaaacttctgttcataaggttagtattttacaaagttccagctatcctttttgtgttagctacactttggtctattccagatatcctcgccattccaaaatcagcgattttcgggatcatatcggcatctagaagaatgttgctggctttgagatcacggtgtatgattgttagtcgtgaatcttgatgaagatatagaattcctcgagtgattcctccgataatgttgtatcgttttgtccagtctaactgcccttgctttgtaggatctgcacgtacacaagtagtcatgagccacttagagattacaatcatatatgtctactcagaatctcaggttaatatgtatatggtaatgccacataccaaaaaggaagtagtctaggctcttgttggggacaaactcgtaaacaagtattttctcctctggttccagacagtacccaagaagcttaacaagattcctatgctgaagtttggcgacaagaacaacctcgttcttgaactcttgtgcaccttgttcggatgttttcgatagcctcttcactgcaacttctgttccattaactaacgtgccctaaaaacggatgatgatatgatcaatttaccctaactctgtaatgaaccaggtagctagagaactaaagactatatctataccttgtaaacttctccaaatccaccttgacctagcttgttagtctttgcaaaattttcagttgcaacttcaattgtcttaaaatcgagttgttggaagtgtagagtcgtaataccagctgcaaaatcaaaggatacactcttatattactaagaactttgaatcatctgctagtctaatcaatattcttagttcaatagactatatatatactaaaagcaaagaattttttttttaacaacactcacactggtcaagatcaatttcttgataagattttctcctccgggcaaataggcgagaaagaacaagaagtaccaagaagatgatagcgaccactataatgggaacaacaattgcagcaatagtttccgttgaaaactttccgctatctaaaaagtagaaaatcaaaaccacaacatataagttttgaatcattttgacaggttcttgtgaattactcataaattttgcaaagaattcacctttcttgattaatgacggtggaggttgtgacaaaggtcttgctgtcataacagtaaaagctccaccaaatggatataactctgcccggaaagcgcaacttagcctaacgatagagccgccttgacgtccaaggcaacaactctgatagttaacaacgctttctgttaaacagagattacactcagccggagacaaatcaggagtgcattgcatcattgcatagagagtctgcgaatcaggcaaggcggctacatcagctgtatagtacttagcaccagaccatgttgcatctgtgcttgaggaagcttcttgtaccatacgttgagttaatctactccatactgtattgaattctgtttcattcgttttgtaaccatgaatactgaggaattcacgatgcggctctaactcgaacgaaccaacaaaggaagtatcggagtatcggatcatacaaatagttctgtttgcgatccagataagagcattttcttcggtgaggcaggtttctaataatgtattggaagcagacaagagacaacctatgcaactctcttcttcagtacctggaagacacatgcctacggcatatactctgttaggagcttgacctattgaaccgttgaagaagccaaagtgtgatgtgacattagaaggaagcaatgagagaataacgcgacggtttgtgtcgtaagtcgaattaggtataaagtaggttgtgtttatgcatggaagagtttgaagtgcagagacaagactagtgctcgtgaggaaaaaccagaggaatagtaaaggcatttttattggttttgtgtttgtttttagaacagcatgaagctattgaaatacctattaatggaaatttttgggtattaatttccacgaacagaggtttgagaatgactgatcatacattaggagacatttttcttcttggcatgttttcgtggaaataagggtatatttacaaaaatggactagaagacaaatgtgaagaggacttgttacttgttagcttcttcacacttgtaatatctcgttttggaatttttgtgaccaagtctctcttattggatgacctgtccttgtttgatgaatgtaaacataatgaaaaacaaaactgaaaacaatggagtatgaaatgagaattaattcaatgaagccgagttaatatgcatacgagctccaagtgtactgaaatatgaagttgatttttgacaagttttttttttattatgggtcaggtatcattatttgaccaattactaattaaatcgatccagtatctagaatccagtatctagaatcttgtatatagcgtcttcaagtcctctagagaattatgtgggataaatatctacaagtgtatattattagtcccaagcctcatcctaaaacagagtcgagaaaaaacagaggatgggcagaggttgattcaaaacagagaaggaaccgtcaactaaatagcttacttccataccaagtaaacttttaatatcagtccacagaccacagtgtagtggaagagagctggtataagcatcaaagtgattgaaggcaatgtttgagaaaccatctaaacggattttataacaaagagctcgtataaaaatgtagggaatagaaaattctaagtgtacataactactttgatgagtatctcacaatttacacatacataactttatgaataattcataacagtttaaactgaaataccaaaaacatagtttacttcaaacaagttccaatgtctcaatggaacatcattttcaacaaggaccaccttccatcattgatattttgggaactgggcctcgtcgtagattggtttggtctacctggaatgaaggatggaggtggtttaggaacaggtaagatgagggaattgctagtgagcatcgacatgattatcgaaaagtcaggacgatctgtaggttcttcttgaacacataggagcgcaatgtggatacatcttatcacttcttcactcttataattctctgcaattgttgcgtcaacgaggtttaatggtgtcccgcttttccataacctccagacctgaaacaaaattcaatgatctaatccaaatcttacagttacaacaacagtgagatacgattatagtactcacatatgtgacaaaattctgaaccggagatgagaagctcgtgttcctcttgccgcatataatctcaagaactaagaccccatagctatacacgtcagatttcatcgagaattcgcctagttccatatattctggggccatgtaaccgctacaagattaattctactttggtcaagaaaatattcttgcaattaaagttcataaccatcatgagtaatatataagagaattttacggagttccggctgcattcgctgtaatagctacactttggtccatcccaaagatccttgccgtcccaaaatctgcaactttcgggttcatatgagcgtccaagaggatattacccgctttgaggtcacgatgtatgattgtgggttgtgaatcttgatgaagatatagaatccctctagcagttcctccaatgatcttgtaccgctttttccagtctaactctccttgctttgtagggtctgcacaaattaggatatgagatcaagaagtagtgtttcagagaatataaccctattatttgtatcttttcttaccaaagaggatgtagtcgagacttctgttgggcaaatactcgtagactatgatcttttcttctcctttgacagaaaaaccgagaagtctaacaagatttctatgctgaagtttcgcgacaagaacaacctcgttcttgaactctttcttactttgttctgttttttctgacaatctcttcactgcaatttcctttccgtcaggcaaccttccctaaagatgagacagtatggttagcttactttgactctgtagttttaagttttttcaagagaagtaatgaaacaagtagctaaagaaatgataccttgaaaacatgtccagatccaccatgaccaagtctctctgaaaaattatttgttgcagtttcgatcgtcttaaatttgtattgcagggagcgtacagatgtaataccagctacaatgttaataaatgatctaattagttccatagacaatatatttggtaaaagcttagaggccaaataaaacaaatgaacaacactcactttgattaagttcaacttcttgatatggtttttccttccgagcaaaccggcgagcaagaattcccgagatgatgatgaggatgactataccaaccacaacaattgctagaatagttttcattgagatttttccgctacctgtagaatgaaaaaaaaaaccttataagtctttggacagagtcttgtgactgtaactttaagtcataagtttgcaaggacttactattgtctctcttcttgtcccggttgtctgcagaaggtggttgtgacgcaaccacaggacgttgcagtggaggaggagaaagaggaggagtagtagccaaggtaatgttatgaaaagccttagagaatgtaaaaagctgccaccggaaaaagcagattggccgcataacatagcctccagtattatttccacagcatgactggtactcaagtacgcctcgttggagacagttgttacattcgtcagaagaaatatctggcgtgcattgcatcaatgcgtagatattctggaattttgtcaagttcgcaaaatcaactctgtaatggttatcactggacgatggtgtgcttcttgctgcggaggctgcagtaatcgtacgagatgttaagtcttcccatattgtcttgaactctgttagatttgaggcgatagttgcagtgttcaacaccaaatactgcggctcaatctcccaaaaagctgcagatcctgagaaagaaatgttggagtagcggacaaggcacagcgttggatcaagtgcccaatagtacgcgtctgtctggttgacacaatcctgtatcaaccagcctgccgcgcccttgatacagttagaacaatcacttggagttgatttcgggatgcacatccctaatgcgtagactcgatcttgctcttctccaatggaaccgtagtagaaaccatctcgagacgcggtattgttaggaagagaagagaggataagacgacgatttgaatcgtatgtaccgttgggtgtgaaatatttacggttctctatgcatgtttgtgctgaaacagaagcaacaccagaggctagaaggataaaacagaggattgataataaactcctctgcttcattttttgccttagagattatagctttgttttagtgtttaaacatctgttcgttccttagcaatttaaacagcaattgttgtttctcagaaactttctaaatgtcacaaaacaaaagatgaaaatcaaaagtcttatttcatttttttctgttcatacagtattattatgtttaaatcctttcaaataataatgtagatatgtactaggtcaggaggctggggtcgaggtaccattaacatttaacactcatccacggccaaattacgtagctttttcctaaccaatttcttacctttaaaaccaaaacgcattcaaaagacgtcgcaattgccacgtaacaaaccccttaaaaagcaccagtcagccaccagttcctgatgagtccttactctttcgtgagctctaagttaccttagctcctattataacctagcgcactatctccattcgctaataagacgtgaataatgaactattcagttaatgatttagatataattaagcgttaattctttaaaagattatccctagtttttttttaatcgctaattctttgtcttttgtttacgcgttttttatagcttactaaaaaagaaatcgagtttctctgaaaatatctaaatactgaattcgtcaaactgataacagtggtccttcaaccctccatgttcgacatatacggcgtgaaacggacccgcgacaaaagtcaatggttttgggctagtggaaaacgttgaatttcatcatcattcctaaccatatgtgttaaccgttgaacccaaaaacttctaagtctcctatcaccaaacctgacgaagcaaaggcagatgcagaagatcagatgatcgttgcagagggctatgtattgtgtcattggttttgcaaattaaccggttttgtagtatatccttctttcattggttttgcaaaaaagattcagttacttgtgtagcacgttaccagagtgatgaacctatcacatactcccatgtcaaaccaaacccaaaaaaaaattgaattgtacaccattttatagaactaccaagcatatcctagtcacacaagattgaagagattatagggtttatagaagcatcaccatggcatacactcagatcatttggtagtgatcacacaatattgtacagaaacataaacggctcttgagattacataattaaaataaaataaaaaggctttgtatgtagcgatcatgaaccgtgctagaaatagcccggctagaatcgtacatgtgacgagtacttcgcacaagcggattgaggttaaagcacaaaactcaccccccttacctgtccatgctcagcactgtcccttccaatctcgatatccggcttgccaaccttttaccggaaaaggaagttatgcggttcggacaaaaccttatatcatcaaaccatccccatttttaagaaaacctttttatagatagtataaatatgttacaaacacgcacaaaacgatcatataactccagctatcatacgacttgtcaagtcgtcccacaggttatcaaagttttcggatccgatatctccagtattgtacatgcatatatactttggttccatctcaagtgatccagaaaacgaacggttggagtaacgtaccatacaaagaatcccattttcgggccaggcaatgccttctgtctggttggtacattcctctaacacctctttagaagcaaggtcgatacagtttgagcaaacctttggttcaacaactgagatgaacatccccaaagcatacacccgatcatagacttggccaagtgaattactgtagaagtcacctcgagctacaacatgagaagctagagaagagaggagaaggcgacggtttgtatcatacttatcattgggtgtaaaaacgccagttttcccgcttggtacaaacacaacaggaaagcctacaaggagaaaacaaaagattttaaatatattttcaagatcatatattgttttggtttaggacagcaagcaattgtgtttgcattgtacatgcatatattcacgtccattaaatttcgatcgcaagttttcattgaaccgttggtcgcatgtttctcagtcaaatgtttctattcgtttgactcgtgcaattcctgaatcatgtggcacttaaaagaacacgtcgtagaattttcaacgcagagataattcaacacaaatacaaaaactttaacaaagtggaaaattcaaccattgattggaaaaatcagagcaacgctatcagagatgagaatacgaagaattaaagacaaaaaaaaacgaagactcataagctgcttcacaattcgacgaaaccagttttcaacgcagcaaacaatggtgtctacacacaaattaaaaccaaatttcagtgatcaaagctgaccgagacatcagtttctaaagataagcaaaatgataatccctaattcctaaatctgagtgttgagcaaaaacagagtatcagtttccggtttacataatatcgtttttagaaaataaaccgagttaagtaacattcatatcaaatataagaccggtttggatattatacgtcaagactcccataaaacagagagctgatattacaacgtaggaatgataaagatacttagatacataatcattcaaatggaacaatgtctcactggaatagcaacttcaacgaggttcaaaatctgtaatggttacatcattgatagtttgtggattggacctgttcatagagtcgaggccatctcgttcttggttgcttattattggaaagaagaatccaggttgttgaggatcaggtaaaacatacgaattgtttatgagcatcatgttgattgtcgacaagctggggcgatctgtgggattgtgttgaacacacagcaacgcaatgtggatgcatcttgtcacttcttcggtttcacaattctccgaaatggttggatccacgagttctaatggtgaatcgtttctccacaacctccaagcctgtaaaataatttaatcatcaatcaagaacgtatatacagttaaaaccacaatttatcatactgttggtactcacgtatgtgaccaaattctcaactgtagtgtctgactggtggatgaatctgttatttcgaccacatataatctcaagaactaagactccgaaactataaacatctgatcttgttgagaactgaccttgcctcacatattctggaggcatgtaaccgctgtaattaagagtaaaattcacaagcttcaagattatggacattactgacggaaaaaaggttcgagatgggtaatgatggcatataccgtgtcccagctattttttttgtattagctccactttgatcgatcccaaaaattctcgccattccaaaatcagcaatttttgggttcatatctgcatctaggagaatgttgctggctttgaggtcacgatgtatgatcgtgagccgtgagtcttgatgaagatacagaattcctcgagtgattccccggataatgttgtatcgtttagtccagtctaactgcccttgctttgtagggtctgcacataaaaaaaacgttgttacattcactactttagatttcagttaaagaagcttattaaaattatcttggcagttggaacacatctgttttatatggtaattctgtaaaggagaagtgtagattaaggacataaagctctaatgttgaacctatatactgtacattgtaaatcattcccttctattaatgaaatcattctgctgacaattataaattgcacataccaaagaggaagtagtcgaggctcttgttggggacaaactcgtaaacaagtattttctcttctccttctagacaaaacccgagaagcttaacaagattcctatgatggagttttgcaacaacaacaacctcatttttgaattctcgtgcaccttgtctcgatgcttttgacagcctcttaattgcaacttcagtaccgttaaggacaccctgcataaattgaattagacagcatatgtcatcccattgtctagatcccttctgcaaatttttttacagaaactaaagatcaattaggtgctcaaattttttataagatgataccatgaaaacttctccaaatccaccgcgaccaattatgttgctctccgagaatttatttgttgcatcttcaatcgctttgaaatcgaattgcagtgagtgtgtaatggtgatatcagtgctggatcctgcaacttaaaagtgtagagttatgatggaactagaggcagcagtatcactcctgtctgcaaagagacagcctttggattgtgcatttgaaccatttcttttcaatatcccctaaaaatatcaagatccgcaaattataaaaaaaatgatggataaaacacagaacaactcaccttggtatgatttcctcctcctataaacaacaaatcctagcgcaagcagtaccaagaagacaacaatgacagtaggaataatgattgcccagacaattcctatcgagattgttatgctacctgcaaaagtccgaataacgggcaggagatgattgaaatgaaagatacatagttcatcctctgtttgcaaaattttaagccttttttagatgtagtatacaagtaagtatagttttgctattggaagactcacctttcttggtcgctgtattggttactgccggaagcgtgggaaatgctggggattgaggcggaggtgccaacgaaatacgactaaaagcctcagagaagggaaaaagctcccaccggaaaacacagctggctcggtacacaatgccaccttgctttccattgcagcatgtttcatagtcaccaacactttgtcttaaacagatatggcaatcctccaaagataagtccggagtgcattgcattagtgcatatattatctggaaagctgtcaaggctgctacgtctgctgcgtagtacttgcgtttagatgatggagaagtagtactagctatcatacgacgtgctaactcttcccacacttgatcaaactctgttaaattggatgtaatatcatccacgttgtggatatagaaatgcggttctgccttgagtgatccaaaaaaagaactattggagtatcgtaccatacacaaaatccgtttctccggccaggccaggcttctgtctggttgagacacgtgtctaataacagattagaagcatattcaatacagtcggagcaaacatctggttcagcaccttcaatgcacatccccagagcatacactcgatcagggccttggccaatcgaagaattgtagaatcctcctcgagctgaaacattggaaggaagagaagagaggagaaggccccggtttgtttcatacctactttgtggtacaaaaaaccctgttttgccgcattcttgtgcagacaccacagcaaagcctacgaggacaaaccagaagattggaaagagattcttcaattccattttcaagatagtacagatgatatttacgttaggacagcaagtaagtatgaataatatgcatacttttttctgtctatcacctttatcaaaaaaaaaaaaaaaaaaaaagttatgtggagtgtggaccatcagtagacaaatcaatatctccgttgactcatttactatttcggtggagtcaagcaacacgtcatagacaaattcgaacatcaatctgtccctttcttatcagtttacacagaaaaccgaagttttttctctgaaagttccaagtgttgaattcgtcaaactggataacagtagtcgtttaaccagtctacacggtcctaaaagtaaacgctaaagtaaacaaagtcttattagctgcttcactattaatatctcttcggcatttttaaaccaagtctcctctcttttgaaatcttcatacaaccaagtctcccgaacagagtggcgaaagcagcaatcactggagtctacgcgtacaaatgaacacctaatgttattgactaaagatcaagcaatctaaagaagcaaaacgaatcaagtaatctaaatatgaccgccattaaaaccaaaatgctaaccctattttgtcgaaaacggcatatttcaatcttatcaattttttgtatatatatacaactttgatactaaaccgattttcatccaaaaaaaacgttcatcaaatgcaactgaaaattagtattagtcgaaatagtgttactttgagtcacacatatcactaaatctatgtaaatattgctttaaaatacaaacattaatatgtaaatctctcttgaggtcaattcaagagcgaaaaagttgttaacttgaaggttaaccaccatgttcaaagaggatataaatcagtgtgattgatgtatcgtcaataaatcttggaacagacttggtggtcgttggttgaagtgggtccttttcagttcaactctgaacgggaaaccctggttgtagaggcactggtaaagtcacagtattacttgtgagcatcatgaaaatggtcgacaagatcggacgctctgcaggatcttcttgaacacataaaagacatatatggatgcatcgaaccacttcactcttttggcaattatctataataattggatccacgaggtctaatgctgttccattactccaaagcctccaagcctagaatattaatcaataaatcagttcttgcaaacatttcttattgttaacgaggtaaatataatccttaatggcctttaaacttacatgtgtgaccaagtcatgtgcgccgtctgtctcgtaaaagctgttgttcttcttaccgcttataatctcaagcaccaacactccgaagctatacacatcagatttcaccgagaactggccatgtattgcatattcaggagccatgtaaccgctgaaatccaccaaaaaactttagtatgttgacaaaatgatgtttaacaaacttcaacttctaagaagttaaatgcaattggaagacgacttacaaggtaccaactattctgcttgtgttttcctgggtttggtccattccaaagatccttgccagtccaaaatcagcaagtttgggattcatatccgcatccaggagaatgttacttgctttgaggtcacggtgtatgattgtgagccttgaatcttgatgaagatataaaattcctcgagcaatccctccaatgaccttgtatcgtcgagtccagtccagctgattttgcttcgcaggatctgtgtgagatattgcttagtcccccaagtttcacgaatagctacagaatcattgaaataaagcaaaaaatgcaactgaccaaagagaaagtaatcaaggcttttgttgggcatatactcgtagaccaatatcctttctcctcctcctatagaaaatcctagaagcctaaccagatttctatgctgaagctttgcaacaacaacaacctcgttcttgaactctgtgtcaccttgtcctgaagattttgacagtctcttaaccgctacttcagttccattcgaaaatgtaccctattcgttttcatcaacatcatctcgttatccaaatgtgttgagttgacacaacatttcaattaaacgtacaaagttaagagaatttcgtagtaatagtaccttgtaaacctcaccaaatccaccttgacctatcttattattttctgaaaacttatttgttgcagctcgaatcattctataatcaagttgcagcgactcggttgttatatcatctcctgttgcacaataaaagtctctgtgatcagaaaaatagcaaacaagattatagtcaaacccaattgagattgttaatcatttgaatgttaccatcaaaggctggtgcattatcagaagaattcttaaccctttttgcaaaacaataaccagctatcaaaagtagagcagccacaaggatggtcagaacaattgcaaccactaacacatttgaattccaacttttccctgcatttcaaagatcattggcttaagatttgatagtggcagaacaaacctaaaataaattgaaaggactaatttcaagaaatcagggtaagaaacagaggaaggagaaattaacctggtagtgaaggagatgtcaccagaggagtagacgaaggaggtagcggtggtggtgcttgttgtgttctaacagtagtttcgttgtagaacgcgaaaagctcgtaccttgaattacaactagagtaaagagttcttcctccagttttgtaaagaggcattaatttgatggaactttccagacagctgaagcagtcttgtcttgtaagatcaggagtgcactgaaccaggccgtacaacgtctggagtgctgtccaagtggcctttaccgtatagaactttctaggactgctcgccgctttgacggcagcttgattcatcgtagacgacacaaaatctttgaaccggttcatttgattttgatcaattgaaatatttccgttcatcctgatccatgctccatcgtatgcaagggtcgagagaatattctggtcagagtatctgagcatacactcatcataataaaacacggattttctctcactcggacactgaacgagtgtgtcgttgatggagaaggcgacgcagttacgacaaactgccggtgagacgtctccgcggcaaaggaaaagtccggtgactctatcaggggcttgtcccgccctggcgctttggaatccagtagagtaagaggcgttgggggcagaaagagaagacaaaagggttctgagattagtcaagtaagggctgtttcttgaataagttgtcgtatttgggcaaatatgctttatatagaaaacattttcaacagaagctgtgaagctagtgaggaagaagaaaaggaagatgaaagaggcaccagaagacattgttcgatttcctcagcttttgtttcagatcatgaatctcctaattattatgaatattttcttcttctctctgttacgtgaaacagaggattgactactactataagtcaactgcttttgtctttttaagtgggaaaacaagacaggaagagtttataatgaaagtgaccattagatttttggcttatgaaaagctatgcatattatcattaacctctaatctcaacgaagatcaacactcgtgatcgatgcatcatcaatggaacaagcaaacgacatggtagtagacggaccaggctcaagtctctcggctaatgggtttggctcggatctgaccctgaaaacaaatccaggtaattgaggcacgggcagagtaagaaaagtattagtgagcatctgaaacactgtggacattgttggacgatctgcaggattttcttgaacgcacaataagcttatatggatgcatctgatgacttcatctttatcataactctcccccatggccgggtctacaagttccaagaatgattcgttgttccaaagcctccaaacctgttaagtcacaataaaccaatgttcattcttgtatcaaagtttaaagaggtcaaaaataagttcaagattgcattggctttgtaggactaacatatgtgaccaagtttcctactgaaccatcaatctcatggaagctactactctttttgccaacaataatctccagaatcaatactccaaaactataaacatcagatttcatcgagaactgcccgttcgccacatattcgggaggcatgtaaccgctgcaaaacacagcacatatcactttaagttttattagggaaagaaaagggaatagacagagtgtaattgaagttaacaattacttacaatgttccaactactcttcctgtggtagcttcagtttggtccactctaaaattcctagccacaccaaaatccgcgattttcgggttcatatcgacatctaagagaatgttacccgctttgaggtcacggtgtatgattgtaagccgtgaatcttgatggagatataaaatccctcgagtcactcccctgattatgttgtatcgtgttctccaatccagctgacccctccttctatggtctgcacatccaacgtatagagccattagactatgggtaagagatcaaaaacaaatgtttcagagaatctaatcctatatatcatatgtttcttaccaaagagaaaatagtcaagacttttatttggcatatactcgtagacaagtatcttttcttctccttcaacagagaaccccagaagtctaacgagatttctatgttggagctttgctacaagaagcacctcgttcttaaactcttcttcaccttgacctgaaattttagacagcctcttcacagcaacttctgttccattcggaaaagttccctgtcaattcatatgatcttcactcactatcagaatttcttatctttttttttggcaactaagtttataacacaaactagtagttgagaaagtttaagaacattttgccttaaaaacttcaccaaatccaccatgaccaagcttgttactcttctgaaaattatttgttgcagcttcaattgctttaaaatcgaattgaagtgaacctgaagttgtaatatcatctgcagcagaaagcatatatacatagtgttatggtggaaacgtatccaaagggacattaacagttttaatgcaaatagctgtatagtctcttaccatcatctggcggtgcagtaccataagtggtcattgacctccctgcaagagaaatataaccatcgttgaagaacagagaaagagacaactgaattgacatatttaaaaacgtttatgccctgaactcataattgttaaaacaaaaaaaaaaactcactttcagttgcaaactcttggtaggcttttctcctcctagaaagagcataccctagaacaagcagtaccgtgataaaaaaggcaagagcaacagtgattccgaggatatttcttgtagaaatctttccgccatctgaacaaggccaaatcacctacgattattgcgcttaagggaaaatatgagactaaaaagctagtaccgtcagatagttctgagattctacctttttcacgaggaagcgtgggagaagccctatactcaataaatccatagaattgatagagatcccatcgcatataacagctcgggctgaaactatggccacgaggtttcccactgcaggacaacttatagttatccacattccctcttaaacatctggaacagttccatggagatatatccttactgcatagcacgaaagcgtaaacggtttgaatcccaatttttccagtgccggcaccatagaattttgggtttggcgacgagatagcatcagctatcacaccaagcatcaaagcctcccatttttgataaaactctgtcaagttgacttggaaatctgtagcattgtaattcttgaaaaatggtgtcatctcaagtaatccaaaaaaagaacggttggagtaacgtatcatacaaggatactcctcgttaaaggaggaccagtcgagggcttctgtttggttgtgacatttctttatcaccctaataaaagcagagtcgatacaagctgagcaaagctctggttcagaaccttggatacacgtcccagaagcatacaaccgatcaggtccttgtccaatcgaagcattgtagaagccgcctcgagctgagacattagaagctagagaagaaaggaggaggtgacggtttatatcatacttatcgttgggtttaaataaaccagtttttccgcatttttgtgcagatgaaatagagaagcttacaaggaaaaaacagaagattggcaagagattcttcagtttcattatgaatatcatagagattttgtttgggtttaggagagcaagtaagtaagcatgtatgaatatatgcatatgtttttgtccattaaacacgtttgtgtcaactaaattttcattgcaagcgtcctaacgtccttgacccattggtatccaagtccaagtcattgcctatcttgcaatttttttggttgagtcaagtgtagtaaacaaattggtacgtgagaatagacaaaaagtaatgttatagttgcaattatatgaatgaaccatgtgacccccagaaccagaagaacacattatagcatcttctaggcagagataatgcacatttggacgatgagataagccaaaacattttagactaaatgacacaaagatagcaaaaaaggaaaatggtccatggaaaagtagtcaattggtagggtaaagcagagcaagctgcccggttacagcgcagcgaaagtagcaattagcaaccaaaatgttaaactctaatatcctaaacgtagttgagcgaaaacaaagcatttttcaaaatgtgactcggaacgagagaaggaaccatcagtcaaaagcttaaatttccggtttagtaaaacaatcggttttgaattacattcatataaaattcgtctaatttcagtaaaagattagtgtaagagaattcagtaactcacacacgacacaagtactccaaaggctttggacctgaccttagatttggctatgactcgaggccatctgttcttgatggttgaggaacgtgtaaattcaggatattgctagtgagcataagattgtttgacgacaagtggggactatctgtaaaagtgaacaagggttctcaaaacccttacaatcattatcaaaccctaaatttccctgattatgaatgaaagactctttaatttggaagatgaatcataaccacatggaacaacaaaactcacattgaatatcaatttctcggtacgattttctcctccgctaaaaagaaaacgcagagaaagaagcagcaagacgatgacgatggtcgtaaccattattcccactgaaagtgaatcgtcatctacacgcagtcaccaagtgaaaatttctaaatttgtgttttagccctttaaattttataatattgtttatttttctcctaatttaacccccttaaacttacaaatttatgttcaaaccctttatttttttttattgtgacccctataaaacttatttctatatggaaacatcaaaaaacaaaaacagaacatgctagatatttcaacgaggattaacttgggtgattgttgcttcatctacagaactagtaaaagacttgctgctcgattgaccaggcaccattccctggcttgatgggttcgatcctggtccgttcctgaagaaaaatccaggtggctgaggcacaggtagagtaattgagctggttgtgagcacttggtgaatcgtagacattgttggtcgatctgcaggattttcttgaacacataacagcccaatatgaacgtatctaatgacttcatcgcttttacaatcttctttaataaagggatctatgagctcatgcattgttttgttctcccaaagtttccagacctgtaaaatatatatgtttagaactatgattactgttttataagaatcaatcaaactttattagtttagaattactcacatatgtgactaaattgttaactaagccatccatctgatagaagctgctattctttttgccactaatgatctcaagaatcaatactccaaaactatagacgtctgatttcattgagaattggccatgtgtcacatactcaggagacatgtaaccactgcaaaaacacaagtttatttgaagtgaaagggtttactgattgaacttcattaggtccatataatatatacacttacaaggttccaactactcttgcggtattggctacagtttggtccactccaaagatccttgccattccgaaatcagcaattttcgggttcatatccgcatctaagagaatgttactcgctttgaggtcacgatgtatgattttgagccgtgaatcttgatgaagatatagaattcctcgagtaatcccaccgatgatgttgcgtctcactgtccagtccaactgatttctcttgttagggtctgtatgttcatacataatcagttaatcataatcagctatgtacaaaaacaagaaacattagaaaaagtatatttcaagttagaaacaaacagaccaaaaaggaaataatcgagacttttgtttggaacaaattcatagacgagtaacttctcttctccttggagcgaaaacccgagaagtctaacaagatttatgtgttgaagctttgcaacaacaaccacctcgttcttgaactctatttcaccttgtcctgatgtttttgacaatctttttaccgcaatttcagtcccattcaaaagcatacccttgaaaatgttttaaattttaagcacatatatccaattcttcacaaaagaagcaaatgaggtggaagacaaagagagtatatatataccttgtaaacttcaccaaatccacctgcaccaagcttgttatgctcagaaaagttgcccgttgctgcttcaattgtctttaaatcaaactgaacagattccgcttcatttaaaacgactattaagctcgttaaaaagttccacttcaatttttaaggtctaaaaaccgaaaccaaacaaatgaagaaaaactcacttggaagttcaatttcttgcttttgctttcttctcttgcatataaccaagcctacaacaatcaatattattgtaacaacaactacaacgactatcgccgcgatagttcctcctgagattctactatctgcacaaaaaacacaatgcaccaacaacataattaagcaaagccgaaaaagtgtgacaaatttgctctaaaatgttacccaaaaaaggacttgccattcttcttggtaatattggtttggttggttacagaaggcgtctttaaagggggcggtgaaagcgggcgtggaggaggcggtgggtgtctagcattaatactatcaaaagcaccaaagaaagtatacaattcccaccggaaaaagcaacttggccgcaatataatggtgcctctcttcccattgtaccatttcttatagaaatcaagacttctctcaagacaaagattacaatcctttgaagaaacatctggagtgcattgcatcaccaccgatatgttcccgtaaaccggttcaggagctacatcctttgcataatatttaccagacaatgataacgaattagaattgtttctcaccgatgaagatgctccttggattgtacgaaacattaactcatcaaacacactatcaaattccttctggtcttcttttcttatttcgtttacattgaagaaatcattagacggctccaagccaagtagcccggagaaggatttgttagagtaacgaacaaggcaaagggtttcttcaccagaccatgagaaaccgtccgtctggtttagacagatctgtagtaaaccctctgctgtgttcttaatacagttggagcaaacatcaggttcagcacctggagcgcacatccccatggcgtagactctgtctgtaccaagcccgaacgaaccattgaagtagccgttctgagccgtgacgttagaggcgaaggtagagaggaggagacgacggttgttgtcataagtactattgggtttgaaactaccagcagtgttgtcacaagtttgttgtgcagaaacagaaatgaccctgaagcttaaaatgaagaagaagaaacagaggattatttcacaactcgtctttgccattttctttttgtttctttagaaaaatgtgtgactggtgttgttgttggttactactagtggttcttatcattaatatggcccataacttctgaattttctactcgaacgacggaatgacccatcctcattaaccagacattgactactttggattttaaggggaagacgtagttggattctctaagtcaatatttattattacggttttacccttataaaagaatataaagtcaacattggccaaagcttatttttcttttttgataaagggtttagattggcctaactttcaacgaggactaacactaatgatcggtcctacaattactataaattataatagtcagcactcgagctattgtagacatgcttgactaatatagaaacttcaaatttgaatcttcaacctgaaaaaatgaccctttgtaaactttttcataaacggacaataaataaatgatagacgtttgtggaaacaagaaaaaaccaaatgctgaattttcaacgaggattaacgtccgtgattgttgcttcatctacagaacaagcaaaagacttgctgttcgactgacccgggttcgatcctggtccgttcctaaagaaaaatccaggaggcagaggcacaggcagagtgattgagctgtttgtgagcatttggtgaatcgtagacattgttggtcgatctgcaggattttcttgaacacataacagtccaatatgaatgtatctaatgacttcctcgcttgtgaaatcttggttgataaagggatctaagagctcatgcaatgatttgttctcccaaagtttccagacctgtagaatatatacacattcagaactatgatcagtgttttaacttttaagagagtcaaataaagtttgggactcacatatgtgactaaattgttaactaagccatccatttggtagaagctgctattctttttgccactaatgatctcaagaatcaatactccaaaactatagacgtctgatttcattgagaattggccatgtgtcacatactcaggagacatgtaaccactgaaaaatagaggttataaactggaagtcaaaaaaggtctcttaaactaatgatcaaaaatctcaaagtccattttaagatgatacttacaaggttccaaccactcttcctgtattggcaacagtttggtccactccaaagatccttgccattccgaaatcagcgatttttggattcatatccgcatctaagagaatgttactcgctttgaggtcacgatgtatgatcttcagccgcgaatcttgatgaagatataaaatccctcgagtaatgccaccgatgatattgcgtcgcattgtccagtccaactgatttctcttcgtaggatctgcatacttatacatgtatgagttaaaacgtacataccaaagaggaaactgtttttagttaaatattacataccaaagaggaaataatcgaggcttttgtttgaaacaaactcatagacgagtaacttctcttctccttgtagcgaaaacccgagaagtctaacaagatttatgtgttgaagctttgcaacaacaacaacctcgttcttgaactctacttcaccttgtcctgatgttttcgacaatctcttcaccgcaatttcagtgccattcatgagcatacccttgaaaatactaacaaattaagcacatagcctattctccacaaaagaagcaaactagatggacaacaaagatcctatatattaccttgtaaacttcaccgaatccacctttaccaagcttgttacgttcggaaaagttgcttgtcgccgattcaattgtctttaaatcaaattgaacagattccgcttcatttgaaaccataaataagctcgtgaaaaagtaccacttcaaagtataaggtctcatgaccgaaaacaatcaaggttttaacaaacaaacaaagaaaactcacttggaagatccatttcttgcttttgctttcttctattggaaataacaaagcctaaaacaaccaatattattgtaacaacagtaacaacaactattgctgcgatttttcctcctgatattctactatctgcacaaaacacaactcatcaaaagcataaatacacaaaaaccaaaaaaagaaaaaaaaacaaacagaaacaaaacaagacaattttctgaaaatgttccaacaaggactttccattcttggttatgttggctataggagacggggatgtaactgaaggcggcggtgactttggtaaattaatctgatcaatagcaccagagaagggatacacttcccatcggaaaaagcagtttggccttgacataacgccgccttggtgcccacggcaacaattatcatagtcgacaacgttttgccgtaagcaagtgttacaatcctctgacgaaacgtctggtgtgcattgcatcaacgctgatatgttcttaaaatccggcacaagagctatatcgtctgagtagtacttagacgaattgttcccccctgatgaagaagaagttattccggcgatcatactagaagttaaattattccactcgatatcaaacacagtctgattcgtattgagttctcctgtgttgaatatcgctcctagtggatccatgacgagcaatccagagaaggggcggttagcgtagcgaacaaggcaaagggtttcttcacctgaccagaagaaagcatctgcctggtccagacagctttgtagtaaactctctgatgtggacctgatacagagagagcaaacatcacgctcagaacctggagcgcacatcccggtggcaaagacttggtcaggagcaatcccaatcgaaccgatgaagtagccctcctgagccgtgacgttagaagctagagtagagaggatgagtcggcggttcttatcataaggactattgggtatgaaagtcccagtagtattgtcacaagtttgtgcagaaacagaaattgcactgaagcttatgacgaaaaagacgaagaaacagaggactaattcacaactcttcgttgccatttttcttttttcttgagataatgtgtgggtggtgtagttagtatttgactatttgtggttcttagaaatttaatcatcagtttaaaatttccatttgaataaccatgcacattaataagaaattgacaactttgaaatttttgtgctagacttggactatgtgagtcaatctttgatattaggttttggggcttatgaaagaatatacatgttaatcattagcctcaatttcaacgagagctaaaaaccgtgatcgatgcatcatctacgtacagaacaaggaaaagacctgctagtagacatgcttggaggatgtgaatgcatttaatgactcatatctaaaaagtcaaaacacgcagaaagaaaaaattgtcatctcaaaacacgcaaaaatgatcaagctagattcgatttgttttctccacaaataagaagcatagtgactttaattttgtgatgtaaagtgtaaaatgctatttttcggttacgtaaagacatcttcgatggttacttctatattttcctttatttttgaaaaaactttattttggagatgatcattagaatacaattcttttaaaatagagttgaaaatggtttaaaacttttttttttttaagaagcttaaattacagcgtaaatacaatttaagacaatatttgcggtactctcctcacgctgatttttcatgctatcataattctgaatttctgatgtccacgaaaaaataaaaatataaaaataatatcttgtattagaaaattgagagagagagagaaaagattcttttctgacaaataatatcttatcatatccaactaagttaggctgttttttttcctttaattcctgacaaatagtttattgtaatttagaaatcgtaactactctctctttgtctttttttaataatagttattattttgcgcgatacaagtttgacattacaaaataaaataaaataaaaccggcgtttactaagacttgttggtctcatagaaaaaagggaaaaatatagttctagtttcaaaaattgagagctacatgatctgaaacccagatcgaggaaaaggaaccatgtcttctctgatctctttcatcttccttttccttttctcatccatcacagcttctgctcaaaatactttctacctatatcataattgttcagtcacgacgactttctcaagtaacagcacttactccaccaatctcaaaacccttttgtcctctctctcttcccttaacgcttcttcttactccaccggattccaaaccgccacggcgggacaggcccccgacagggtcaccggacttttcctctgccgcgtcgacgtctcgtcggaagtttgccgtagctgcgtcacctttgccgtaaacgaaacgttgactcggtgtccaaaagataaagaaggcgtgttctattacgagcagtgtctgctcagatactctaacaggaatatagtagccactctaaacaccgatggaggaatgttcatgcagagcgctaggaatcctctatcagtcaaacaagatcagttcagagatttggtcttgacccccatgaacttagccgccgttgaagccgccaggagtttcaaaaaatgggctgtgagaaaaattgatttaaatgcatcccagagtttgtacggaatggttcggtgcactcctgatcttagggaacaagactgcttagactgtctgaaaataggcatcaatcaagtaacctatgacaaaattgggggaaggattcttctgccgagctgtgcttcaagatacgataattacgcgttttacaacgaatctaatgttggaacacctcaagattcatcaccacgtcctggtatgaacagtccctttcctttgactacatatttcaacacaagtttcatacaagaattttgcttaaaaaattcttgctgttgttgatacaggaaaaggtggaaactcctctgtcataattattgcagttgttgttccaatcactgtactttttcttctattagtagctgtttttagtgtcagggctaaaaataagaggacgcttaatgagaaggaaccagtagctgaaggtaagcacaccagtgataaacatatctcctcatagaatgaatagtctgttgtgctcttacttaattcagctgttgaagttttcttttccagatgggaatgatattacgactgcaggatcacttcagtttgattttaaggcaattgaggcagcaacgaattgctttttgccaattaacaagctaggtcaaggtggtttcggcgaagtttacaaggtattattaccattgaacagagcaatgtactctgtttttcccctgtttccaaatcaaatctcacacacattacttcgaaagttgagatgtatgggatgagtgcagcaaccttgtacttgcaaaggttgttgcggaacaaagaaactctagtcgttaattatcatcctatatttgtaacaaatactaacttctacttgtatacttgcattttgagtacttcattttcatgattaatcttaccgacaattcctatatacttatggttatcttaaaataaattactcgtgtagggtacattgagtagtggactacaagttgcggtgaagagactatcgaagacatcaggacaaggtgaaaaagagtttgaaaacgaagttgttgttgttgcaaagctccaacatagaaatttggtaaagctgcttggttattgtttggaaggagaagaaaaaatacttgtctacgagtttgtgcccaacaagagccttgatcacttcctctttggtcagttaaatttagtacgtagccaagatatcttcaaattgtatgccattctttgttcttaacatttgaaatacgctgtacagactctacgatgaaaatgaagctagactggacaagaaggtacaagatcataggaggaattgctagaggaattctttatcttcatcaagattcacgactcacaattatacatcgagacctcaaagcagggaacatcctcttggatgatgatatgaatcctaaaattgcagattttggaatggcgagaatatttgggatggaccaaacagaagccatgacaagaagagtagttggaacttagtaagtattgctcttgccacttttttttcatcaatagaccgtaatacgtttcaatcaactaaaaaaaataagaattatggcagtggatacatgtctcccgagtatgcgatgtacggccaattctccatgaaatcagatgtgtacagttttggcgtcttagtacttgagattataagcggcatgaagaatagtagtctctatcaaatggatgaaagtgttggcaacttggttacatatgtgagtataaagccttaaaacttctaatttctttttgctttatttaaaaacgtgaccaaagtctaaattattaaaatgttcaatagacttggagactatggagcaatgggtcgccatcagagcttgtagatccgtcatttggagataattatcaaacaagcgaaattactaggtgcatccatatcgctttactatgtgttcaggaagatgctgaagatcgtccaaccatgtcatcgatagttcaaatgctcactactagcttgatcgctctcgctgagcctagaccacctggatttttcttccgaagcaagcaggaacaagcaggtccatctattgattcatctacgcattgttcagtcgacgaagcttccattactcgtgtaactcctcgttgaagacaaaactattcgttaatctaaacatttgtgatatatgattttagactattaagatcgacagtgaacaaaaattcatgtaagttaaactggttttattgtttattttctttataaattctttaattaacaagtattcatttcagtggtcaaagcatcaacaatagaacaacaactgaacaaggaatatgagctagaaaagtcactggaggacgattaagaatcttgacggtcgtcctcaaactactcatccaagaagcgatctacacccatctataaaatagtgattctttaaacttcccttgagatctcgtttgttacttgtttgatttcgtacatcaataatgatcaagctagatttgatttttctccacaaataagaagcacattgagttaaattttatgttgtaaacttaaaatgctatttttcagttctgtaagaatttctttgggagaagcttcaattataacgtaaagacaagactatttttgaactttgaagtactctcctcacgctgatttttcatgctctcataaatgataaatatgacaactccacgaaaaaaatatgtatataggattagcaaatttagagagaaaaagagagaaaattaaacttggaaatgtgtaaatcaatgagttttgacgaggaattaaagtttttttaaaaagagcaaattactgacaaataatttatcgttatacagaaatcgttaactcttttcttttggtaaggctataaatagtaacttaaacttctctctttgtttgaaagaactagctattgttttgacattacaaactaaaattaaataaaaccggcgtttaccatgactttctttgattgacttatagccgtcagaagagtatgaaccatcctcaatttcgcgttaatatacatacagagattcatgatctaaaactccaaatcaaggaaaaggaagcatgtcttctctgatctgtttcattttccttttccttttctcattcatcactagcttcacagcttctgctcaaaatcctttttacctatatcataattgttctatcacgacaacttactcaagtaacagcacttactccaccaatctcaaaacccttttgtcctctctctcttctcgtaacgcctcttactccaccggattccaaaacgccactgcgggacaagcccccgacatggtcaccggacttttcctctgccgcggaaacgtctcacctgaagtttgccgtagctgcatcgccttgtctgttaacgaatcgttaagtcggtgtccaaatgagagagaagccgtgttctattacgagcagtgtatgctcagatactctaaccggaatatactatccactctaaacaccgatggaggagtgttcatgcagaacgctaggaatcctatatcagtcaaacaagatcggttcagagatttggtcttgaaccccatgaacttagctgccattgaagccgcgaggagtatcaaaagattcgctgtgacaaaatttgatttaaatgcattacagagtttgtacggaatggttcagtgcactcctgaccttacggaacaagactgcttagactgcctacaacaaagcatcaatcaagtaacctatgacaaaattgggggaagaacttttttgccgagctgtacgtcaagatacgataattacgagttttacaacgaattcaacgttggtacacctcaagattcatcaccacgacctggtctgaacagtcgctttcctttgactacatattttcaacacaactttcatataagaattttgctaacacaaagttgttattatgatacaggaaaaggcggaaactcctctgtcatagttattgctgttgttgttccaatcactgtcctttttcttctattcgtagctttttttagtgtccgccgcgctaagagaaaaaagacgattggagcgataccgttgtttaaagtaaagagaaaagagacggaagtcacggaaccacctgctgaaagtagaatactcttataatgaatagtctctgatgtattcttcttataatgaattaaactgtttaagttgtagctacagatggggatgatattacgactgcaggctcacttcagtttgattttaaggcaattgtggcagcaacggatatctttttgccgattaacaagcttggtcaaggtggtttcggcgaagtttacaaggtattattattgcacaaggctattactgtagctatttatctacaagtagaaattgaataatatacactaagataaagtagtgagttttgaatgttggaaacgttctaacatgtttttcccctgtttccaaagtactctgtttttcccctgttttcaaatccaattttaaagagttgcggaacaaaacaaactctagtccttaattaataattattattattcatttctaaatttttacataattgcatttgagtacttcttcatttgtatgattaatctcatacttatggttatctaaaataaattactcgtgtagggtacatttcctagtggagtacaagttgcggtgaagagactatcgaagaattcaggacaaggtgaaaaagagtttgaaaacgaagttgttgttgttgcaaagctccaacatagaaatttagtaaaactgcttggttattgtttggaaggagaagaaaagatacttgtctacgagtttgtaccaaacaaaagcctcgattactttctttttggtctgttaaattcgatacttagcctaagattcttcaaattgcatgccattctttgtttttaacattttaaaaacgcatgtgcagaccctacgatgcaagggcagctagactggtcaagacggtacaagatcattggaggaattgctagaggaattctttatcttcatcaagattcacgactcacaattatacaccgggacctcaaagcgggcaacatcctcttggacgctgatatgaacccaaaagttgcagattttggaatggcgaggatttttgggatggaccaaacagaagccaatacgagaagagttgtgggaacctagtaagtttttctcttaaaatgtattgcctctctatagactgtactatgcttctatggactcaacatttttagtattgtggcagtggttatatggctcccgagtatgctatgtacggcaagttctccatgaaatcagatgtgtatagttttggggtcttggttcttgagattgtaagcggcatgaagaacagtagcctcgatcaaatggatggtagcattagcaacttggttacatatgtgagtatataaagctttaaaacttctaatgtttttttgctttattcaaacaatgaccaaagcctaagttattaaaatgttgaacagacttggagactatggagcaatgggtcgccatcagagcttgtggatccgtcatttggagataattatcaaacaagcgaaattactaggtgcatccatatcgctttactatgtgttcaagaagatgctaatgatcgtccaactatgtctgcaatcgtccaaatgctcactactagctcgatcgctctcgccgtgcctagaccacctgggtttttcttacgaagcaagcaggaacaagcagaaagagcatgtccatctatggatacatctgacctcttttcaatcgacgaagcttccattactagtgtagctcctcgttaaagacaaaactattcaaaattttaaacatctgtaatatatgagtttagactttttgtccagaaaataagaaaatgatagtcggatttgaagtttggttccctttaacaaggactcatctaagtgatcgaggcatcatcaatacgtacaataaaggaataaatctacttgccacgggatcaagagaaattactaaggaagaataagaagctgaaactaagcttaagcttgttcgaattgtttcaagacttactttcttaaagaattctcaaaataaggtcgtttagattttcaaagaaaattctggcttaaagtactaaagttaacaccaaacttaaataaataaaagtaactaataccaaattcaatgtattttgaaagagagagaataacatatttttagacttatgaaaaatattcatgttaatcattagcccaattttaacgaggtctaacactcgtgatcgatgcatcatctaccgaacaagtaaaagacatgctagtagacggaccaggcagtaatctctcggctaatgggttcggctcggatctttccctgaagaaaaatccaggtggttgaggcacaggcagagtaattgaaacattagttagcattcgaaatattgtggacatgcttggacgatcgtcaggattttcttgaacgcataataacccaatgtgaatgcatctaatgacttcatctttatcataattctccccaatggctggatctacaagttccaacaacgatccattattcctaagcctccaaacctatttattcatttgtcaagaaactaatgttcaaagtcatgatcacagttaaaaggagtaaaaaatatttgtgattgcattggcgttttaaaacttacatgtgtgaccaagttgcttactgaaccatctatctgatggaagctactattcttcttgccaccaataatctccagaattaatactccaaagctatacacatcagatttcgttgagaactgtccatttgccacatactcaggtggcatgtaaccgctgcaaaatacaccgcatatcaattttagttttatcacctactctcaaagggccatcaagtttcatattatatctaaatgccaattacttacaatgtgccaactactcttcctgtatttgcttcggtttgattaactctgaaattcctagccagaccaaaatcagctatttttggattcatctcggcatctaagagaatgttgctggctttgaggtcacggtgtatgattgtgagccgtgaatcttgatgaagatagagaattcctcgagtgattccctcgataatgttgtgtcgtcttggccaatccagttgaaccctttttatcgggtctgcacattacatatcacccgttatgctatgagatcaagaactgagatttcagagaacataagtctatatatcatttggctctcaccaaaaaggaaatgatcgagacttttgttgggaacaaactcgtaaactagtatcttctcttctccttcaaccgaaaacccgagaagtccaacaagatttttatgctgaagtcttgctacaagaagcacctcgttcttgaactctggctcaccttgatctgatggtttagatagtctcttggcagcaacttctgttccattcggaaacataccctgctcattcgcatgacctttactatcagaattagcatctgagtttataatacaatcaagtagttgagaaaatttaagaacatcatgccttgtaaactgcaccaaatccaccatgaccaagcttgttactcttatgaaaattacttgttgcagcttttattgctctaaaatcgaatcgaagcgaacctgaggacgctgtaagatcatccgtagctgcacaaatatactgttatgctgtagagtttccaagggacattaacatctctgaaccgtagacaagtatttttaccatcatctggtgatgcagtaccataaggcctcctaggtcttcttgaaacagagaaatacccatctgagaagaaacagagacataacaaaagtgttggaaataattttaccctaaaatgttgttctgagataatgtcgttctagcaaaccattgaaaactcactttcacttgcaaatgattggtaagcttttctcctcctagaaacagcgtatccaagagcaagcagtacagtgctcacgacgacggaaacaaccgcaattgccacaatagatcctgtagatatatttttgccatctgcgcgaaagctgtcactcagaatacaatccaaattggtttaagggcataaagtattttaaatgcgaatttttttagaaacttcttttaaattttttgaatatgaaacaatttttttttgtgaaacgaatatgaaacattattacacaaaaataacaggaggttgtgttttctttttgagtttgtattttcaagtaaacaaaaataaatgcaaacacatcagcaaaaatcgagatccaacacagcagaaaaagttcaaatgaagagttcatatctttatattatatacctttcttggttgtgttagagtgaccattatctaattcagaagggggagttggtaacatcccatttatgaatagtcccaagaatggctgtagatcccatcgcatgaaacagctggtccttgcaatatagcctacttgtatcccccggcagcatgacctattatctatcctaagatgttgtaaacatttctcgcagttcaacttggttaggtctttattgcattgcgcgatggcataaatgctcctgaacgggaacgacccgagctcttgtatgctgttggcgtacaatgaaccatcaactttgtttatcacacgatccatcaaagcctgccatgtagatttaaactccgtcaagttggtttggccgaacgatgtgttatatttgtactcaatatactctgcccatattatgtcttcgtcgagcgatccattaatcaagtggtttgagtagcgtaccaaacaaagcgagtctccagaactccagtctatagcttctgcctgattaggacatgtgtgtagcaaggtatgagatacactcgtgatacaatccgaacaatcctgtgttgtagtacctcggctacacatccccagaccatgtgctatgtttggaccgggcttgaacggagtcttgtagaagccttcattatccttgacacgagaaggaagagacgagagcatggctcggaggtttatgtcgtaaggaccattggctttgaaaaaatcagatctctgaatgcaggttggtgcagcgacagcacaagagcttatgaccacaaaccagaagattgctcgcaagtcgaccattttgttcttttgcatcgagtttgattttcttgtttaaaacctccagtcttgaaagatttaatattagaagaggattcgattttcaaaagcaatctctttcatatgtgatgtgactacgtgtaggactcattcctcccttctttttcatacgaatccactatgtatatttgtaaccctgtttcacaactcttttaaggtatttggcttttaaatttaccggttccgtggaaactgaaccccgcaaatgcaccattatattcaaatcgatatctttgaaagcttaagcgaaattctgtagttttgtttttcttatgatgtcttttaaatttacatatcttgcattataaatagtactgattcatatccccgctgtagggaaaaatgtatttttcacattttcaaaacaaaatgtggagattttaccattttccctagccaacccaactcacatgccaatctcgctcgatataggacccaatacaaaaacaaaacaaatatcgtttatttccgaaactaatgacactgacgcattagttgaaaataaaaacgacactgacgcattagttgaaaaatacaacacgacgaattagcctaatactcatctggtccccttccaagttccgataagctgagttctagtaaatttcgtggttctgatcgtttcattatcgctggagtcagcagtagatgacagcaacaagctataccagtgtgcaacgaacgaagagaatgaacaacacacttgattattcgttttttcaagctacaataaccacagagttacattttcgattatttatttatttatttttattttgaatgaactgttaattcacacaaaaaaaaacaacatgttttacaagtatggtcatagactaaaaacagagctttacaaggacatagcatttgctgcggaatataatttaattctcgaaatatgaaagttgctatggaactgtgtcgtagttctcacccattattacaagtaaacgaagggactcgtcattttcagggtattatctaaactttcaaacattattgacattttaccatcgactatgtaggtttagggaccacttattagtttgatggattcaacattagaaaaatcgcagagaaacttcacttatctgttcgaacgggttagaaacagatacatgcgtaattactaacacaaagatcacagctataatctcgtaaggcaaaatgaagcagaggagtttcttatcaatcctctgttttattcttctagcctttggtgttgcttctgtttcagcacaaacatgcatagagaaccgtaaatatttcacacccaacggtacatacgattcaaatcgtcgtcttatcctctcttctcttcctaacaataccgcctctcaagatggtttctactacggttcgattggagaagagcaagatcgagtctacgcattagggatgtgcatcccaagatcaactccaagtgactgttttaattgtataaagggtgcggcaggctggttgatacaggactgtgttaaccagacagacgcgtattattgggcacttgatccaacgctgtgccttgtccgctactccaacatttctttctcaggatctgcagctttttgggagattgagcctcagtatttggtcttgaacactgcaactatcgcctcagatctaacggatttcaagaacatatgggaagacttaacatctcgtacgattactgcagcctccgcagcaagaagcacaccatcgtccagtgataaccattacagagttgattttgcgaacttgacaaaattccagaatatctacgcattgatgcaatgcacgccagatatttcttctgacgaatgtaacaactgtctccaacgaggcgtacttgagtaccagtcatgctgtggaaataatactggaggctatgttatgcggccaatctgctttttccggtggcagctttttacattctctaaggcttttcataacattaccttggctactcctccgaaacctccaatgaatgtaccgcgaccaccttctgtaggtcacggggcgaacactacagataatggtaagtattcaaaccgattaaactatgcctgtaagaaaaaactgaaataaactcaattatctatgtcatgaacagatagcaggggagtctcagctggaattgtagtggtgattaccgttccagcagttgtcatcgtcttgatactagttgttctaggattttttatttgctggaggagaaagtctttgcaaagaactgaatttgaatgttagtgtcttgtgatttatgctttttatcggtatttttttttcattataagcctatattgtctccttagccaagagacgaagcataactaatacacgctttcttttcagctgatagtgatgtttctactacaaattcattgcaatacgagtttaagacaattgaagctgcaacgaataagttttcgaagagcaataagctcggcgaaggtcgatttggggaagtttacaaggtattaagctatcggtttgccaaatttgccaagtcaaacacataggctaagttactggtaataaatggcgattgttgtttcattcaatgctctgtagggtaagttttcaaatggaactgaagttgccgtgaagaggctctcgaaagtatcaggacaagacacaaaaaagttcaggaacgaggctgttcttgtatcaaaaattcagcataggaatctggctaggcttcttgggttctgtttgcaaggagatggaaagtttttgatctatgagtttgttctcaacaaaagccttgactattttctattcggtatagttccctttaacagaatgattactcaaaggattcttctacagctttaaagtaaatgattgtacatggagatgtgcagatcctgaaaagcaaggtgagctagactggactcggcgatacaagatcattggagggattgctcaagggatactacatcttcatcaagatccacagctcacaatcatatatcgtgacttcaaagccagcaacattctcttagatgccgatatgaacccaaaaatttcagattttggaatggccacagtttttggaatggaggaaagtcgaggcaatacgaactggatagctgaaaccttgtaagttctgctcatataaccgataaacctgaatttcgttaatccctgctctgttttttttaacctgacttgtacgttttcagcgtttacatgtctcccgagtatgcggtgcatggcaaattctccatgaaatctgacgtctacagctttggaatcttgattcttgaaattattagcggcaagaagaatagcagcctctaccagaacgatgaaactactactgctggcaacttggttacctatgtacgcataaagacctgaactgttgcattttttactaacgctaaaaatttgactaagcatcttactttagagttaactaattgtacgtacattgtgttaggcttggaggctttggagaaacggctcgcaactaaagctgctggattcgtccataggaaggaactatcagagtaatgaagtcactagatgcatccatattgctcttttatgtgttcaagagaatccagaagaccgtccaaagttgtcaaccattgtctcaatgcttaccagtaacacaatcagtgtgccagcgcctggcataccgggatttttcccccaaagcaggcgtgaactggacccattatctgagggattagagtcgggttaatatatgaacgagcaggtttttcctcatcatgtctgaaaataaaataaaaacaaaaaaaatagccagacatcatttgattctccacaaataaggaacatagtaagtttctctgaaattttaggctgtaaactatacattatattcagttcagtaagaaaataagtttcggtgatacaaacattgtagttgtaaagaagagaatcagttttgttaatctgtgacgtatacttcagggttctacaaccaccaaatccttttagatcgattgcccctttatcaagtattcttcacttatagcatcgttttagggaagacgaataattaaaacggggagattaatcagaactattgaaaagactaatcagaacttaagaaagccaaacaattataggcacgaataaagtatatataagctaagctaagctaacacaaacaattacgccaagccctaatttaagcccccaaaaaaaacataattcttgaaatgaaaacaagtgttaaatatcgtttcgtgcattttagttaacatgaatcagccttttctaaaagcctaggggccttattggttaaaattccacacaaagcaaatttaaaaagaaaaccttcagtatagccgtatactacatgtttgattagtagtttagtagaacaaaatgtatttacttggaatgaagtgtaacaaccgttttattattttttctttttttggtaagttgactgacgtaaaagaaattgtattctcttacagataattagtgtctggcttcagactcttcatcaggacccataaacaaagaaaaaacagaaagaaaaggagaagaataaatttcggttatgcctcattcggttatcttcttttacgccttcctaacttccttacaattaagcttgagtactcttcttacattttacaaaaccctttagtttaaatggttgattagtaggccaaaatccattactgaacgtgtaacaaacgctgtgaaagtcacagacttactcgtcaagaagaagttatggctcttttcgttctctctttcattgtgccttcatcgaaagcttgagttacgttcttccacagtgcaacaagaccgtttactttgactttgaattttggtccgtcactcttcacaaaaccatgcatcctctgtttcaggctaatctattggattcccagcgactaaaacttaaatcgaggaaaaaccattatgtcttcttgggcctctttcatcttccttttcattttctcctttctcactagcttcagagtttttgctcaagatcctacttacagataccacagctgtcccaatacgacaattttctccagagacagcgcttacttctctaaccttcaaacccttctgtcctttctctcttcccccgacgcctcctctagctactccagtggattccgaaacgacgccgtcggaacctttccggacagagtcaccggactttttgattgtcgtggagacctcccgccagaagtttgccataactgtgtcgcctttgccgtcaaggacaccttaattcggtgtccgaacgagagagatgtcacgctcttttatgatgagtgtacgctaagatactcgaaccttgtggtaacatctgctctagatcccacttatgtataccatgtttgtcccagctgggcaacttttcccagaagcagcacttacatgactaatctcataacccttttgtctactctctcttccccctccgcctcatactccactggattccaaaacgccacggcaggaaaacaccccgacagggtaacaggacttttcaattgccgtggagatgtctcaccggaagtttgccgtagatgcgtctcttttgccgtcaacgaaacctcaactcggtgtcctatcgagaaagaagtcacactctattacgatcagtgtacactcagatactctaaccggaatatcctctcaacttctaataccaatggaggaattatcttggctaacagtcagaatatgacatctaacgaacaagcccggttcaaagatttggttttaaccacgatgaaccaagccaccatcgcagctgccaacagttccaaaagattcgacgcgagaagtgccaattttacgacgttgcatagtttgtacacactggttcagtgcactcatgatcttacaagacaagactgtttgagttgtctgcaacagatcatcaatcaattacccactgaaaaaattgggggacaatttattgtaccgagctgtagttcaagattcgagctttgcctgttctacaatcaatccgccgttacaacacctcaaccgcagcagaattcagctcctccaccaccgccaacttcaattccttcaccacgacctggtctgaacagtcgatttcctttgattacatgtttaagcgcagtttcttttgagaagttcaaagatttgctaaaaccagggttcatatgtattctaataaaaattgtttctgagaatacaggaaaaggcggaaactcctctgtcataattattgctgttgttgtttcaatcactgcccttcttctgctctttgtagctgtttttagtgtccgcactaagaggagaaaaaagatgattggagcgataccgttgttaaacgtaaagagaaaagacacggaagtcacggaaccacttgctgaaagtaaaatactcctctttataggtcaagtgaatagtctctgatgtattaaactgtttaagttgttgctacagatggggatagtattacaactgcaggctcacttcagtttgattttaaggcaattgtggcagcaacgaataactttttgccgattaacaagcttggtcaaggtggattcggcgaagtttacaaggtattaccattgaacagagcttcactatatgaggatgttcatttcacagttgcggaacaaacaagcactagttattaattatcatcgtccttcatttgtaacaagaactgacttcttcagaattgcatttgagtacatcttcattttcatgattaatcttacagtcagttccttatgaatatttatcaaaaatattacttaagtagggtacatttcctagtggagtacaagttgcggtgaagaggctatcaaagacatctggacaaggtgaaagagagttcgaaaacgaagttgttgttgtggcaaagcttcagcatagaaatctggtaaggctgcttggttattgtctggaaggagaagagaagattcttgtctacgagtttgtgcacaacaaaagcctcgattactttctttttggtcagttaaattcaatacttagcctatgatagtttgttcaaattgcatgccattctttgtttctaacaatttcagtttgcatgtgcagacactacgatgaaacgacagctagactggacacgacggtacaagatcattggaggaattgctagaggaattctttatcttcatcaagattcacgactcacaatcatacatcgtgacctcaaagcgggcaacatcctcttggacgctgatatgaaccccaaagttgcagattttggaatggcgaggatttttgggatggaccaaacagaagccaatacgagaagagttgtgggaacctagtaagtttttctcttaacatttattgcctctctatagactgtattatgcttctatggactcaacatttttagtattgtggcagtggttacatggctcccgagtatgctatgtacggccagttctccatgaaatcagatgtgtacagttttggtgtcttagtatttgagattataagcggcatgaagaacagtagtctctatcaaatggatgatagtgttagcaacttggttacatatgtgagtatagagcttaagactttcattttcattttttgctttatttaaaagtgactataacaataaattattaaaatgttcaatagacttggagactatggagcaatgggtcacaattagaccttgtggatccgtcatttggagataattatcaaacacatgatattacgaggtgcatccatatcgctttactatgtgttcaggaagatgttgatgatcgtccaaacatgtcagcgatcgtccaaatgctcactactagctcgattgttctcgccgtgcctaaacaacctggatttttctttcggggtaggcatgaacaagtaggagaagtaggttcatctgtggataggcttgctctctgttcaatcgatgatgcttccattactagtgttgctcctcgttgaagacaaaactattcactaaaagtgactatatacaaagatttcgtctaaatcaaaccgtttccaatgttcattttcttttctttttgaaaataagtatatttatattacggcactgaagcttagaatacgaaacagaggattattacagagctcttctttgcctgtttcttttcctttagttggttcagataatgtgtgcatgtttaggaaatctggttcttatcaactaaataacaagttatattttctacatgaaaggccatgcacatatattcacgagtaacttcactcatttgaattatcgtgggacacgtgaaaacctttaggttatccttccagactaattgatattaagctattcatttttgtcaataattggtttatgaaagaatctacatatacaacattagcctcgcttttaacgaggactaacacacgtgaccgatacagaacaagaaaaagacatgctagtagacggaccacgctgcaatctatcagctaagggatttggcttgaatctgaccctaaagacaaatcctggtggttgaggcacatgtagagtaattgaagtatttgtgagcatatgaaagactgtagacatcgttggacgatcagcaggattttcttgaacacataacaatccaatgtgaatgcatctaatgacttcatttctatcataattctcccccatgggtgcgtctaccagttccaacaatggttcattgttccaaagcctccatacctattcaagtcatttatcaagaaactaatttaaatgttgagagctatgatcattttgctaagagaagtagaaaagtttgagatggcattggaaatatactaacatatgtgactaagttacttattgagccgtctgtctcgttgatgctactattctttttcccaccaataatctccagaatcaatactccaaagctatacacatcagatttcgtcgagaactgcccattcgtcacatattcgggtggcatgtaaccgctgaaaaatacaacgcataccagtttcaacttttatcaacaacaataagtacaaacagattatataactaaaatggaaaattacttacattgttccaactactcttgctgtggtagcttcagtttggtccactctaaaattcctagccacaccaaaatccacgattttcgggttcatatcggcatctaagagaatgttacccgctttgaggtcacggtgtatgattgtaagccgtgaatcttgatgaagatacacaatccctcgagtaattccattaataatgttgtatcttcttgtccaatctagttgacccttctttaccgggtctgcaaaaatcccatgtattaagcaattagactatgagatcaagaactaaggtttcagagaatataaccctatcatctgtttcttttcttaccaaagaggaagtggtcgagacttttgttaggcaaaaactcgtagactaatatcttttcgtctcctttgacagcatacccgagaagcttaacaagatttctatgttgaagctttgctacaagaaacacctcgttcttgaactcttcttcaccttgtcctgacgttttagacaacctcttcacagcaacttctgttccattcggaaatgttccctgccaagtcatatgatcttcacataattatcagaacatgttctgttttttctctctaacacaaaaaaagtactagagacaaacattataccttgtaaacttcaccaaaaccaccatgaccaagcttgttaacattatgaaaattacatgtggcagcttcaattgctttaaactcgaactgaagtgaacctgaagttgtaatatcatctgctactgcaaaacgaaatcataattatatagtgtatccagagagtttctaagggacattcaacatttatatctcaaattcttattcaagaccactatcaactttatgttttcaaaacatgagaaaacttacttttagttgtctttgttttatatgcttttctcctcttccaaagaccaactcctagagcaagcaataagatgggaacaacgataatcgccacaatagctcctgtagaaatgcttttgccatctgcacgaaccctaggaaaaatattagtctcaaactacgaacatagctataaaaaaaacttaaaacatggacccatggtcttacctttttgacgaggacgaatattatcaaaaagtcccaagaacggataaagctcccatcgaatgaaacagcttggcctcaaaataatacctccttgtctcccacggcaacatgacctatactcaaccacgttttgttgtagacacttggtgcagttttgaagagataagtctctactgcattgcacaaaaccgtaaatgcgtgagatagacgtctcaagctttcgtatcccggctgcatagtacaaatatgaagcttggtctatcatacgaatcatcaaagcctcccatgtaatttccaaatccgtcaagttagcttgaaaatctctggtatagttatcactcctcagaatctccataccaagggaactataaaacgagcggtttgagtaacgtacaagacaaactgttctatcaattctccagactatagcttctgtctgattagtacaattctgcaacaatctagcatttgaaggatgatacaatcagaacaagagtgtgcatcagtacctgggacacacatccctagaccatatgctctgtttggatgttccccgatccatgtcgtgtaaaagccgtcgatagctgtgacattagaggaagagaagaaagcaggactcggcggtttaagtcgtaagtactattgggtgtgaagaaaccagatctttcaaggcatacctgtgcagagacatgactaaagcttatgaccacaaaccagaagattactaaaaacttgaccattttatttactctttccttttttgttttgatgtctgaaattaaaacctcaaatcttggaagatgtaatatttatacaggcgtttcaatttcaacctcttgtgctgtacaaaatttgactaatcgtcattgaattttctaacgtagacttttgatgatgagtcaatgtctagtttaggtgacttatgtcttatacgagcctgattcacattttttaccactttgtaccatatgaattggtatttttcctccaatgtggtaacaaatcttgttgaagcttcatcaaagcaaaacagcaaatgcatgattcttgaaagggtattaaattgaaacttttaaaatgtttaagcatattatgaaaagttaaaatattagtggggtggatttgtagttttttaaaacttggagaacagatacatcttactgtcattactgaggcaacatcgagtacattcaccggaaaatggatgccggagctgaaattgatgtggttcggccggtggaggcagattcggcggcggaaattagtccggaacaagaccacgaaggaagatcggagccttcgtcgttgaaccaaggggagattttaaaaacacttgctacggtggagaaggattcgcaggcaatcgcggagagcttttcgtctctctttgtttccctccgatcaactctttctgaggttagaagacgcttctgtgaatcgatttttgtttcttcggttacattgcctagaaaatttgacatttggggaaaactaaagtctagggttcaaaatccatcaattttgtgaatttctcttttcatgtcataaattaagaaactttaggagctagcagagctcaaattatgagatttcatcaataaatggaaaaccaatttcaatgtttatgttttgagctgtggaatgatcataatcttttgctgcattgaaaccattgctaagtttgttcaatgtcctatgactgtttgttttcatgaaaactgtttcttttccttgtgtgtgtgttgtttatgagacttccttgatggtgttttaggctactggtagctcggttgatcacatggcttgctttggagaggcagcgggacggcttcaggaaaatggtaataacactacctgttttgagcaatagattcagttttccatttatatatgagcaatcaacttgagccacctttctttgttctatgaatttttttagctctagatgcagccaccaaagggaaccggtacatcaactcttgcctcaggtactttcataacggtctcgttattactctacgtaatcgcatagtccagtgagtcaatgtccaaatatgttgcttattagtttaagacagagatatctcacactttgtttcatctgaagttttaataagattcctgagcttgacctctaactttcaagatgcgtttctcctgcgtctttttgcttccggtatgatttcttttttggttcaacatgtagattaaacgaggaaattaaaggcgttgagaatttggcggctcggttgtatccttatatgtgtgtcaacctgtttgtgtctgaatgttgaacacagacacacatgtctgctcaaagctttcattatcgtattttagacagaaatttgttctagaatccttaataaatcaatctgcagaaagcacctgaggaaaaacgtggatgttcttgacacggctgtaaacaagcttctccggcctccatgagaagtcgtcagtttttcacagacttggatcacttttttattttttctttcagactttggattacgtatttctcgtacataaagattttgattataaaactgatgttaaatttcaacattacatattttctagggtttctggtttaagaaaaacaaaacactctgttttttaaactgttttcggtaaaccgactcgaaaagggattatttgtaatttattattgtttgtataaataggatgccaaaaaattctaaacttacgtttcgctccctctctaagtccctctcgctctttggttcttcttctcccgcaagattgaatctttggtttctttggattggtttcgtaagtgttcgcaccgaatcatcaaccatttcaccgctgggtatgttttctacactcgctcaaaagttttgatagtatgaactgaattatgggttttggagaattagttgtttaattgtaaaatagaaaactttatgattctgcttccattgattttagctggtgggtttgtcaaaatttcaatcttttctttgatttgatgattaatatttcattgaaatcatcgttgtttcaggttagtaggagtttgctggttattaagactttagtctgaatccaggcctggctcttggggtttgctctgttgctagtgcacagggtccaaccctgtctgaatcatggcgattttcaccaaacctgagagtgcattgaagcgtacagatggtaacattgcaaattcttacctttttgactcatgctttgatgtatgaatgttgcgtgtttgccgagcttatcaatgttgggcagagacaagatgctctcatggtgctttctgatctttttacctgctaacgagaaagttgagcaggcttgtagtcagcggatgctctggaggaggaggcccttgatgtcgatgactttgaagcagataaaaagcctgaagacttgcagccaagtgttgtatatcagcaacgactgctagaggaaaggaaaatttatgaaaatgagcaacaggtgaaatttattcttacagtagttttgcatctctatatattggttctgagtttaggcgaaaaaggtccttatagtctcttctattttgtttagcgtgaggttgagcgtcttaagagtgacctgaaggagaagaaaaggttggccagaatgttggataataaggtaagttggcttgtgaagttgtgtctactgtatcttcatatgtagcaatcacttcttgcaatttttattgtctagtaactcaaagcgaaattttgtttccaggaaatattcagggtgattcgtcttcgacaacctgagtttgagaggctaagaagcgagaggagcatattggtcaaataattcgagccaggaaacaagaaagcggtattaagaggaaacagatatatcatttgaaatctgatgaggaaaggataaaaaagcttcaggaagaagaggaggctcataggcgtgaaggtaagcccttgacttccatagaaaaacaatttggtcatttttgcttattaggcctcagtgaagaataatttagtcatgattttcccaagatttgaacatgtgtaagactcgttttcagctatacaaacccttttgcattgaataagctttttattttctagtcaaattttcgctttttcttacagtttcatcttgtcgcattttcatattctaaagtctttcaatgcatagaaacattgtagggattcatgtatattccttcctataatgtacgagaagcttttatatcatactaaaaactgaaagctaaaatattggtctgttttgttaacacatcttcaatggagttttggctccacttgcgctaaatagtaatacttattatcttgaagtggaagcaaactttgactcaactgtggttcctgctagaaaatattcagttactgagacagacatgcttttaagcaagtcaaaaagaacaaataaaggtaagacccttaaactttgtataaatcaagttggattagacaaactataaaatcttagggaaaaagttgtgtttagtgctgctcaattccttttcaggacacaatcacttgtgggtctatcttacgcttctttgttcacattgaaactgaatacatatgatgttggctttgacaaaaactcccactttgaataaacatgtcgaaaaacctctgaaacattactttagatggttatagaaaaactcagaacattttttaatacaaaaatcaaatccaaaagcttttgattccactagttaacactcgcaacaatatctttcttcttctaaaaccggtttagtgatctctaaaccgaaacaccagtttggtctctaaggatcatctggttgagccagctttagtccagcaaagtctttgacagtgaaaccaatcttctcaaacttcccttcttcattgctctgtctgaacttcaggtactccgaacacttaaacgacttgtagcttctttgttttccctcacccacaatttcttgaggtgcaagtatcactttctcatcctcaaaacagagaaaaaacgccagagagactctgttcaccaactttctcaatacaactcgatgttcagatgatctcagccgtccattactccatgcttgcataaggtctccaatattaacaacaaggaaatcgttgcacgggtttatatcgatccatttcccttctttagacctcatctgaagcccaccaacggaatcttgatagactattgttatgcagctcatatcagtgtgcatcccgagaccttcaacgagctcttcttgcttctccacgtcgtgtggaggtgtgtagttcactagccttaagtatccatgacagttgctaaagtcagtttggtagagtctctttccggtttcatctcctaaagtcatcatcaagagaatctttatgagtcttttggacaattctgccattttagctccgtattcttgcattgtttctctgaacaaaaaaagaggagaggtaaaaggttcaagccaataaaaagatgtgaaacacacaatatgtaaaaagaaacactgatttgtgttgtaatgacaaccttaactctggtttatgatgatcttggaacaaaacatctgctgaagctttggcagaatcagagaaatcaggtccagagacaacaaggctttcgaaataaggagaggcgatgtaccgaggagtatatgaaatgggaccaagcttgagctttgattcaagaggagctttgaaaacatctctggacaaggaacaaattttgctgaacatctctttagagattccatgattggtgacatagaagaatccccactctttacaagcctcagagagagaagacagtatagaggactcaattggttgtgttaagtctaacacaggaagctgcagagaagaatgaagttcagacattatattatatatttagttgtctaaagagtttagaggttatgagtaggggcaagctatgctatggataggggtatatatatttaagacatgattaaaagaggctttagaaatgtttcagacaaatgcagtaacagtagaacccacatttttggttatcattatgtctgtattagaaaggattgtaaattgatgattagattgtgacatttttacaattaggcataaacatcaaacttattgcaaaaaagttgggaggattcatggaaactttattattcatacaaacatatataagatttatcttgtaactctgcatatcatatattatgtccaaatgcatcctgcaggacctccacagtaaatagctcttaaccaaggatccttatcatcatgaacatatgtgactttgtaacatttttttgcagttgagaatgagatttttatttttaatgtactttaaggtgagttagctatcaatctatgctcaataaactatagaaatttgtgctgaaagttgtgaatttctaatactttattattatttattagagcgcaagtaatgcttagatatatttcaaatctgttgatttttcctatagcctgtgtaaaattaaaatcttatgatattgttactctttatctcgtagatcaattaccctatgcaccctccaggacctccaaagtaaacagattttaaccaaggtttatcaacatcatgaacatatctggctttgtaacagattggtctgctctcatgtaccttcactgtcccgcgtcctggattataaactttcccgtgaccatcgaagagtttgaggccactaataaaagcagctttatgaaagccctcactaggccaatgaccacttcccataggtggactcttctctctgatagggctatacacttgccctccccaagatgcataatttgcgctgttagattccatccaggacttgaacaatgatgctggccagtatccaataatctcctctttaaatacaaaccaccaatttcccgtgccactatcctgttcccaattttgaaatatgaattc

SEQ ID NO: 616 - DNA, 97006 bp, Arabidopsis thaliana
gaattctttatcttcatcaagattcacgactcacaatcatacatcgtgacctcaaagcgggcaacatcctcttggacgctgatatgaaccccaaagttgcagattttggaatggcgaggatttttgggatggaccaaacagaagccaatacgagaagagttgtgggaacctagtaagtttttctcttaacatttattgcctctctatagactgtattatgcttctatggactcaacatttttagtattgtggcagtggttacatggctcccgagtatgctatgtacggccagttctccatgaaatcagatgtgtacagttttggtgtcttagtatttgagattataagcggcatgaagaacagtagtctctatcaaatggatgatagtgttagcaacttggttacatatgtgagtatagagcttaagactttcattttcattttttgctttatttaaaagtgactataacaataaattattaaaatgttcaatagacttggagactatggagcaatgggtcacaattagaccttgtggatccgtcatttggagataattatcaaacacatgatattacgaggtgcatccatatcgctttactatgtgttcaggaagatgttgatgatcgtccaaacatgtcagcgatcgtccaaatgctcactactagctcgattgttctcgccgtgcctaaacaacctggatttttctttcggggtaggcatgaacaagtaggagaagtaggttcatctgtggataggcttgctctctgttcaatcgatgatgcttccattactagtgttgctcctcgttgaagacaaaactattcactaaaagtgactatatacaaagatttcgtctaaatcaaaccgtttccaatgttcattttcttttctttttgaaaataagtatatttatattacggcactgaagcttagaatacgaaacagaggattattacagagctcttctttgcctgtttcttttcctttagttggttcagataatgtgtgcatgtttaggaaatctggttcttatcaactaaataacaagttatattttctacatgaaaggccatgcacatatattcacgagtaacttcactcatttgaattatcgtgggacacgtgaaaacctttaggttatccttccagactaattgatattaagctattcatttttgtcaataattggtttatgaaagaatctacatatacaacattagcctcgcttttaacgaggactaacacacgtgaccgatacagaacaagaaaaagacatgctagtagacggaccacgctgcaatctatcagctaagggatttggcttgaatctgaccctaaagacaaatcctggtggttgaggcacatgtagagtaattgaagtatttgtgagcatatgaaagactgtagacatcgttggacgatcagcaggattttcttgaacacataacaatccaatgtgaatgcatctaatgacttcatttctatcataattctcccccatgggtgcgtctaccagttccaacaatggttcattgttccaaagcctccatacctattcaagtcatttatcaagaaactaatttaaatgttgagagctatgatcattttgctaagagaagtagaaaagtttgagatggcattggaaatatactaacatatgtgactaagttacttattgagccgtctgtctcgttgatgctactattctttttcccaccaataatctccagaatcaatactccaaagctatacacatcagatttcgtcgagaactgcccattcgtcacatattcgggtggcatgtaaccgctgaaaaatacaacgcataccagtttcaacttttatcaacaacaataagtacaaacagattatataactaaaatggaaaattacttacattgttccaactactcttgctgtggtagcttcagtttggtccactctaaaattcctagccacaccaaaatccacgattttcgggttcatatcggcatctaagagaatgttacccgctttgaggtcacggtgtatgattgtaagccgtgaatcttgatgaagatacacaatccctcgagtaattccattaataatgttgtatcttcttgtccaatctagttgacccttctttaccgggtctgcaaaaatcccatgtattaagcaattagactatgagatcaagaactaaggtttcagagaatataaccctatcatctgtttcttttcttaccaaagaggaagtggtcgagacttttgttaggcaaaaactcgtagactaatatcttttcgtctcctttgacagcatacccgagaagcttaacaagatttctatgttgaagctttgctacaagaaacacctcgttcttgaactcttcttcaccttgtcctgacgttttagacaacctcttcacagcaacttctgttccattcggaaatgttccctgccaagtcatatgatcttcacataattatcagaacatgttctgttttttctctctaacacaaaaaaagtactagagacaaacattataccttgtaaacttcaccaaaaccaccatgaccaagcttgttaacattatgaaaattacatgtggcagcttcaattgctttaaactcgaactgaagtgaacctgaagttgtaatatcatctgctactgcaaaacgaaatcataattatatagtgtatccagagagtttctaagggacattcaacatttatatctcaaattcttattcaagaccactatcaactttatgttttcaaaacatgagaaaacttacttttagttgtctttgttttatatgcttttctcctcttccaaagaccaactcctagagcaagcaataagatgggaacaacgataatcgccacaatagctcctgtagaaatgcttttgccatctgcacgaaccctaggaaaaatattagtctcaaactacgaacatagctataaaaaaaacttaaaacatggacccatggtcttacctttttgacgaggacgaatattatcaaaaagtcccaagaacggataaagctcccatcgaatgaaacagcttggcctcaaaataatacctccttgtctcccacggcaacatgacctatactcaaccacgttttgttgtagacacttggtgcagttttgaagagataagtctctactgcattgcacaaaaccgtaaatgcgtgagatagacgtctcaagctttcgtatcccggctgcatagtacaaatatgaagcttggtctatcatacgaatcatcaaagcctcccatgtaatttccaaatccgtcaagttagcttgaaaatctctggtatagttatcactcctcagaatctccataccaagggaactataaaacgagcggtttgagtaacgtacaagacaaactgttctatcaattctccagactatagcttctgtctgattagtacaattctgcaacaatctagcatttgaaggatgatacaatcagaacaagagtgtgcatcagtacctgggacacacatccctagaccatatgctctgtttggatgttccccgatccatgtcgtgtaaaagccgtcgatagctgtgacattagaggaagagaagaaagcaggactcggcggtttaagtcgtaagtactattgggtgtgaagaaaccagatctttcaaggcatacctgtgcagagacatgactaaagcttatgaccacaaaccagaagattactaaaaacttgaccattttatttactctttccttttttgttttgatgtctgaaattaaaacctcaaatcttggaagatgtaatatttatacaggcgtttcaatttcaacctcttgtgctgtacaaaatttgactaatcgtcattgaattttctaacgtagacttttgatgatgagtcaatgtctagtttaggtgacttatgtcttatacgagcctgattcacattttttaccactttgtaccatatgaattggtatttttcctccaatgtggtaacaaatcttgttgaagcttcatcaaagcaaaacagcaaatgcatgattcttgaaagggtattaaattgaaacttttaaaatgtttaagcatattatgaaaagttaaaatattagtggggtggatttgtagttttttaaaacttggagaacagatacatcttactgtcattactgaggcaacatcgagtacattcaccggaaaatggatgccggagctgaaattgatgtggttcggccggtggaggcagattcggcggcggaaattagtccggaacaagaccacgaaggaagatcggagccttcgtcgttgaaccaaggggagattttaaaaacacttgctacggtggagaaggattcgcaggcaatcgcggagagcttttcgtctctctttgtttccctccgatcaactctttctgaggttagaagacgcttctgtgaatcgatttttgtttcttcggttacattgcctagaaaatttgacatttggggaaaactaaagtctagggttcaaaatccatcaattttgtgaatttctcttttcatgtcataaattaagaaactttaggagctagcagagctcaaattatgagatttcatcaataaatggaaaaccaatttcaatgtttatgttttgagctgtggaatgatcataatcttttgctgcattgaaaccattgctaagtttgttcaatgtcctatgactgtttgttttcatgaaaactgtttcttttccttgtgtgtgtgttgtttatgagacttccttgatggtgttttaggctactggtagctcggttgatcacatggcttgctttggagaggcagcgggacggcttcaggaaaatggtaataacactacctgttttgagcaatagattcagttttccatttatatatgagcaatcaacttgagccacctttctttgttctatgaatttttttagctctagatgcagccaccaaagggaaccggtacatcaactcttgcctcaggtactttcataacggtctcgttattactctacgtaatcgcatagtccagtgagtcaatgtccaaatatgttgcttattagtttaagacagagatatctcacactttgtttcatctgaagttttaataagattcctgagcttgacctctaactttcaagatgcgtttctcctgcgtctttttgcttccggtatgatttcttttttggttcaacatgtagattaaacgaggaaattaaaggcgttgagaatttggcggctcggttgtatccttatatgtgtgtcaacctgtttgtgtctgaatgttgaacacagacacacatgtctgctcaaagctttcattatcgtattttagacagaaatttgttctagaatccttaataaatcaatctgcagaaagcacctgaggaaaaacgtggatgttcttgacacggctgtaaacaagcttctccggcctccatgagaagtcgtcagtttttcacagacttggatcacttttttattttttctttcagactttggattacgtatttctcgtacataaagattttgattataaaactgatgttaaatttcaacattacatattttctagggtttctggtttaagaaaaacaaaacactctgttttttaaactgttttcggtaaaccgactcgaaaagggattatttgtaatttattattgtttgtataaataggatgccaaaaaattctaaacttacgtttcgctccctctctaagtccctctcgctctttggttcttcttctcccgcaagattgaatctttggtttctttggattggtttcgtaagtgttcgcaccgaatcatcaaccatttcaccgctgggtatgttttctacactcgctcaaaagttttgatagtatgaactgaattatgggttttggagaattagttgtttaattgtaaaatagaaaactttatgattctgcttccattgattttagctggtgggtttgtcaaaatttcaatcttttctttgatttgatgattaatatttcattgaaatcatcgttgtttcaggttagtaggagtttgctggttattaagactttagtctgaatccaggcctggctcttggggtttgctctgttgctagtgcacagggtccaaccctgtctgaatcatggcgattttcaccaaacctgagagtgcattgaagcgtacagatggtaacattgcaaattcttacctttttgactcatgctttgatgtatgaatgttgcgtgtttgccgagcttatcaatgttgggcagagacaagatgctctcatggtgctttctgatctttttacctgctaacgagaaagttgagcaggcttgtagtcagcggatgctctggaggaggaggcccttgatgtcgatgactttgaagcagataaaaagcctgaagacttgcagccaagtgttgtatatcagcaacgactgctagaggaaaggaaaatttatgaaaatgagcaacaggtgaaatttattcttacagtagttttgcatctctatatattggttctgagtttaggcgaaaaaggtccttatagtctcttctattttgtttagcgtgaggttgagcgtcttaagagtgacctgaaggagaagaaaaggttggccagaatgttggataataaggtaagttggcttgtgaagttgtgtctactgtatcttcatatgtagcaatcacttcttgcaatttttattgtctagtaactcaaagcgaaattttgtttccaggaaatattcagggtgattcgtcttcgacaacctgagtttgagaggctaagaagcgagaggagcatattggtcaaataattcgagccaggaaacaagaaagcggtattaagaggaaacagatatatcatttgaaatctgatgaggaaaggataaaaaagcttcaggaagaagaggaggctcataggcgtgaaggtaagcccttgacttccatagaaaaacaatttggtcatttttgcttattaggcctcagtgaagaataatttagtcatgattttcccaagatttgaacatgtgtaagactcgttttcagctatacaaacccttttgcattgaataagctttttattttctagtcaaattttcgctttttcttacagtttcatcttgtcgcattttcatattctaaagtctttcaatgcatagaaacattgtagggattcatgtatattccttcctataatgtacgagaagcttttatatcatactaaaaactgaaagctaaaatattggtctgttttgttaacacatcttcaatggagttttggctccacttgcgctaaatagtaatacttattatcttgaagtggaagcaaactttgactcaactgtggttcctgctagaaaatattcagttactgagacagacatgcttttaagcaagtcaaaaagaacaaataaaggtaagacccttaaactttgtataaatcaagttggattagacaaactataaaatcttagggaaaaagttgtgtttagtgctgctcaattccttttcaggacacaatcacttgtgggtctatcttacgcttctttgttcacattgaaactgaatacatatgatgttggctttgacaaaaactcccactttgaataaacatgtcgaaaaacctctgaaacattactttagatggttatagaaaaactcagaacattttttaatacaaaaatcaaatccaaaagcttttgattccactagttaacactcgcaacaatatctttcttcttctaaaaccggtttagtgatctctaaaccgaaacaccagtttggtctctaaggatcatctggttgagccagctttagtccagcaaagtctttgacagtgaaaccaatcttctcaaacttcccttcttcattgctctgtctgaacttcaggtactccgaacacttaaacgacttgtagcttctttgttttccctcacccacaatttcttgaggtgcaagtatcactttctcatcctcaaaacagagaaaaaacgccagagagactctgttcaccaactttctcaatacaactcgatgttcagatgatctcagccgtccattactccatgcttgcataaggtctccaatattaacaacaaggaaatcgttgcacgggtttatatcgatccatttcccttctttagacctcatctgaagcccaccaacggaatcttgatagactattgttatgcagctcatatcagtgtgcatcccgagaccttcaacgagctcttcttgcttctccacgtcgtgtggaggtgtgtagttcactagccttaagtatccatgacagttgctaaagtcagtttggtagagtctctttccggtttcatctcctaaagtcatcatcaagagaatctttatgagtcttttggacaattctgccattttagctccgtattcttgcattgtttctctgaacaaaaaaagaggagaggtaaaaggttcaagccaataaaaagatgtgaaacacacaatatgtaaaaagaaacactgatttgtgttgtaatgacaaccttaactctggtttatgatgatcttggaacaaaacatctgctgaagctttggcagaatcagagaaatcaggtccagagacaacaaggctttcgaaataaggagaggcgatgtaccgaggagtatatgaaatgggaccaagcttgagctttgattcaagaggagctttgaaaacatctctggacaaggaacaaattttgctgaacatctctttagagattccatgattggtgacatagaagaatccccactctttacaagcctcagagagagaagacagtatagaggactcaattggttgtgttaagtctaacacaggaagctgcagagaagaatgaagttcagacattatattatatatttagttgtctaaagagtttagaggttatgagtaggggcaagctatgctatggataggggtatatatatttaagacatgattaaaagaggctttagaaatgtttcagacaaatgcagtaacagtagaacccacatttttggttatcattatgtctgtattagaaaggattgtaaattgatgattagattgtgacatttttacaattaggcataaacatcaaacttattgcaaaaaagttgggaggattcatggaaactttattattcatacaaacatatataagatttatcttgtaactctgcatatcatatattatgtccaaatgcatcctgcaggacctccacagtaaatagctcttaaccaaggatccttatcatcatgaacatatgtgactttgtaacatttttttgcagttgagaatgagatttttatttttaatgtactttaaggtgagttagctatcaatctatgctcaataaactatagaaatttgtgctgaaagttgtgaatttctaatactttattattatttattagagcgcaagtaatgcttagatatatttcaaatctgttgatttttcctatagcctgtgtaaaattaaaatcttatgatattgttactctttatctcgtagatcaattaccctatgcaccctccaggacctccaaagtaaacagattttaaccaaggtttatcaacatcatgaacatatctggctttgtaacagattggtctgctctcatgtaccttcactgtcccgcgtcctggattataaactttcccgtgaccatcgaagagtttgaggccactaataaaagcagctttatgaaagccctcactaggccaatgaccacttcccataggtggactcttctctctgatagggctatacacttgccctccccaagatgcataatttgcgctgttagattccatccaggacttgaacaatgatgctggccagtatccaataatctcctctttaaatacaaaccaccaatttcccgtgccactatcctgttcccaattttgaaatatgaattcaaatgactttaagagaagtgataaaaagttgagtagactttacctgaaacaagcctaaacgcaattcatattgtcgaccattatagatggaaaatggttgaagaacggcaccaactggtatagtcttgctaacttgcacaaatccaggacatgacatgccgtagcagccgccagtactgcttccatgtaactattaacacaattataaggaaacatatacataaagaacttataagacacagacaagttgataaagaaactattggtgtaagctcttactagtataattcaaaacttacagtccagtaggcgtataaacgaacatgatcaccatggtgcatcgatggattcacctgttgtatatacatatttcaaacttttgtcaactttaaattcatgcaacttacagttgacgaacatggtcacttttgctaaggaaccagaattaacttacaatccatccaactgaaatgctggcgaaatcttcttcaataggccccccactaactgccatgtatccaatactaacttgatcttgcaagatttttggtttccatatgttaatgtttcctgcaactccagcaaaagggttcggtccataatcagctcttgcatcctaatatccataaagaagaaagaaactcagaaaatgaaagtggaaaacaaaaatggtggttgctatatatactatcaacttataagggttcttacgtagaattttccattaaaattcatgttgtttgtctctgtgagaaaaggtctcgggccctcgaatcccatggatttcaaacgttgtgcatgcataagatcttgcattgtagtcctttttacaattactgtgccatctggacagcttataccttcttgcaaaagactaaaactctctgaaatgttgtttccagtgatatattcaggtactgttgttggccttagctgcatatacaaagtcagtcattctctaaggagaggcatcttttaattgaaaagacagtagataaagagagaattaaatatgtataaaatcaaacctgaacagagtggttttttagtaggtgatgatcaaatgctagttgtttgtgaatatcgatacaatcgaatatatcaccatgttcagtctgttcataagaaaaaaaagttagatatgaaacaatataagcatggaagaagaaggaaggctaaaccaaccttgaaactcttgattgcaggcttgttgatagctttgagttgtctcttcatttcattcctttctgcctttgatggtattgctcggcgttccttagttgcttcagcggatagaataagagtgattattaacagaagcagtaacacaaagtggttgaaggaagccattgatactatgaaagaggctcttatctttattctttcttctacaaacaagaaatgaatcaaaatgatttatttataatgtagaaaatcacatgaaaactaaattcattgacacaattagttcatgcatttttgtatcatttattatctttcattcaaataaaaagaatatggactaatgaccttgactgacaaataattaacaaaataacatttgaccaaaatagtttccatttgttacagatcttctgtgactttttggtctatattaccattttgcttacttcttctttttgtgtttcttttttccttcttcgtcaccaaactttagccagaactctttctcattgaatttctcttctgtctttgccagaactcatgccagattcattacggagtctcctttttctttctcattctctctctatctcgtcctctttaccaccagatttatttttcttaatatatcaataaaattaacaacttttgagatttttgttttttaatgtaatttagattaaaaaaaaacataaatgaaaatgttaagaaaacatgtataaaagtgaaaaagcagaggaaacttaatgcagagagatttaagaacatgttaactaaaatgtgcatcatttcctggtcctctgtagaagatagcttcagataaagttgtagttccttaatcgtgttattaacttgaaataacttgaaatacatcatgttaactagaatgtgcatcataccacagttcgcagttctttaatcgtgttattaacttagagcttctagttaataatatatatgtcgtaataatatagcaatgttccttaatcttataattacactattttgcagttaagaaggagatgtttttttcttgtactttgaggtgattttgcactcaatctatgctcagtaaacatattagtttttgtgctgaatgttgtgaatttcaaattcttgattattcattagagcgcgggtaatgcttacatatattacaaatctgtggtttttttcctatagcctatttaaaagttttaagatatttctactctttattttgtagatcaataattaccctatgcatcctccaggacctccatagtaaatagattttaaccaaggcttataatgatcatgaactaatctggctttgtaacagtttcgactggtctcatataacttcactgtacccgtttgtggattaaaaactcttccatcaccaaggctcatttggacgtgtctaaaataagcagatttctggtagccctcactaggccaatgaccacttcccataggtggactcttctctgtcacagggctatacacttgacctccccaagatgcataacttgcggcgttagattctctccaggacttgaacaatgatgctggccagtatccaacgtcttcatcattacatgaaatccaccaatctcccttgatttgatcctgttcccaatgtttgaaagataaatccaaatgacttttaagataagtgatcaaagagatgagtagactttacctgatacaaggtcaaatgcaattgatattgtggacccttatagatggaaagtggttgaataatggcaccaagtgctatagtcttgctaacttgcacaaatccaggacatgacatgtcgttgcacccggtattgcttccatgtaactattagcagaattataagcaaacatatacataagagtctcagaagataaaggaactattagtgcaagctagctcttactggtataactcaaaacttacagtccaagaggcgtataaacgaacatgatcaccatagtacagggatggattcacctgttgtatatacatttttcaaaattttattaacttatagttgatgagacgtatttgcgaacatggtcagtttttgctaagaaaccagaagtggcttactttccatccaactgaaatgctggcgaaattttctttagcccctccaccaactgctatgtatgccagactaacttgatcttgcaagatattcggtttccatacattaatgtgtcctcttactccagcaaaaagatctggtccaaaggtaccttttgcaacctaatatccataaagaacaaagaaactcagaaaacgaaagtagacaagaaaagaaaatagtggttggtatatatggtatcaacttataagggttcttacatagaattttccatttgaattagtgttgtttgtctctgtgagaaaaggtctcgggccgtcgaatcccatggatttcaaacgttgtgcatgcatcagatcttgcattgtagtcctttttacaattactgttccatttggacagcttataccttcttgtacaagattaatactccctgaaatgttgttttcagtgatccattcaggtactgttgttggctttagctacatatacaaagttggtcgtcattctctaaggagagtcatcatttaatacaaaagacagtagataaagagagaattagttatgtataaaacaaaacctgaacagagtggttttttagtagatgatgatccaatgctagttgtttgtgaatatcgatacaatcaaatatatcaccatgttcagtctgttcataagaaaaagaagttagatatgaaacaataagcatgtaagattaaggaaggctaagccaaccttaaaactcttgattgcaggcttgttgatagctttgagttgtctcttcatttcattcttttgtgcctttgatggtattggtcggcgttccttagttgcttcagcggataaaacaagagtgactgttaacagaatcagtaacacaaagtggttgaaggaagccattgatactatgaaagaggctcttatctttattctttcttctacaaacaagaaatgaatcaaaatgatttatttataatgttgaaaatcacatgaaaacttaagtttattgacacaattagttcatgcatttttgtatcatttattatctttcattcaaacaaaaagaatatggactaaatgaccttgacttatgaataattaacaaaataacatttgaccaaaatagtttccatttgttacagatcttctgtgagtttttagtctatattaccattttgttttcttcttctttttgtgtttctttttaccttcttcgtcaccaaaatttagccataaaaagctatttctcattgaatttctcttctgtctttgccagaactcatcaccagattcaacatcgaatctcttctttctttctccttctctctttatctcgtccaatctctttaccaacagatttatttttcttaatttatcaacaaaattaacaacttttgagagattttgtttttttaatgtaattaagaagaaaataaaaaataaatgaaaatattatgaacacatgtataaaagtgaaaaaacagagaatagttaatgcatagagatttaagaacatgttaactagaatgtgcatcatttccttgtcctccgtagaagatagcatcagaccaaagttcacagttctttaattgtgttattaacttagagcttctagtaaataggtatatgtcctaatgagatagcagtgttccttaatcttataattacattattatgcagttaagaaagagatgttttattcttatactttgaggtgattttgcactcaatttatcctcagtaaacatataaatttttttgctgaaagttgtgaatttctaatacttgattattcattacagcgcaagtaatgctaagatatatttcaaatttgtggcttttttcgtatagcctattaaatagtcttaagatattgctactctttatttcgtatagaacaataattaccctatgcatcctccaggacctccataataaatagattttaaccaaggcttataaacctcatgaactaatctggctttgtaacagttttgattggtctggtataacttcactgtacccgtttgtggattaaaaactcttccatcaccaaggatcatttggaggtggctaacataagcagatttctggaagccctcactaggccaatgaccacttcccataggtggactcttctttgtcacagggctatacacttgacctccccaagatgcataacttgcggcgttagattctctccaggacttgaacaatgatgctggccagtatccaacgtcctcatcgttaattgcaaaccaccaatctcccttgatgtgatcctgttcccaatttttgaaatatgaatacgaatgacttttaagagaaatggtcaaaaagatgagtaaactttacctgatataaggtcaaacgcaattcatactgtggacccttatagtaggaagttggttgaataacggcaccaagtgggatagtcttgctaacttgcacaaatccaggacatgacatgtcgttgcagccggtattgcttccatgtaactataagcacaattataagcaaacatatacatatagaattgataagaccctcggaagataaaggaactattagtgcaagctcttactggtataactcaaaacttacagtccaagaggcatataaacgagcataatcaccgtggtatagcgatggattcacctgttttatatacatattttcaaacttttgttaactttaaactcatgcaacttatagttgatgaggcgtattagcgaacatggtcactttttattaaggaaccagaagtgacttactttccatccaacagaaatgctggcgaaattatctttagcacctccaccaactgctatgtatgcaacactaacttgatcttccaagatttttggtctccatacgttaaggtttcctcttactccagcaaaaagatctggtccatagttacctcttgcaacctaatatccataaagaacaaagaaactcaaaaaacgaaagtagaaaggaaataaaatggtggttggtatatatactctcaacttataagggttcttacgtataattttccatttgaattagtgttgttggttgtctttgttagaaaaggtctcgggccatcaaatcccatggatttcaaacgttgtgcatgcataagatcttccattgtagtcctttttacaattactgtgccatttggacagcttataccttcttgcaaaagactaaaactccctgaaatgttgtttccagtgatccattcaggtactgttgttggctttagctgcatatacaaagtcagtaatcattctctaaggagagtcatcttttaatacagaaggcaatagctagataaagagagtattaattatgtataaaacaaaacctgaacagagtggttttttagtagatgatgatcaaatgctagttgtttgtgaatatcgatacaatcaaatatatcaccatgttcagtctgttcataagaaaaagaagttagatatgaaacaataagcaggtaagattaaggaaggctaagccaaccttgaaactcttgattgcaggcttgttgatagctttgagttgtctcttcatttcattcctttctgcctttgatggtattgctcggcgttccttagttgcttcagcggatagaataagagtgattattaacagaatcagtaacacaaagtggttgaaggaagccattgatactatgaaagaggctcttatctttattctttcttctacaaaccagaaatgaatcaaaatgatttatttataatgtagaaaatcacatgaaaactaaatttattgacacaattagttcatgcatttttgtatcatttattatctttatgcaaatttaaagaatatggactaaatgatattgacttatgaatagttaacaaaataatatttgaccataatagtttccatttgttacagatcttctgtgagtttttagtctatattaccattttgctttcctcttctttttttgttttttcttgaagggtgagtttgcactcaatctatgttcattcgatattttgtgctgaattgtgaacttatgagtattcattagagcgcaagtaatgcttagatatatatatcaattatgtcaattttctattataccctatctaaaagtcttacgatcttgcaactctttatttcgtagatcattattaccctatgcatcctccaaagtaaaaagctcttaaccaaggctcatcatcctcatgaacatatatggctttgtaacattttggtctcctttcatgtaccatcattatatccacttctggatcgaaaactgttcccgaaccatcgatgattttgatgcctctcacataagctgctttacttaagcattcaatatcttgatgatacttgtggcgcaagtatcactttcttgcccacaaaacagagaagaaacgatagagagactctgttcaccaactttctcaatacaactcgatgttcagacaatcgcagccgaccgttactccatgcttgcattagatctccaatgttaacaacaaggtgatcctcacacggatttatatcgatccatttcccttctttagacctcatttgaagcccaccaacggaatcttgatagactattgttatgcagctcatatccttatgctttcaaagaccttcaacgagctcttcttgcttctctacgtcgtgtggaggtgtgtagttcactagccttaagtatccatgacagttgctaaacacactttggtagaatcttttccctcatcaagagaatctttatgagtcttttgaactggtgaatcaattgatatactctcgtgaaagagtagggtaggggcaagctatgctattatcatcaagacaatctttatgactctttagtcttaaggggtttagaggtaaagagtaggggcaagctaggctatgtatatgggtatatatatttaagacatgatttttttttttgtcatcatatttaagacatgattaaaagaagcttttagatgaatttcagacaaaagcacagtagaacccacatttttggttatcaccatgttggttttataaaggatggtaatttatgatgatttgacttaggcataaacatcaaacatattgcaaaaaaagttgtgaagattcatggaaactttattattcgtacagagcgcaagtaatgcttagatatatttcaaatatgtggtttttttcctatagcctatttaaaacttttaagatattgctactctttatttcgtagatcaataattacactatgcatcctccaggacctccatagtaaaaagattttaaccaaggcttcttagcatcatgaacaaatctggctttgtaacagcttcgcatggtctcatgtaacttcactgtacccgtttgtggattaaaaactcttccattaacattaatgatttggaggttgctaacataagcagatttatggaagccctcactaggccaatgaccacttcccataggtggactcttctctgtcactgggctatacacttggccaccccaagatgcataacttgcggcgttagattctctccaggacttgaacaatgatgctggccagtatccaacgtcctcatcattacatgcaaaccaccaatctcccttgatttgattctgttcccaatttttgaaagatgaatccaaatgacttttaaaagaagtgatcaaaaagatgagtagactttacctgatacaaggtcaaacgcaattcatactgtggacccttatagatggaaattggttgaataatggcaccaagtgctatagtcttgctaacttgcacaaatccaggacatgacatgtcgttgcagccggtattgcttccatgtaactattagcacaattataagcaaacatatacatatagaacttataagaccctcagaagataaagaaaatattagtgcaagcgcttactggtataactcaaaacttacagtccaagaggcgtataaacgaacatgatcaccatggtatagagatggattcacctgttgtatatacatattttcaacttttgttaactttaaactcatgcatcttatagttgatgaggcgtattagcgaacatggtcactttttgctaaggaacgagaagtgacttactttccatccaactgaaatgctggcaaaattttctttagcacctccaccaactgctatgtatgcaacactaacttgatcttgcaagatttttggtgaccatatgttaatgtttcctcttactccagcaaaaagatctggtccatagttagcttttgcaacctaatatccacaaagaccaaaaaactcagaaaatgaaagtagaaactaaaaatggtggttggtatactctcaatttataagggttacttacgtagaattttctattgaaattagtgttgtttgtctctgtgagaaaaggtctcgggccgtcgaatcccatggatttcaaacgttgtgcatgcataagatcttgcattgtagtcctttttacaattactgttccatctggacagcttataccttcttgtagaagaccaaatgatctccctgaaatgtttctattgatccattcaggtacacttgtaggctttagctgtatatatacgtcaatgtgttcacaaattacatcattctctaaggaaatattcatcttttattgaaaagaaaggagataaagagaaaattctgtataaaaaacctgaatagagtggtttttgagtagatgatgatcaaatgctcgttgtttgtgaatatcgatacagtcgaatatatcaccatattcagtctgttcataaaaagataaataaaatattaatcaggtatgaaacaatataagcatggaagaagaaggaaggctaaaccaaccttcaaactcttgattgcaggcttgttgatagctttgagttgtctctccatttcttttctttctgcctttgatggtattggtcggcgttccttagttgcttgagcggataaaataagagtgactgttaacagaatcagtaacacaaagtggttgaaggaagtcatattgattattctttaaaatacaggctcttgtctttattctttcttctgcaaataatgaatcaaaaggattttagttataaatttataatgtagaaatcatttaggaagtactaaatcacttgtgacatttgatttaaaatgaattaacaaaataacccttgaccaaatgttttctacactaaattcattgacacaatataactaattaggtactaaatcacattcaaactaaatttatggacacatttagttaattaagtactaaatcacatgagacctttgacttgaaagaattaacaaaataactttgaccaagtagtttccattttctaccaaacctttttggaaatttcttttaagaaaattgcatgcgtttttgcaaatatagcatgttatttcaaattaacacatgacttttccacaagagatgtacacaatcacttaaaactatgttacaactagcacgggcgttgttgtaaaaacaagataatagagagatagtttagtatttactccacccaacaaaatgttatttgctaatatgtttggcacaaggctattattctcttcatttattttgattctatggttagttactaatattacccaaaaatcaatctaattcaattgatcatagttttattaaaactttcatatttttatttacaaataatttagcaatggttttagcggtctaaaatgaaattatattacagtaaagtgtttttaacctttccatagaatattatcaatagaggatgattgcataatttgcattaatgatattcacataatcttgggcttatgtaacggttacagaaatttggaagacattcttgtatttctgttattctttcgaaaacaaggtccaagttttatttttcaacttaaaaagtgaaaaaactgaggatacttgattaatgcggagagatcttaagaacacgataactagaatgtgcatcctcctggtcctccgtaaaagatagcgtcatcccaaacatgaccaaacaatggttggtcctttttgactttgtaacaattcggggtgcttgagaatgtctttagagtatcaagtggtggagtcataccttccgatccaagatcattatatactacaaaatcattcatataggctactttcgtgtaacttttctgttgtgggaaatgtccacttcccatgcttggactcttctctttcactggactatatacttctcctccccatgaggccaagcttcctccatggcctaaaccaacatctgtgaacaatgattttggccagtatccaacataattattattgaacgccaccaaccaccaatttcctgtaatatgatcctgcttaaacaagcacggttacttatagaatcaaaggactagagaaacagcatgaacattctcattaacaaataccctcaagttttggtggaattggctaatatcataaaacttctcatataagcaaatttgtttggaagttgatgctaccttatacatgttgatgcctacttcgtattgtttgccaccgtaagtggaaactggttgaagaaggtaacctagtgggatatcagtgcttacttgtacaaagccaggacataatgtattgtaacaacctgtcttgttaaacccatctgcctgtttcgaaatcaaagggacatatacaaatcatggcgagacacaacatgaaaataccaaaaaagaggtcaaatgtattattgtaaatctctttagaggtttaagatcttactgtccaatatgtgtataagcggctgtgattcttgtttagccattggtacacctgagcgatattttggaatatgtatatttggtaaattttctatatcttcaccatggatgagtgcaattcagagaaagcgagggaaaacacaagattatgacttactatccatccagctctaatgccttgaaactgttcatttgatcctgcagagatagtgatacttgcaagactgaattgattaggtgaaacttcgggttcccagatgttaagatttccctttgctccataatgaaattttttgtactgagccacagcaaactataatacaaagagaataataaggagagaaaagtgattaatgctcaatgtatatatatatagggatgtattagcctggttcatacatgataaccagatagatcaatgttcttgctctttgaagaaacatatcttgaagatttgaagcccatggatttcaaactctgagcttgtataagatcttccagtgtggtcctcttaacaatcacggttccaagtggacaacttataccatctcgtctaaacgggaaggaaccacctttctcagaattgttgttattatttatggtccatttaggtatagtcgtaggcttcaactacacatcatattccaatccattcataaaataagctcttcattaagaactttcagtcgaattagggatcggaactaattcttatatgggataaaacctgaatagaatggtttatgagtagaggatgattaaaggctagctgcttgtgaatgtctatgcaatccaatgtatcgccatgtttagtctacagaattgcaaacagaaataaacttgatttgttctgaaaaaaatgcgaccattctatgattataccatattttttgaaaggcttacccgaaaactcttgatcgcagacttattgatatagttgagtaaactctccaacgtgttttcctcctcttccaatggttttgttctgtaactctcagtaactataattagagctattgctgaaaaagttagcataagaaatttttcataggaattcatggcaactaataaaactcccaaggaaccaagactatatattaactatcttttcacacacaaaaaaaaaaaaaaaaaatgtttgatgcacaacaactatataatggtgtcagattaatctaaagaccataaaaatcaataaagatcctatgtagaatgactggcaagtggctctcttgctattagctttctgttgattctaataaaagtcttttgcaaacttttaagacttttttcctttttacctttttacctttttctaagctcacaaaaaaacttatcagatctccaataattaaattctttgtttacttttatctatgacaaaagctctgctttgtgaaaaaaaaattactcgaagtccaagatataagtcaatcttttgaacatcgtagtgtattgacattcctggatacctttctctagtttcaaaagaaaaatttaggagattaatttccccactttaacccccaaaaaaagtagaagaaacatgtactgaagtaattttgcatattagctaaaccttattacaagcaaacaaattgtttttgaaaaaaggacactacgaagtagctccaacaatatcttccagcataattgtttcaattcttccaccaaaacatatgtactatatttcaacttaaaaatgaaaaactaaatagagatcttaagaacatggtaactagaatgtacatcctcctggccctccaaagaaaatagcattagcccaaagttcacccatacctggtttctttatggctttgtaacaatttggggtgcttgaaactgtttttagagaatgaagtggtggacccatcgaaccttccaatttaatatcttcgattagttcaataccactcacataggctgctttcttgaaaccctcttgtgggaaatgtccacttccatgcttggactcttctctttcactggactgtatacttctcctccccatgatactaaacttgctccatgggctaaaccaacatctgtgaacaatgaatttggccaatatccaacataattattgaacgccatcaaccaccaatttcctgtaatatgatcctgtttaaacagacgcagttatttatacattcgaaatgactagagaagcaaaattttggtagttgatgctaccttatatatgttgatgtttatttcttattgttcgccactgtaaatagatattggtttaagaagtaagcctagtgggatatcagtgctcacttgcacaaagccaggacataatgtattatagcatcctgtcttcttaaatccatccgtctatatgagtcaaatgatagaacatgtataaatgatgatatccacaacatgagaatatcaaaaatgtcaagatggattttatattaaagctctttagagattttgagaacatacagtccagtaggtgtataagcgagtgtgattccggtttaaccattggtacacctgaggatatttttgagtgtgggttttggtaatctttttttacttttcaccattgataaaaaaaaaaattagagaaagcaagggacaacacaagatcttgacttactatccatccagctctaatgccttgaaactgttcatttaagccgctagagataagcatacttgcaagactgaattgagtaggtgaaacttctggttcccaaagattaaggtttcctcttgctccataatgagaatatttgtactgagccaaccgcaaactagaatcaaagagaaaatataagaagaaagaagtgattaatgcttcattgtatgtgggaaattcaaatttctctatgtgacagatgtactagccagattaatacatgaaaaccagtcaaatcaatgttcttgctctttgaagaaagagatattgaatctttgaaccccatggctttcaaacgctgatcttgtataagatcattcggtgtggttctcttaacaatcacggtcccaagtggacaacttatgccatcttgtcgaagcggtacgggacgagaatcattattattagttatgttccatttaggtatagttgtaggcctcaactgcacatcatatttcaatcaattcataaataaactcctcttttttaaaaaatatactcgaagtagggaacttctataatatagacatgcataaacctgaatagaatggtttttgagctgaggatgatcaaatgcgagctgcttgtgaatgtcaatgcaatccaatatatcaccattttcagtctacagaattgaaaaaagcaatcaacttgatttgatatgtaaacaatatgattctagccgcatgaaaaccataacttacgaacatgttatccgatttttcaaaagactaatttacctgaaaactcttgattggaggtttattgatataattgagtaacctatccaactcgttttcatcatcttctagtaagatttgtccgcgactctctgcaactagaatgagagataccgctaaaaaggtaagcagaagaagcttatcaaaagaaatcatggcaaccaattgatgtaactataaagattcaaaggcactcttaattatatggttgtcaaaagtatatatggtgtcacattaatctaagaccattaattaatattaacaaacaatctatataccattataatgagtggcaagtggccttctttctatcccccttattatggattctaaatttctaataagagtctttagcaacctttagtatacataaactttagaacaagaattaaagtattcatttacctttttctaaggtcacaaaataaaaacttgacaaatctcaagaattaaagtctttgtttacctttttctatgcaagacacgaaagggtattttttgaagaaaaagaaatataagccaaatccaagatataagtctaaccttgagcatcgcagtgtattgaacatttacggataacaaatcaaatttagagctccatatataacattgtcggctctccaaacacggaaaagtttgttcggtctgaatccaaaactcatggcctaacttcttgtaaaattcttgggtaaaaacccccaaagttctagatcaattcaaatctaggaggaaactgaagcatttaaagaactgactacgagaaattggggaaaataaatctaaaagcaaaatcgatgtttccattgcatcaatttggtatcagagcgacgcttagttattatacatcatgcgttgctctgatagcaattgacgtgatggaaaccgactgatggaattgtagaaccctaattagtggaaagctctgtatgtatatatatattggtagaaaagattgacgaaatcctaaccctagaaagaacaacttttttactgctgtatatttttttttttccttttttaaaaaactcttatatgtttttaccgtatctatgtgaaaatcaaaaacaaaatttaacaattaggagagaaaaatagttagcaagaaatttattgatttgcttagaagttctagtcaatagcaattatactttatgtcctacttataatgcagtttcttaatcttataattatgatttttgtagacaagaaacgtatgtccaatgctcaataaacatatactgaaagttctgaaattggtttagtttattttgattatttataaaagcataagtagtgctaagatatggttaaaatttgtaaaattttctcatattagcctaatctataacttaagatattgtaactctccagttcatagattattgccttagcatcctccaggacctccaaagtaaacagctcttatccaaggttcatcttcatcatgaacaaacttggctttataacaatttggactgctctcatgtgtctctatagtgtagatttgtggaatcaaagcttctcccttaccattcatgatatgtatattgtttacaaaggctgcttttccgaaaccttccttaggaaaatgcccactgcccatgattggactcttttctgtctttggactgtacacttgacctccccaagatgcaagatctgctcctttcactaagcctgacgctatgaacaatgactgtggccaatacccaacattcacacctccaaatataagccaccaatcccccgtgacacgatcctgttcgcgatattataagatgaatatctaagtgacttaaaagatgagatcaccagagactctggaggtaactacctgatgcaagcttaagtccatttctttttgtgtgccattataaacagaaattggttgaagaaggacaccaagtggtatcctcttgctgacttgcacgaatccaggacatcttatgtcgtagcagcctgtcttattatatccatctgcctgtttaaatcaatatttaattaccatatatatctcactaagaccatgccaagttagaaaaaaaaaaacataagcgtaaactttcaagtggttactcaaaacttacagtccagtaagtgtataagtgaatgtgatcttggtataacaacggattcaccatccatccaactgaaatgctggcgagctgttctattttaggaccgcctgcaatcgccatggttgcaagactaacttgatcatgtgacacttgtggatcccagaggttaatgtttcctgttactccagcaacgttgtcatagtcatagtcggctgttgcaaactaaatatccatagagaatgaagaaattaagaaaatggaaacagagtaattgtattttatactgtgaattaaggattcttacatgatgtccacttaaatcaatgttacttccctggctaaggacatgtctagggatattgaaaccaatggatttcaaatgttgcgagtttataagatcttggattgtagtccttttaacaattactgtcccatgtggacaacttattccctttagctgaagctgcataggaccaactttttgtcctttgttgtcgtatgtgatcggccatttaggtacacttgttggctttagctgcatatatacgccaaggagttcacaaagtcattctctaaagagctttagtttatgtataaagaatttgataaacctcaaaaccttaacagagtggtttcttagcagatggtgatcaaaggctagttgcttgtgaatgtctatacaatcgaatatttcaacttgttcagtctattcaaaaagggaaagttgaaaaaaggttaatgtatactcataaaaacttatgtcatgtttcttagttagcatgtatgaagaaggaaaggctaagcccactttgaaacttttgatagcaggtttgttgatagctttgagttgcctctccatttctttcttctcttcttccgatggaatcccccggctttcatgagctgcttcagagactaatacaagagaaattgttaacagaattcgtaacacaaggtttttattggaggaatccattgtgtataaaaaatggttatccaaaagtcagaggctcttatctttcttatgtaaatgaacaaatgaatcaaaagaatcagttatagtgaatgaacaacttacaagcaaaatgctgagaagaactcacagacaagtggcttatacttttttcatggaatcatattaataaagagtgaataaattaatgaatagttaaaggttccagaaaattaaaaggagaagatctgagattaaactcttcatattaatactgagaaataaacgtatctacctctctgctaaagcaaacagaaaagttctaaaagaaatctataaagtaaacaatcataatctcttaaacataattgattgtatttatctgtatcaatctaaaataagaaaaagggaagtggaaatcaaaaggcttaaagatcagaccatctaatttctgattttcatctcaaaataaaaaagttaatgcaaaaagatcatactagaatgtgcatccttaaggtcattcatagaacatagatttagaccaaataaattaacccaacaacttgtgtagttaagacttcttaagaacatagagatgtaaattcttaagtgcgagttattagcaaattctaaaacacttttctcttcttgtatacttgtgctgacttaggtgtctcaaagagaaggatttgatgaaacaaaaattaatcgaaaggaactcagactcatataaactatgaagaacaagaatttcaaatgtggtttacaaataagtttacattttatagaaaaatatgtaaactcagtctaaacgagatataatttgacaaagaacgtagcaattcaatgacctaaaattgaaaaagaaatctaaaactaataaacacaaaaagaaaacttctagatcttcaagacgacacaaaagtgctattttgtgaaaaaaaagaaaattatatagcctaagtcttagatatatgtaagatcgatccaatcatgaaactctgctccaagaaactaagggagaaacataccgtcctctttagaaatctcatgaattagttaacttgtgtcgtcttcttaagacatagaagcgttaacaacaaggtaaaaggaaacacggaatcaggcaatatcgatgtttccatagcatcaattggtatcagagccgcacaaattcttcataggcgtggctctgacagcaatcgacgtgatggaaacgcagcgacggaactattgagaaatcgtgcaatcccttatctgcttatatatagctctaaatatagttctagaggagattaatcaaaaccctaaccctgacaaatgcagccgcctttttaaccaaaaaaaaagcccaacttaaaatcaaattaacaattaggaagaaatctattaaaaaaaaaaaattataatctgtttactaaaaaaaaaaagtttatgtttgtatctgatcatatatacttgatcctcacaaaagaaaaagtgaaaaaaaaataattatctaaaaatcaagataattataagattaaaaatccattttattgtttaactaaaactaagcagaggacatatacactaagtgtataaagttcttaagacaagtaaactaaaatatgcatcctccaggtcctccaaataaaatagctcttgaccaaaattcaccaacacctaatattttttggacattataacagtttggactgcttgcgaatgtctttaaagctgaagctaacggactcgaaacttcttttgttatatcagtgattatttttaaaccattcacataggctgctttcttgaaaccctcttgtgggaaatgtccacttcccatgcttgggctcttctctttcactgaactgtacacttctcctccccaaaacacggcactcgctccatcagctaaaccttgacgtgtgaacaatgattttggccagtatccaattggctcgttatttagcacaaaccaccaatctcttgtaacatgatcctgcttaaatcaaaagttgttaacataatcttgacttttcgatattagtttgaagaaagctaatgttgtatatttatatatatacctgatatatgctgacttctagttgatattgttgaccatcataaatggaaactggttgggcgagcattccaattgcatacttggtgctcacgtgtacaaacccaggacgtagtgtattgtagcaatgagtcttattatttccatccgcctatttaaatcaaagatagtagccataatatgaatgccacatttaagagtcaagactttaagaagttttgaaaaacttacagtccagtaagtgaacaagtgactttgattattctgatttagccctggatacacctaaaaacatattttggaatgttagttccaaatttttgatttagaaaataagtaaaaatagggtctagcttgacttacaatccatccagcagaaatgctttgaaatcctttgttgcctgatacagccatagccgcaagactaaattgatcaggtgagacgtttggattccatacgttaatgtttccttttgctccatagtggtcatctttgtaactaattgtggcaaactaaaatccgaagagaaaaagaatagataatcaaaaaatattataagcattgtggacaagttacaaggcgatctcaattcaactacgtgtaataagaaatgattcttacatgatgaccagttaaatcaattttcttgtcctttgcagacacttgtcctggatagttgaatcgtaaggattgcaaacgttgagctcgtataagatcttcaagtataattcttttgacaatgactgtcccaactggacaacttatgtcatcttgtcgaaatggcagagaactagttttatgagaagcgttgttatctttggtccatttaggtatagttgtgggtttcaactgcatttatatttcaatccatccaaacattaataagaattttatttatagatattttttcgtggtttgtaggataaaccttaatagaatggttcttgagcaaaggatgatcaaaagctagctgtttttgaatgtcgatgcagtcaaatatataaccatgttcagtctgtcgaaatcaaaagcaagaaaaaattggtgtggtctgaaaataaatgtaacttgatgatagttgtaatattgttacaatagtcaacaatttttgtaatgttttatgaaaatttaagaaaagaaaggctaaatttacttggaaacttttgactgcaggtttattgagataggtaagtagcttcttcatctcttctttctcctctttcgaaggtattgttttgtgactctctccaactaaaatgagagctattgttgataaagttagcaagataattagtttattggaatacctcatgatgaatcaaggatcttaatctatatttttcaaaagaaaaaatgaagcagaacaactatatttattgtgtcacataaatctgagatcatttataaccaccaaagaacctatacacagtaaatgacaaatgtatctccctctatctctattgcccatatgtagatgctaaagtaagatttctcttttttttaatgtacttttttttgtataaagtatattccataagaaaaaggaaaagcttgtttatggatcaattgaccccaaaaaaagtttttagatcaaagcccaatataaaaaaaaaacacagtagtgacacaaaggaacttaaataaaccatgaattgatctataaacagtagagatcgataaggcgaacattttccatgtgaagtgtcttctttcatctataatatttttgacatccaataatttcctctataatatcattcacataattgatagaaacattatgttagaattgtccacatcatttgagctgtaatatattctgttttaacaaattatatggtagttgcttaatcttatgtccatcttcttctatgcatcgttttcgcgcctagttgtccagtccatttcaactacctacctctaattcttatcttaaaacaacattttttaatttaagtattatgctcaaagactaactagatagaaaaccgttattaaacattaaacgaattaaaagtcttacatggaaaatgtaggtttataaaccacgagttatgattgacaataaaaaaaatgcaaatcatcaatcaaaagagacttgagtgcgactctatatcaaccattgcaattaaaattatctatcacaaaaattttagacagattaagttaatttagtctaaattcactaatttattttctataattagtaattaactatatttatttatttacacattttctgataatttagaaatttgcatgaataacaaatataagattttggaaattagtagcaaatttaattaataattatttttgcctaaatgaaccaaactataaaacctccacatacaccagtcatcaaatttacagagacaacaaactaaagttggtggtgatagagtgagagagaaacatggaaggcaaagaagaagacgtcaatgttggagccaacaagttcccagagagacagccgatcggtacggcggctcagacggagagcaaggactataaggaaccaccaccggcgccgtttttcgaacccggcgagctcaaatcttggtctttctacagagcagggatagctgagttcatagccactttccttttcctctacgtcaccgttttgacagtcatgggtgttaagagagctcccaatatgtgtgcctctgttggaatccaaggcatcgcttgggcttttggtggcatgatctttgctcttgtttactgtactgctggaatctcaggttcaggatctgttcttgctctgaattttgtttaaagttttcgaatttaggttgaaggaatctggaattagggttacttggttgtgagaaacttggatataatgaagaaagtttgatacttaaaagtaatttcacatttaaagattgaaactttgagtaattttcttcttaaagtttgaaactttggttagtttgccccactttgtttcttctgtgtgaagatcataatctgattttgacttgtgtgtggcgaattggtttggtaatgagcaggaggacatattaatccggcggtgacttttggtttgttcttggcgaggaagctatctttaaccagagctctgttctacatagtaatgcagtgccttggagctatatgtggtgctggtgtggttaaagggtttcaaccagggctgtaccagacgaatggcggtggagctaatgtggtggctcatggttacacaaagggttcaggtcttggtgcagagattgttggaacttttgttctggtttacactgttttctcagctactgatgctaagagaagtgccagagactctcatgtccctgtatgttgctaattctctagtatccttgagttgtgttgagttcatattcttcacatagagctcatgtgttttttggttatcgaacattttgcagatcttggctccgcttccaattgggtttgctgtcttcttggtgcacttggctaccatcccaattactggaactggcattaacccggccaggagtctcggagctgccatcatctacaacaaggatcatgcttgggatgaccatgtaagttttcctctttaattacatcaacggttgtgctaagtatgataagttatgaattgcatctaaatagcaactcagaatttttgataattctgctcttatctgttgtctcttttgttttatgtgtctgcagtggatcttctgggtcggtccattcattggtgctgcgcttgctgctctgtaccatcagatagtcatcagagctattcctttcaagtccaagacataaagtttcctacatattctctgatcatcatcaagctaagaatatatcaatctttaattctatatgctttcttcttgtttcctatgtcatgtgtgatgatctctatatgtaccactagagctttgatcttgtaacagtgtaaatgtgtaatctattatgtatcaatggcattgtatcttgtaacattaattatgtcaatggaagaatacattgtgtacatgtgtaagctcagaatcttgtttgaatatcacagagacataactgaactggacataggtatgctaagttgctaacattgtcaataagtgtttccaataccaaacattagcaacataattgtaaaatgtgtagaatttgatagaacaacatctaagccgaactgaactggtctaacaccatcatcgcaagtatttcttcatcttctttcttctataagagtctttcattttccactttttataacatgcttataactgaattttcaacttttgaatcacagtttcagttatagatattcttggatgatgttcagttcggggttttggttttggttttggttttggttgatagtcatgaaaatgcatgttctgttccacatggtagggttccagtaaaataataaaagaaccagatttagtaacatctttcacatgaatgataacatatttcacatgtttgatgcagcaacttgtaatatggatgatagtcatgaaagaatctaatgggccaagaaatgtgaaagagtctacatgactatcatccaaaaaagagttgtagcaatatggatgggccaagaaagtgcaagacttcagcttgagcttgactttaagagaataagtaatttgcatttgccctttggtcatgtagtactcgggttgtttacatttatcaaacaaatatcagagttgtttattgttatttgggaaaatctttaaactttctacataatctttgagactagtgggaattaagagtggtgatgtagtggatcaagattaaaaaaagttgattgtttaaaacatcgagtatcttgcaatacaaaacaaaacccttaaaccaatcaatacgaaaaagatgaagatgtcaactttccttttcaaaaatatgcaagtttgaatccggatggtaacatactgatgttactagttacacaaatatctaggctagatgtcctaatcatcttcaaaatattttgttgatgttttatcttaaataatcaaagtttttcaattattgtgggtgttgtatatatttaacataatcttaatccataaacaaaaagtaatataaaggtgttgcgggaaaaggttacttaatggttaagaagtttggcttatgatcatcccactttgtgaagtatggcatgaactttctttttaccgatattagagccaaatgaaagcggtttcttaatcgccaagttccaaccaaaaaacaaaaagcccacatttacgaaaaatactcttaaaccaacattttgaattcatatgatacaaagcttcaaatatccaaatcgaggaaattattttttaaaaaaaacaatacataacttttaaatataaattgcgaaaaaaggtaaagccactcatcaaaattcaaaagtgatgagattaaagcaagtgaagacgcatacattatcacattaaaagtagcaaacacaccaagaaattagataaaaagataacaaaataattccatccactttctttttcttttgttttgtcaagattttgttttttgtatttcagtcatacgtgtgaatgtatatcaacaacattgtttttaatgtataaaaatctcaactactataaagtagctgaatgatatgtgattaagatatatatcgagagagacaagccagcaagaattttcagcacacatacacacacaaaagattcaaagaatcatctagtaacaaataaaaaaggagagagaaggaaaatgaacagaatgagcaatacagtgataggattcttgaatatcctaacactaatttcctccatagttctattaggatcagctctatggatgggtaggagcaaaacgacatgcgagcattttcttcagaagccacttttgatcttaggcctagctatcttgatcttgtcagtagctggtctagtcggtgcatgttgtgacgtggcttgggtcttgtgggtgtacctcttcttcatggtcttcatcatagtcgcactcatgggtttgaccttgtttggattcatagtgactagccatagtggtggtgtggttgtcgatggtagggtttataaagagtttaagcttgaagcatatcacccttggcttaagacaagggtggtagatactaattattgggttactataaagacttgtctcttgggctcagtcacttgttccaagctcgctctttggactcctcttgattatctccaaaaagacttatctcctcttcaggtactcgttataatcattccaatttttttcataatcagtaaaattagtaaactagctagtcatttagagatttgtaacataaaaataagctagtgctaaacattacatgctaataataattcgagtaattgaaatattctgatatttggaaacagtctggatgctgcaaaccaccgacgtcgtgcgtttacaacacggacacggtgatacaacaagaccctgattgttaccggtggaacaacgcagcgacggtgctctgctatgattgtgacacgtgtagagctggcgttttagagactgtacgtcgcgattggcacaaactctctctagtgaacgtcattgttgttattttcctcatagctgtttactgtgttggctgttgcgcgtttaaaaacgccaaacgccctcaacattacggcttcccttatggacgttacggcatgtccaaatccagacctggatgggaacagtcctggtgagattaactgcttagagaattacaatattttttttcattgaatatacgtttataggtttgttctcttttctaatgcaacaattatttttattattttcgcggcatgtaggtcaaggtggtggcatgggagagatcggtattagtgaaaaatatttatgttaatgttttcgaatatcacggttcaactttttggtttccaatatataattattgattttgaacagaacataaattttttataatgaaatttctaattcgagaaaaaaaaatttagtcacttccgatccacaaaatctgagttaagaaattgaaaaaaaagagctaaatgttttatgtttatggaacattattttaaatgttattttaggtagtcaaatgggttatctttgggccagacattagtcattgaggaggcccacaaaggtatagaactagagtaacgaagccttgccttgaaggcaataatcgcttctcccacatcggaagtttgaggatggatactcgtctgtgacatagtataaataaagaacatggtcgaagcttgcaaattacttacctggacggggtcaactcgtgatcaagaagacgagtggcctaggctagtgaattccattgcacataacggaagggtgcttagcttaaggtcttcccttgtggaagagcctgcgtcattatttgtggcagagggggtttgcgttcgcgcagcccctaccattcccagtagttcaatcttttgttcatgaatacccatggcctaggctagtggcttcctgcacttgaggtgcgctaagcctaaggtttccccaaatggccaagtgggagatcctgcgtcattatttgttgccttggggggctgcgttcgcgcggcccattccatccgcaatagttcaatctttttagctctctggtaactgttataacatctgaggtctttctttaattgttcacgtttttggtggagctattttattgaaggttgttaatttgactttggagatgcaatcttctaatcaaatctccacgtgagaagcgaggattctctcctcgtcattatttatccttcccaattagagtaatcacacttttctgtcacatatgaattattaaaatcagaacttaagcgaaatccttcgaccactaaagaagaaaatccctaacaaatctcagagtttgtgttaatttcttctttccttacatcttttccagaagaaaaaaagctgaaagatgtggttttttggatcgaaaggagcatctggattctcttctcgttccacagcagaggaagtcacacatggtgttgatgggactggtctcactgccattgtcacaggttttcttctatcaatagtttcatgcccttttgcgacttgggtttgtctaaagttgtagacttttctataattatgaattgatttcatatgtagggtagagattttttacttttattgtttagacaattggaatttgatgtttttatgatcagggtctgtttttggttcggtcaaccctaataaatatatggaggtcatcaccgtttgttgttctaaagtttgtcttttttttttgccaataagtaacaagcttttgctcacaagaattggattgctatgtttggtgaattttaaagtacaacatgtttgggaccatttgatctgcaaataacatgtgctattagaaagttacatatatatacatacttgtctctgtttcagctgattctaagttatgttataatcacacactatacaatttctgaccaaaggaagaaaaaaaaaagatttgcttgtagatctcgtttcaatacttttgtgaagtgctgcttccttattttggttagattgagtatgtagtttagtatgcacatgttctgtatcagcctatcagggtattgaaaaggctaggaacgagcttaatctattagttgatacaacttaagaaagtgagatttctgaacatgttggatcctcaagttttgttttgtttgttttcatgttttttcaggagcatcaagtggtataggtgtagaaacagctcgtgttcttgcactgcgtggtgtgcatgtggttatggcggtgagaaacactggcgccggtgctaaagttaaggaagatattgtcaagcaagtccctggagctaaagttgatgtcatggagttagaactcagctcaatggaatctgtcaggaaatttgcatctgagtacaaatctgctggtcttccactcaacctcttgatgtaagctattgaaatatcgtggttcatctatagccgtttggatttattgacgtttatgttttgacttgtctcaattttgtaagcaacaatgccgggattatggcatgtccttttatgctctctaaggacaacatcgagctgcaattcgcaaccaaccatttaggtgagtatgataaccaaaccaacattatggctttgtcctacattttatataattagtttctaatcagtgcaacggtttttgtaatccaaatacatttcaggacattttctgcttaccaaacttctgttagatacaatgaagaacacatcacgtgaaagcaaaagagaaggaaggattgttaacgtatcatcagaagctcatcgttactcgtacccagaaggagtccgctttgataagatcaacgacgagtcaaggtactaatggtgaaccaaatagtataattctccgatcccatcttttcttctaaagccaacattcttccttgatttggtctccacatgcagttacagtagtatacgtgcttatggacaatctaaactctgcaatgtattgcacgccaacgagcttgcaaagcaactgaaggtaaactacactaaacaaagcaaagatgtagcaaatcaagaatctatgtttccatggttatcttcaattctggtatatgattaaaaacaggaagatggagtcaatataacagcaaattcacttcatccaggagccattatgacaaatctatggggctacttcaactcctatttggctggtaacttcttttctcggattcaactctcatcactccatgtttcataaggttacactcaaagtaaacaaacgcatacatatattttgagtctcttctgatctctctgtcaccggcttaatgcaggagctgttggtgcagtggctaaatatatggtcaagtctgttccgcaggtatgcatctaatttctgaacctcacactaataaccaatcacttgcaaacttgtcactaggtttctcagcttaagtaggagagaatgatacagcagtctagctttacggattgatttggtttttgttggtaatctggtttataatgtctgagtattcgacttggtagggggcggcaacaacttgctatgtggcattgaatccacaggttgcaggagttacaggggaatacttctcagatagcaacattgctaaaccaatagaacttgtcaaagatacagaattggcgaagaagctttgggatttcagcactaagcttactgattcgcaatgatgattaccgttgcagtagatagttgttcagggaacctttactttcgatgtctctattgtgacaatacttatttcagtctttattgatacaaaataaaatgtaaaaaacaaatctgaaatcatttccatttcaattctgcaaaaagatggtttatccaatttcagcctaaacaaaagtgttacttatctgttttctcattgactcaaaacagttgtctagtgaactaactcgtagacataagtaagtaagaaaccaaacagaaagagcttaaaacatcttctgattttggagttaactcatgttattggtgggagctattttaaggacatttgttaaatcctttaaaaagaaagttgttaataaatccccatcatttgactttggagatgcactattctacacttcaacctcaacctcgtgagacatgaggattaaagtaaagtaatcacatttctgtcacatatgaacaaataaagttatttaaatcagaataaaagcgaaatcgcttgaccactcaagaagagaaaaacgctaacaagtcccatagtttgtgtttattggacttctttcctctcatcttctccagcagaaacaaaaaaagctgaaagatgtggttttttggatcgaaaggagcatctggattctcgtctcgttcaactgcagaggaagtcacacatggtgttgatgggactggtctcactgccatagtcacaggttttcttctatcaacactttcatgccattttgcgacatggggttgtctaaagttgtagactttttttcttataatttccagaacttttgtcctctctgattctgtcttcgaattgatttcatatctagtaaaaagacttgacttttattgtttagacaattggaatttaaggtttttatcatcagggtctgtctttgattcggtcaactctaataaatattgaggtcatcactgtttcttgttcgaaagttgtcttttttttcaagaatttggattgaaaattccatgtttggtgaattttaaagtacaacaagtttgggaccatatgtataattgcatgttaagggaaaataactcgtctctgtttcagctgcttgtaagttgtgttatatatcacaactctatacaattcctggccaagggaagaaaaaatacagatttgcttgtagaaatcgtttctatattttgatcatattacattagggcctgaaacaagaacaatggagtccttgaattgatagaaccctgttaggtgacactaaagacttgcacatacatatttgagtgtagcatcgattgggcaaaccctgagtcagcctaatagcctatcagggtttgaaaaggcttggaagagcttaactgatcattggttgatacaactttaaaaagtagtctagcctgcattgagttttctggacatgtttggttccttaagttttcttgtctttgtgttcatattttcaggagcatcaagtggtataggagtagagacagcgcgtgttctttcactgcgtggtgtgcatgtggttatggcggtgaggaacactgactctggtgctaaagttaaggaagatattgtcaagcaagtccctggagctaaactcgatgtcatggagttagatctcagctcaatgcaatctgtcaggaaatttgcgtctgagtacaaatctactggtcttccactcaacctcttgatgtaagctattgaatactgtatatagcggttttgatttattgatggttaatgttttgaattgtcttaatcttgtaagcaacaatgccgggattatggcatgtccttttatgctctctaaggacaacatcgagctgcaattcgcaaccaatcatttaggtgagtaggagaagtaaaccaacattatgtggctttgttctaaagttatatacttaagttaacatcatcattagtttttagtcagtggcatggaatttgtgatccactttatttcaggtcattttctgttgactaaacttctgctagatacaatgaagagcacatcacgtgaaagcaaacgagaaggaagaattgttaacctatcatcagaagctcatcggttctcgtatccagaaggagttcgttttgataagatcaatgacaagtcaaggtactaatggtgaaccaaatagtaattcttctatcaaaatctaacattcttccttggtttggtctccgttgcagttacagtagtatgcgagcttatggacaatctaaactctgcaatgtgttgcacgccaacgagcttacaaagcaactgaaggtaactagaaaaacaagagatctatcaaatcaaaatctatgtttccatggttatattgattcaaatctggtatgaataaaataggaagatggagtcaatataacagcaaattcgcttcatccaggagccattatgactaacctcgggcgctacttcaacccctatttggctggtaacttcttttctcttattccactatcatcaccccatacttcacaaggttacacacaagtaaacaaacgcatacatatacttcttctgatcctctctggcattggcttgatgcagtagcggttggtgcagtggctaaatatatactcaagtctgttccacaggtatgcttctaatttcgaagcctcacactggtaaccaatcacttacaaactggtcacaaggtttctcagatcttgcttaaaggataaaacttggttttgttccgttatgtggtttataatgtctgagtatacgactttgtagggagcggcaacaacttgctatgtggcattgaatcctcaagttgcaggagtttcaggggaatacttccaagatagcaacattgctaaaccattaccacttgtcaaagatacagaattggccaagaaggtttgggatttcagcaccaagcttaccgattcacaatcaggagaaagcagttcttgaaagtaaatgatgttcagtgaatctttactaatggtttcatgtttcaacgtctcttatctctactgtgacaatacttatttcagtctttatcaaaggaaataaaaacgtataacaaatctgcaataagatggtttattctgaccggtttagttctaaaccttcaccaaacacttatcagaagaaaatgtaaaaaagctttgtaatcaagtatcagaagattttaaagacaactttcgaattcaaaaagaagaagaagccacgaggagacaatactgtcaatgcattattaaagtgatggtcagaaatgaaaataaaaatcaatgatgatagttttctagtttaaactcactttattaatggtttcattaggaaggttaagtaattaattaatctttgtgattggaatttggatcataacgtgcaaattgtcgatatagagtgttatagataggctctgtatttaattcatttcataccctctatatataattgtcggtcgttagatggcatttgtttttatatttatttgatttggaccaaacaatgctattaatgatatgcattgtataaatttcaaactataacgagagcaaatttcaatgtaggtttaggactatatatgttgatatttaacaaaaaagaaaaattcatcttagggtgataagattgatcactaaagattattgaaatgtggccaagtactagagtactactatttgtgactattttacaattgttcacaatcatatctattgtacgtacaaactatttgcagaaaaatcacatgctccaatatgagatattgtgtgtatggatgtggatacctcaaattaactcgtaaaaatgtatggacctaatatagtatataatacgatactaaagatttttgttcattttactgttgttgatagacttacactatgatgagcaacaaaggactgaaatttcaacaacaacaaatgatttttgaaattgtcaaaattagttgtcatcatcagcaacaacaaaactaatcaaatatgtttgtaacattctatttgagaaaatttatataactatattgaaaagaacatatatcacacaatcgtatatgaatggttgggggatggactaataaagagtatggtaatgtttctcaaactctctgagaagccaccaaaccacttataaagagatctaagttcacacctttgtgtttactttatctaactaatccgtggtactacaaagtaattaaattgtggtaacattgaattacatattcatttttattctatcattaccaaaaagtcaatcatgttgtagtacatgtacagattggacgctttctttgtatttttctgctgtgtacacattcaactttaataattgctcttctccgtaatgtggtaaaattcgatttcatgcatatattcaggatttcaacaacagaaaaagttttcaaaaataaccaaaacatgtggccaagtgatctttgttatcactatgactaaaatccatataatccttacaattatcattcacatatatttaagcttcataattgactcatctttcaatcattgacaaaatttgctttgtcaaacaaaagctaaatcataaggaaatagtgtctacatgaaactaaatcaaaattattccttctattcaattcctaattcataaggatgggcctcacaattggactttaattctctaaattagaccatttttctgctaaaagagcaaatgtgatctcttgaaaaggtgttggagaggcgataattcggagccgtggatgaaacgtgtgaaaagggagtgatgaggccatcaggaccgtacgttgatatcacgtgaggacacgtgggggattgagtgagcatgtacaaacaaaactgtcttttggactgactttggaagcaaccaaggaaacatcgaacatcattcggtgtaccataaaaacaatgcatatcattgagctgtttgttacccccaaaaaacatatggtgtcaaacacaagactattgtcttatcaatgactattattgatttgaatcttaatttatatccatcttaagcttatcaagattcgagttagggtggtggacattagttaattatcaaattttataaatcctaactaagggtagatttcggtgtataaaaccaggtcaaattattcgttttatagtttttctatatatagtgatgaaaataattgtatatatatcttccacaatactttaaaaatgtacaaaagttcatatatcttccttacattgttacatgcatggctatatcctacacttgatttagtggagtttatttaataactcaattattgcttgggaagatagataattgaactacgttcatgggaaggtctacgtcttcaatcattgatccccacaaaagcattggtcgtgaacacgactaataccaattaagcaccaaaattttgattttacttatctagctaatgaattaatttacttttaatcatatgattttgaagcaaaatccagactgattacattgtatgtgaaagagacatatttttactactatttaaaatgtttacggtggctaactataagtgaaatcgtagagaaagaatttgattcatggcatatatcaaattttaaccatcatggttgttattcgtgaccttagaatttatgcgtgtgatcacccaaaaaaggtgatatatttttttacatttgtttatgatctaatctgaatgacaaaaataagaaagccttaaacaatgtatactttttataattatcttgattttattatttgagttagtctaaatcaaacaaagaaacaaaaagttaagatcattggaatagtgaattagcactttacaatgttaatccaatgctatttcaaaatggaagtatatgtattgatggaaacaaataaataacaagcattcttataaaatactaaaaatcaaaccggacgatcataatattttttaaaaattattgtgccattattcagaacgtgtgatctatctatttgaattgacccgaccgttagtaggcaaattaacaaagaattactcaagcaaaataaaataatttattgtaatgcaactatgcaaggttcagcataactgcaataaaataatcgtaaacaaatctatttaatttcatattgtaattgatgaagccgtaccccatatattccatttttaatagataatgaattgggatcatgcaacgatttatttacgtcatggcttttcgtctaccacttgcacgttagaacttactcgttacaacgtttcaatttttcctcttttttgtgttaattcttcgaccagattttaaatcatattgtcaacaactacatgtacaaatatgcaatcacatactattggaatataagcattcctgttaaacaacaacgttcgacgttgttttttgtccaatcggattttagttcggcataaatgcgttaagatgtatcatgtgtatatgaagccaaatatggttaattagagtacaattttgtggtgtttccaataacaaggtgcaaaagaagacagtatataaactctctgtgaaaagatagacaatataaaaataaaataaaaaacaagaagcaaacataaagtaacaatatcttattaacaaggactatataaatgctaaacacacttcctctggaaaggataaaggcttatttcttgaataataaatatttttgtggaccttactgaaattttcatataactaacttcatagtaaaaggtgtggacagattccaaatgatggccagaaacaatccaagtataaatcattatgctaataattaagggttttctttttgtcaactctttttattataaagggatcggaacagattcattaaaatgtacacattctcaacatagagacatatatctacgagtggtagaaacttaacaactatgttaaaaacatcctacgaaattctgtagtaatctggtttcgttgtttggaaagaaaaaaaaaatcgttttaaaaaattaataaaatgaaaataaacactataatacgagatattttagtcgttagatatggttgtactacgtggacctagcttagacctcagagaaactagctacttgtaaggtgctttcggcatatgtgactcgatgcaatagttgtagcatgcatggtcgagatagcttatgtggtgcgtcacatcttttgagataagcatttgcatatggccgaataacaatccacatctccatacaatagcatttaatgattgcgcatgattcgtctcgaatacatgtgtttaacaagttggaggtgaattgttaacgagcaatggtctcgacaacccattttcatgatccgagtgaagatgagataacctataatcttagagtcatgcgagaggtgatgtatgtgactcttgctttctcaaagtattttctgttagttatgcacgagagacctacttatttttcggtatttaagcgatgatttatcgacctctacaaatgtcgttcagttagcaaaccattcgtgtgtcgtcatttgatatggttgacgaaattgagatcacgaaatatgacggttgtaggacgatcatcccattggataacataattgctaataaatttactcgtcgcaaagtttgtgtcgttttagttactaatttgtattgtaactacaaaatcatctcatattctcatcaataacaataatgaacaagtttgagaaaaaaaggatattaaacatatttattccctaacaaaatacttttttttttatctctttcgtttgatctcttttttattttatccaagaagatatacctatctttatgaacaaaagagcagacggaaagggacagtgacgcccatatcctagtcagggacgtgactatgagaacctctgtttttttacaccccagagactaaatttatgaaaaatttcttatcaggaaacattgttcatcggcagattcaaaacagtaggaaagaaaaaaactttttgtaataacaacatcacttgtgaagtggagcccacaagccatacctagctagcttgatctctccttcgtttaggtctttctatttttaattcttttaatttcgaaatttcacttctcccaatctctgtcttctcttcctccttttgaacaacatttcaagagaatagagataaagatctctaaaagaaagagaaagagagtgttgtgattttgtgtgctttgtatgatttgacagtgcccatgtttctgtttattggataaagacctctaaaattactttctctagatagatacatattcgaactcaaaccggtaagtctctctaagaacaattccatatttatttctcctctagtggtaattaatcaaaaactcttaactctttatgaatttttcctcttctgggttttgagaaacatgtcttgttctcttatgggtcttgatcaaaattcaatttttattataaaaatctcaactttttgtctcccctgtttttttaacaccctaaaaaaaaattagagtccttttcaaaagtctatctgtaaatggtgatgcattcgactactctatgaaagctctagtgttattctctctttataacttcttatttctctcactttcatctcctttctcattgattgatactcttcttgagataatttaatttagctggcttcttcttcttcaggagagctctgaaaaaaacctgaaagattgagtttttagggttcttgattcttctaaagttcctgggtttgattgatacaaagagctcaagatgatcttgttccgaccaatgtaagttctcagatctgaatcctttgtacgaaaatgaaaaagaaatcatttttatttaaaattagaaatttttattatgattattatatttccctttctgcttagatctgcaatgtcctcaaaatcaattattttccttaaaagaaaaattgatgattcttcttctattttttgcttttaggaagtggtttttatttccctttgtgaaactatctatttaactattcaagatttcaaaaatcattctactattcaagtacaagctttatagtatatactctgaagatttcatttcctttaactgtaacctttctttctagggttcttgtctttccaaatcttgaatcttttaagctatcaaagccaaaaatctctccttttttgacagctgtttgactttttttttctttgaatcagattggcttcaatggattcatagggctgcatttatgggatttgatagattgtcaataaaagaaaacttgtggttatggattctcgaggtgacagttctaggttcgggcaatatccgacaaagcctacaaggaacatgtcttcatcttcatcagctgctttcttctcagctaatcagtctccgtttttctcaccaagatctcctaaaatccaacaagaactatctgaatctactcgctctgatgctcaatgtgatagctttgatcctcttagctccagctctggttttcaagagcctgagcttgcgtttttaaccgctcctaatcaatgtcagagccttgaggctgctgatcgaatcgcttcgagtagtatgatctcttgtactccttctagatatggaagaggtcatgagtcttcttcgtatactcagacatcttctgtatctgtttcttataataggttgagatgttgtgatgtgtttataggattgtatggtcagaagccttctttgcttcggtttgcggattggcttagagctgagttagagtttcaagggatgagttgttttatgtcggatagaggaagatgtaggagttcacggaaacagagaatagttgagagagcgatggatggtgcgtcgtttggagttataatactaacgagaaaggcgtttaagaatccttatacgattgaggagctacggtttttcgcaaacaagaagaatcttgttccggttttctttgatctttctcctggagagtgtcttgtgagagatatagttgagaagagaggagatttgtgggagaaacatggaggggaattgtgggttttgtatggtgggattgagaaagaatggaaagaggcggttcacgggctatcgcgggttgatgattggaagcttgaagctcatgaaggtaactggagagattgtgttttcagggcggttactttattggcaatgcggttagggaggagaagtatagtggaacggttaacgaaatggcgggataaagcggagaaagaggagtttccgtatccgcggaatgagagttttgttgggaggaagaaggagttatctgagctagagtttgttttatttggagatgttgctggagattctgaaagggattactttgagttaaaggcaaggccgacaagaaggaagaagaacgtgacgctcgggtggaataaaagcggttcagcggaagaaagacggaagaaagggaaggaaaaagttgtgtggaaggagtcagagaaagagattgagatgcaaagtacagagatgccttcacggagtcaagtgaaagtagggcgaaacacgaggagaaaacggtcgatgaaggttgtttacgggaaaggcgtggcttgcgtgtcaggtgaatcagggattggaaaaactgagctgcttcttgaatttgcttacaggcatcaccaaaggtataagatggttctttggataggtggtgagagccgttacataagacagaactatctgaatctttatcagtatttggaagtcgacatcgggatagagaattcttcggataaaacgcggatgaagagcttcgaagagcaagaagatgctgcggtttccaagattagaaaagagctgatgaggaatataccgttcttggttgtcattgataacttggagagtgaaaaagactggtgggattcgaagcttgtgatggatcttcttcctcggtttggaggcgggactcatattttgatatctacacgtctctctcaagttatgaacatggagccgttgaaactctcttacctctctggtgctgaagctatgtcgttgatgcaggggaatgttaaagattatccggtttcggaaatggatgcattgagaactattgaagataaactcggacggttaacgttgggattagcagtcgtaggagcaatattgtcagagcttcctataaacccgagccggcttttggatactataaatagaatgccgttaagagagatggtgtgtagtggtcgagaggggaatctgttgagaagaaatgcgtttctgttgcagctgtttgaagtttgtttttcgatctttgatcacgcggatggacctagaagtttggctacgagaatggttgttgctagtgggtggttagctcctgcaccagttccagcttctttattagctttggctgctcataaactccctgagaaacacagaggtccgaagcggctatggagaagactaaggcgcgctataacctgcggttttacgtcttcaaactccaaacgatcaggagctgaagctgcttcaatgctacttagattcaacattgctcgaaccagcagcatcaagctagggtttatacagatccacgagcttgtgaaactctatgcgagaaatcgagtactggtcaatgaaaacgctcccgcaatggttcaggcggtgataagccgcggctcgactgttgaaaccgcagagcagatctgggcggtttgtttcttgctgtttggttttagcaacgaatctccgactattcagctgaagataacagagctgctgattcttgtgaaacaagtaatcttgcctcttgcaatcagaacgttcatatcattttcgcgatgcacagcctcagtggagctactaagggtctgcacaaacgcacttgaagcagctgaccaaacgctagtgacaccagtagagaaatggctagacaagtcgctttgctggagaccagttcagacaagtgcacaactaaaccctattctatgggaagaacttgctctagctcgagccaccgtgctagagactcgagctaagctgatgttacgaggcgggcaatttggtttggctgatgacttgatcagaaaagcaatcttcataagaacttcgatctcaggagaggatcatcctgggactgtgtcggctcgagagacattgagtaagttaacgaggcttttatccaatgttcatcagattcataacacttcaccgtaatagagagaagcttttagggctttcttgttgtaaaagttataaaggttagagtttcttgtttttttttaattatcattattttagtcataagagttagatttatacagaaggtttagtaataaaaaaaactgttatctaagaaatttgtcagagaatccttttttatcacagtaaaatctctgaattttcaggctcttctaaaactgttcttcaacttttctcgaattaattcagattcagaaacaaatcttaaacataagagtttttcaaagaatattaaacaatcaaatctaatttctgtatatcatcaaaaggaagtgaaagcttctgaatgtagtagagagcaacaatgttcatcataccaccagagtaagtcctaatgcctgtttatatcaaatcttctgtaccgtttttcgcacttcttgttccgagctattggtttcttgttcacgattatgattcagtgagcactaattcctgtgaaaagaatacccaaaaagtagactctattgtcaaaacagattctagtgactcaagaagttcaaaatgtattgtgaaaatggcggattttaaacggacacaaaccttatcgcaaactggacacgcctcgcttctttccatccatgcaagaatgcaagcgagatgaaagtcatggccacatttagtgagcaatttcgggttatcaatctcatattctgcaaacaaacaagatgaagatatttaccaaaatgttatatttaacatgtaactttgaatgataaacaaaataccttctaagcaaattggacattcatcgattgcttctcgatactgtttctttagctcaaaatcagttagatcatcaacatgccatgttttcttctctggaacaacttgtgtgagtcccggggatgcttcactcgaattgccctgagttcttggcaatttcggtggactagtttgaagatttatattcgtgatggctaaaggaataggcggcgaaagaggtgaactgtatgcattagagagagaggaaggcgtggcacgagataagggaagatgctcatctatagttcttgagctctacagaaaacaataaaacataagaaaacaaaaaccaaaacccaaaaaggctgcaaacaagaaagacgtagaggctttacttcgggtatactcgggagacaacagcagcaacccattctttggtatgataaagttttgacagttctcagatcagtgtatagcagctctttaggttaccaaaagacctgtagtatccagaaaaaattcataagactcctaattgaaactctaatgggaggcaaaatctagctctgtgatcatactaagtaactggaaaaccaaactcaaacaccacaagtacttcaatgtaacatagctaactatacactaacaatgagagaataatagtcacagagattaaagcaatacaaatatgtgtatccattgtgatgacaaatataagattaaagactctcgtgtacttatgaggttcattatgaagaaagtaaatttcatgttgaatactcatggaaaatcatatgatcctaagaacatcttgagctttcaaatgaaaaaaaaaacttggtttaccataacagagatactattagttaccaaaccctaatagacgaagaactgaaaacagagtggttaaaaaaataaaaaacagtaaaacctggaaactaaaaaagtgggctgaaacagaagtaaaaaaaaaaaaaaaaaaaatctcagaacaaccaaacagaacaaacgaaaacagaaaagaagaacctcacaaacagagttagtgatcctacaaaacaaaaatataaagtgacttttgtaacggagaagaaaaaaatcattagttacctaaaaaacagaaacagaagcttgatatagtccttcttttgataggatttctgggaaaactttttgaggttttgtgttgaatgagaattttctgatggcgacgaagaagactagctgcgacgaaagaggcgactttatcagagagataaaatcaagggatcacaattttctttactttaattgttattttggttgttaatcaaacttttttgtatttatattcattaatcacaaaccatatcgtacaaggaaactctggattttcttaagaatatttcccattagcccttttataataagattttcatgatttgaccaccaaggtaattagtattattttatgggatatacaatattaaccatataagttataactatataagcaagttttaaattaatgattgcactacttatagtatcttaaatctaaaaattatgattcatacttttggttcaaaataaaattaaaaactgattaaccagaaaaacaatttttttatatttagtaaaatattggatatgaacagatttaaaacattatctacagataaactgatataaagtataaacccttggtggggacaaataataattattctatttagtaaatgataaaattgtctaaaaaagtattttcaagcttggacctttgttgtacttacggtctcaactaaaatgtatagttttgatcaaattaaaatacaatggtgagctttcataaaccaataatgtcgaaactttggtatttcattttaagttacaaaaatattagttgattgatagtataatcccttttatgtgatggcgtgtagcgcccttactcaacccttatattcggtggcattacttcaatctcacgttactattagtccccctcaagctttaaaattttcaattagttttggttttgaattgatttaataatcaatcgataattaaaagaagattagtttcgacgaagctattttgtaaccgcatgttacaggaaatcatgattgatattgatattaggaaattgctacgtcgcattacgggcccagtatctatctatctacgcctatctgttgtgaagaaggtaccaaattctcaactggtttacgtgtacgaatctcttcgctccacttaggaaactttttgatttcatgtcggtcactgaacactaaaaatagcatttgctgataataagtcattatcacactagtttaatcaaaaaccttttggggcatatacgcaacgacaacatcaaaaatcaaagctcttacgagaataaaaaaacgagtgggttccaacacaaaaattagaaacaagaagtcggcaacaattcacttactacatacactaaaagaagaaatttgcttaccttagggcagtgtaaaatcaaatcaagccttgaagagaatttcgactgcttcaaagaagagaggagcgatctcaggggttggagtcttgactgcacatttcagaccaggttgacccactatggccgttagttcgatcaggaacggtatgcctcttggtaccttggccgaaagatagaggacgtcttggttcccattcttacgctttgctatgaagaacatgtttgatgcggcgagtaaatcaagtgttgactccacgctcgtgatggttatcccggggaattctttctgcacctcgtttgaatccggtaacgatttccatgtctaatcaaaaaaacaaatgttttataactcagaagaactggtttttaagactgtggtatatagttatgatcagaaatcaatatcttccttcagttcttactgagtctagaaacttaaatcgatgaaaaccatatcatatgttaagatctacagcaccctaactcccccaggcttcttaaggcacaaaatctgtcactaattactcgcccatcttaatatcataagccctctccactattagtcaatgactaacatggtgctgtattgttaatgaactctttatcatatattagtcttttacctcgaggaaggttccgcgctccatccgaccatcttctgagaaaagagcgttaagtacaatcttatcctcgaagtaccagacaggctgctggttgtttttgacggcaacttgcaataccgagctggtggagccagtagacatgttttgggacaataccattggcatcattgtcctggcagatgctccgggttgcagaggcggaacctataatagtacaaaacctggacatcagtttcaggaatccaggatatataataggcgtagatgtagagcatatccaactactattacctgaagtgatccgacagctgcaaggccgaatgagtttttgttgaactgaatcatgaagccatcaagaagtgactgcgagttgttctcgaggagcatactgtagaatacttgaccatcttgtcgggttaattgagcgctaatctgcagaccttgaccctttgatgctggtaggacaacaggcagtggacgactgcaaacaatattaggtgattcaatgagttttataaacaacaaggtgatccaaatagatatgattgaataaaaccagtccatcgcacaccccaactgtgagagagacttttaatgtaattttcaccattcaaaactcaccctgacggagttgtgggttcatctacagggacgattgcagcattatctgaccccattaggtcacctagcagatcgggtacaggagctggggcagcagctagctttgtgacatagcctgtggtagctgacggggaagctgcaccatcaaccggattaccagatgcctcgggatatcctgtttcgctcccttctacataatcctcatcctccgttttctgaactgtggttttcaagcgggttacaaaagcctctggcggcttgtgatacacagaggacaaggtggatatatttgcaagtagctcatccaggagcgacggatcaagttggtttgagtcatcagtaatcacaggcttttcagctaaaacaacatccttggccgcctatagtcaaaagaagagcactgatgactgtaggtaaaagagatgattgttgctcatcctccaatgtccttgaactagtttagtagaatatattaagaaaacatacctcaggatcagtcgatagaagacgccagtagatgtatgcacgatccctgagatcaggattatctgtttcaacagtagcattattcaagacaacctgaaaaattgaaacatggcaaaagccaggcctgtcgtcaaatacatgcgctttaatcgattaggagagcaaaaggtagtcttcataatggtcatggcagaacctgaatcatttgttgtgggccttcagttggcttcttcagaaatagtttgactgtagctgtaagaagctgcagttggacttgtgctggttcctcagggaaattctccaggaagctttcaagaagttcatccgcattgtcgattctttcagcatattcaccaatgatccaaatcatagatgcctttcaagatgccaacaaatacaagtatgagtttcaccgattatatttgcgatggagaagcttccagctaatatacactacccaaacgacaaattttgttaccttagcttctggttcatccaatgtgtctagactctcacagagtgttgcgattatggactcatacctgcacattattttaaaagacatagccaagattaaaaagaattacagcacttcaggaggccaaaatcaacttacgtatttggatatcttctaaagatatctttgatgactataatggcctcctgcacaacgtagtttactttgatcttgatcagctcaagtaaaacactgatgcaccgttcagctgctctttctagtttgatggcacatcggcctatagcacgaacagccttccgaacaaaatcaacatctacttccgtggcatattctttgaactccagaagaacctacattggaatggtctagaaaccatcatgatgtgcaccaaaacaaaataacttggacaaacggcagatgataaaagtgtagtaaggattacctggtctatgtttctgtcagaagcaagttttatcataatctctaacttctccatcttaacatatatcggatcattatacttgcagaagaacacctgcaataaaaccatgaagcattatcaacaaatataagaatatatcaattgcttatttcggagagtctacgagacaggatcaagctaccttgatttcatgggcaagaatagtgggtctcttttggacaataaggttaatgttacgaagtgcaacatactgtatctcaggttctgcagaaagcaatgtaactaggggaggagccatcttcttgcaaagatttcgaatcacatctgtgctagtaataagctccatctgctgaaggatcatctggaaagcaatgaaataaagaggactggcattagaaaattatgtaagggaatatagttgacacttcataaacaattttgactggcgaacaggtgacattccagagagaagtatatattttgaaagtgtcaccttaacagctgaaagcacaacagcacagttggcatgttgcaaccttggagtgactctctcaacaatattttcagcttcacgaggatcagatgccttatacctcgacaaagcatctaatataaaaacttgaccccatctgtgaagaacacaaacagtattaaaaattgaaagctataaatatgtatacagcaaaaggaaacaatagtcgctttatggatccctttccccaatgttcaaaaccatgagtcctttatctacacagaaaaccttcaacttcaataacaacaaagttctgtcacaattttaggttagatacagaacaaaatgcatagataaactgatgctttaacacaagaagcaagtccgcaactcaacagattatcctactgtgaatatttaggccagcctgtctgttctccgaaaacaaaacctaatatgatctgactaaaattagtcaatcatacacaatctgagtgaaagtaagagatggaaatcaggaacgacttactcagtacattcattcaaagctgtaaggagctttgtgaggatggtactattgatttcaaatatgggactagtactattctcttggatctctgcaagggcagctacagcatttgccacaaccattggattattgtctgatattaaatcctttaaggcttccaggaaccccctatcctcaactaattcagcatttatgtcaaacagtttagcaacacaaatagctgctgtcttgcggacatatggatcatcatcctgaaaaataaaaaaattgcaacatgccagaaaatacagaaatatgtcatcagtcaaagaataaaaaaattcttgagggacataaatatttgctacaaggtgcagtgacaaggtagcattaaaaactcaacctttaggcatttctgaagaggatcacacaaatattctgtaatcttatcaacacgaatacagcccatcgttcgcacagccaaagcccggatcaatggatttgggtcttgtgaatcctgccaaatacaaagcgagaacttaataacgatgagtttcttaaataattttccatccaccaaaatcagagaaagaccaagaaacttgccatatgttaggtctttatgtttgggtaggctatataagcaaagtagctgaagtgttaccttaacaaaagtatttacagcgaggatagcaagatctggctggctttttgcatagtttatcagatacaagtaaacaagcttcttcaactccagattctcagtttgcatgcaattgactacatcagtgaaaagtgatgaaacatcctttccaacagtcattgccgcaataaccttcttaacagcatctttcctcttatcctaggaacataaagaaaaaaagagaatttaggaaactgaagcaaaaacgcattccatcatcttcaatcagtaccatatacaaccattggaccatctactcaaagaagaactgtttctatcgcccaaccactgcattgatccatattcaaaacttatgatcccccaatctaaacacatccccgcattaaccattattctgaatttcattccatttctacatagtttcaaatgaaccattgaacacataacattataacgtacaccatcatcaatctttcaaactaaaatatcaacaaaattaaccgatcaattcgaatccataatcatacagatctaccagaaaatgattatgcataattcaacgaacgagaaagagatgagattagaatcgtgaaaatggcggatcacagatccatatatgaaattagacggagaagaagaaccttgtactgtgaattcagctcttccttgagctcagggatctctcccttcttcgtagtcgaaaaatatttagaatcatgaccgctcattttctcccttcttcaacctccacacttcttctcctccgagacgatcagtgacaagagacacaaagacacgaaattgcaaaaagtaataggtcggggttaaaataaaactaattacagtttaaccctagtattattgatatttgacgaaattgcctcgtgacttcgtctagtcaacgccagttgccatccaggggaggggagaagaagaatttgtattctcaagttgtcgatatgagagagatgaagtcagaaacacgtttgtgagagaacagcttttagatgtgattgtggatcagattctcaaagacttttcgcgaagagtctctgatccttaaatcgcttctctctcgcttgacctcatttcgtcgtcgaaatcagatccttgtgaaaatgccgaaacaggatatggagaagatggagcttcgtaagaacttccgtaatgtttggcataccgatcttacccacagtatccagaacgatactccttgtaatttctcactctctctttttgaaatttgtgggttggattggttttggttgttgatttgatcgatttctgtgttgttcgcagattgttgcttcgcgttgtggtggtaagtttcgattgatctgagatttttcgttgcttgttctctctgtatttggaatttggatatttgtagtagtcggatcttggtttatttgaattgaccaagagttgacttcgatttaaattcttagatcggcttgattttcatttcatcaagaaatgtgtatggagtgatctgaatttcacagataatatgagtttctctgatcattgtatgtgataatttcagtgcattaggagtttgacattgtatgatttgtgtatctctttgggtctgatatgtttagcatacatatggaaatgtcttgtttcttcttcttctcattgcagtgccccttgtgcatcatacttgcttcgcaagcgtgcgctttacgatgatatgtcaaggtatatcacacattcagtcactttcatatagctccattccaattccatcttcttagtttaagaagattgttttttttgtctcgcaggtacgtctgctgtgccggttacatgccttgtagtggtaggtgtggagaagccaaatgtcctcaactttgtcttgccactgaggtaagaaacttgattttgttagctattatcttcaaatgaagtcttttttttttttggacaacaaaaatgaagtcttttctatagacacagctagtctagaaatttcgatttcagcatctgaatgcttcctgtagcatatgcatacaatctcagtcatacctaggtgtgacttgtgaggcaacctcgcgaaattttagcaaatttctggtcttctaaatagcagatcaatcgcaggtcttctgctgctttgcaaactctgtggcctcaactcgctttcttctgcaagatgagttccaaattcaaacgacaaaatgtgacaactgcatcattgtaagtatcctcattgcccagaccatgcctgttactgacactcacaagcaattacaaacacgataaacaagtttcgtaatctgtgctggctttttggctgtgtagggtttcatggtttgcctcagccaagtggcttgcatattctccatagttgcatgtattgtcggtatggatgagctttcagaagcttctcagatactcacatgttgctctgacatggtgtactgcacgtaagaatcccccatccaaagtgccattcttataagtttcgatcaaaacccaattttaacctattgtcctgatatatcgtactttgcttggtctgcagggtttgcgcatgtatgcaggtacgagcagtgatgatatcatatcaacccattccaatctctccttacttaaatcctacacttacggtaatatctataatacttttgtagacacaacacaagatggaaatggacaagagggacggtaagttcgggccacagccaatggcagtgcctccggctcagcaaatgtcacggtttgatcaagccaccccacccgcagtcggttatcctccacaacaaggttatccaccttctggttatcctcaacaccctccacaaggttatccaccttctggctatcctcaaaaccctcctccctcagcttattctcaataccctcctggggcttatcctcctcctcccgcttacccaaagtgatcactctttgcctgttttctctcccgattggaaaattttatttcatctttttttaatgctgtcttgttacgggtcaagaattgaacgttcgctgattgttttgaggtcgttgtttgtatgagattttgacctcgcatgttgttgttgttttctgaaacgtccctcttggactaagagatttcatgactttttcctttccttttaaattctctctttttcgaaagtacagactacagagtccaatacaattcacgcaccgtatatacaggaaaaacattttgtcctgataaagagcttgaagtgatgacttttagattctgatcggtaaattgtatttgagagcagttcttttatgaacgatcatatactgagagaagaactagggcgggatctcaatgaataaaaattttaaataacgtggcaagaaattaagagcggtaaaacagcctaaaaaaactctaatttccttccctttcacaaaaataaactatattaaaaaattacttaacttcagtgacttcacctgctctacatacaccaacattgatccataacgtattattcctctttgtttgtaatactctgcaacaattcctcctaggtgactgtacataaaacacacacaaaaactattaagtacataacattaatcacatataaatcatatgctaaaagtgatgatattttacttaccctttcccatagatgagggtcgggtttcttgtagacgacgatggtattaatctcagctgggtttgtcatcttccatcggcaagaaggatgtgaaacacggtgtatcgtgtattcgctaaccgtcgtgttcagctgctgatcgaatttcgtgctcgacatgtaaaacacaaacggtttttgacacgggttccggctaaccggcctagtgttgaaagcgtaagcagtgtaatccgcccgtttgtaccaattcaagaaggttctagaaggcatttccatttctcggggagagaatattccgcgaaaaatctgaaccgcgtagccccaagagaccgagatggtccagctcttgtgcttgtcgtagcatatcgactgctggagaagcccggctgagtcaagcttcataggttcggtaatcttcttgagggcgcggacacgtgtcatgttagggaaaatcggttccaccacgtcgaggtggtgcatcgagacgaacggtgttactgggtgtgcagcgagaaggccaaagaggttcccgtaaacgtcgtactgaaacaaagaaacagaacacaagatgaaagaaggaacgtgtatatcagtcgctcacatggcgcgtagaaacaatgagaggaacgagtcatttaatttgttaaaaacagaaaagcgggtcccactcattacaattagcaaattcgcaagtaaatgaagggacattgagctactcacgcgcccatttgtcggtaccaaaccacaggaaattttggcaaaatagcatccaaacaaaaaacagaacaaagctaagagacgaaattgaagtcatgaacggaccaccagcttcagattttaaaccaaagctttctcagaagatcattaaaaacattgaatgcttttacttctaataaagcttcaaactttgaaagtttggtactacaagtcattccttctaaaactagaaacaaaactcttaaagtcttaaactttgttgagtaaattccaattccaaagatcaacactttcaatacccatgtcacaaaatcattaaaaacacctattttgccaccaaccatcaaacttgcttatacttacactaaacaaaaaaacaatcaaagctaacaaacttaagttttctagactcaacatcatcaattcccacttaattaagacctcaagaaatctataattccattcttacaacaccagaaattactaccaattctgcccaaaatcaacaaatgtccaacaaaaatttgaccaacacgagtcaagttctttacctggtgaaatccgagttctttagtgagtggaacaccaagttcagccatacaagcttgcatgcgatcatctgatccatacaatgcaggatacctctgtatacaccgatcttgcatcttactcaaagctttagccaatggatagcttatagcaaatccacctccaccataagccataccatacgagaaaaatatgttctgtaaatgagattccgacaagctcccaatgtaatacatctgctcatggtcatacttcctcaacaccctaatcaaattatcaataacaaacaccgtatcatcatcacccatcacaaaccacctaacattcttcggacctaaacgcagcgtttcagaaacaatcctcgagatccgtaacgcagagcgttgtccttgtttgttagtataaggaaacgaagcagttccaccggagattttcaccggaggaagaagcttttcgtcatcatcatcactaagactctttttaacctctttatctaaccaaacgtagccacgcatgcgttttggtttataccagatcttgatatactctttcctctgtttccatagcttagacgacgcagcgatcccaaacaccacgtggttaagatccgtcagcttatccaccaccgtgtcttcttcttcctcctcccaattacgccgccgtgaagctaaggaggtggataaagacgagacatttgaagagacgtttgtggagagagcagagacggtggtgaaagaagtggaatcgtcacaggagcgtgaggtagagacaagcttaagcatgtagataatgtaagtgaagacaatgaaacagataagccaaaccataagttttggaccgggtcgggttaaagaccacattccgggtatagatgtacttgatgagctccgatcccatatcggtttttccgacgagtctttctggtttcctttcatccaaattttgttcttttcttcaaaaaaaagatccaaaatttgtgaaaacaaaccctagttctgtttgcaatccggggagaaacaggaaacagtgtgtgtctgtgtctgtgtagctctttgattcgtaacccagaagagaacgaaccgaaaaaaatggatctttctcgctacaaaaaagaaagatcaatgagaatgagactgttgatgccagagaaatcgagggaaaattagagaaattaagggaaagacaaaagtttttttttttttttgggcttctctttgggcagagagagagatagaagacagattaaaggtgagagagaacgcaatactctcccactagaaaaactccattaaacgagaaataaaaaaataaaaataacagaaaaaaggaggaaacaaatattattaaaaattaataaaacatggggttgttgtcattatttttaataattaatttctgttaaatataagtaaatagttttatctaattttcatgtttttggtgttagcattaactaatattaatatgttttgtgtttttaagaattaaaaaggtttgtgtataaaaaattaagagtgtggatgaaagtgaaagcattcgtaaaaagagacgagcggtcggatccatgaatgtgtttgggtcctactttttcctcgttctcccacgtgggccattctgaactatctacgtgtcattttctgtcctaaattcaaaagctacgaacctacgtcgtttcgtaggctcgtattctcagcgaatgaactgggcaactggctatgagtcgctgggcaactggctatgagtctcaatgacattggcttcatcatttaacattgttagattctagtcagtccacgtgtttgtgtatatttatttcaacccagatttggttctttttttggaaatgaataatgggttttagatttttttcattaaaagtttggacatttggaagattggaaatctaattttagatttattcatatgtactgatcaaaagactatagatgctaatatttttatttttatttttctaataggtgatcatatttttataaatagaaattcaacattataatgcattaatgaccaatgcatgtattagcatattttttgttaaaacatcccttaatagttaatactttatacattttcaattttatatcctttggaaggtcatgttattgattgtgaatgttatgaatttaagtcaattaactctggctccaaatttttctttgttgccaacttctgagaaaaatcattttttggatctattagtacaaagtcaacttatatgtatatataatagttacataaacaaaatttattttttcaaatactcaatatattatttatatataatatttactatcgttgaaattgcaaaaataaaacttgaactattggagaaaaaaagtggacagatatgaaactataccacaatgattagtttgttgttgttggagaaggtgatagataattgtaaccactactattttggtgtttgacatttgtagtttgtgatttaaaagtatggatttggtaattttttgttgtaaactcctagtccatatgaataaggttaataagaaaacgaatccaatatcaaatttcttctgtaaccaactaaatacaaattcctaagaaaacgatgggactcgtatgttttgttttgaattaactataacataagacgataaatgagagggatttgcccccattaaatattgcattacattctcctttggattcttgattaacactgtttctgtcctcttcttaattggtttaatattaaaatggaattatgaataaaataataaaaagctgcatatatacctgctctatattctctaattattatatttagagatctttggtcccagcattagggctattgcacagggatatcatattctatgtccacttttatatgatttggttgttcattattgcttgctattttgtttataagaaagaaaaaaaactttaggttaatgtttgatggacctgaaatcggccaaagcccattagcttttgatgaaacagtaagctcattatctaaacttcaatactctcaaacgctttcgttttgaattcccatcatttgatgagagtttgagagcacataatcattcaaattgtaaaatcatgactcaattcttacagtgtttaaggtattggagagaattggtcactgtaacaaacaaaccatcgacttactataaacaacatcaaacctttattatctctaataaacatctcataaggttctactaaaaactcagttattgtctatcagacaagatttaagagcttcttgttaagaaactttggctgacacaactagccgtcttcgtcgcggctagacgtccatgattgaagcagggaatacatgagcactggaccgacaaatggtgaaaatggtggtggtctacttaaggcaaccataggctctaccgtttcctccatcttcttcattgtttcgctttcactaatgttctcgttcacaggtttcttcggtacaatggttcttaccactttacctgcttctcacaaaaaaaaacagagtcactattttcgttttcttcctaattatgacaaactgaaatcatatgaaggattttgatacaagatagttaattataccgtttgatcctgagaccgtgaagatcggttttaacttctctataagagcaggaaaacgtcgcatgaggttaggttctacgttgatctcaatatatatctatcaagcaaacaagaacagtagagtaacatatgatcagatctcttgcaacacttgagagactataaaccaccaactacaatcaaataattattcttaaattacaaggaattgaatgatcaagaacttcaagaatcgtagtattaaatgagaaaacagagattattaacgtacaagaggaagatggaaataattaccagatttcaaagtctgagcaaattcaaatgagtgtctcggtttcttcttttgcgaaagcttttcttcagtgaagactgatcgcagatttgtttttagtttggataatttcaaaggcagaggaaggtttgagaaggtccgggactcttggtttaattaaataattttataaaatagcctcgtactttttcattatttcatatttgccgcatatttaatatataatttcattcaggtccagagatatagtccattgatttagctggtttgcgtctttgacaaatacatttgaatgaaaacgtaccgaagattttttttttcttaaaacaacttgtattaaacatggtacatgacgtaattatttatgataaaaacatcaaaataaacaaagtgtaatttataaaattctgctttttttttcggttttatacaatttagcaaacatagtgagctaataagtaaaaatttgttttgttagtcgggataagagatcaagccctcatctagtgtttctacatttggtattgtaaatatgacaagaaaattaattcgttacatttttgaaagttatctatgtcttttttttttttttttttcttttctgttaatatctaggtttcacgaatgatccgagttataaaatgtatacccatcacccatgtgcaaaagaagaagcttcactttccgatatactaaagagtgaagaaacttcacttaatcacgtaatgcaaggacagatcagttaatgtccaatgttcaatacttatatagtacatatatattgctgaaaatattgactagaaaccctttttccacaagttgaaagtaattaactgttaactcaaaacacacattttcatacgtaaatataaataagtgatgtgtagagatctagatagggatctccacattacattacgtacgtatgatatagagtaaaagcctcactagagagatacaaaccctagttttttaacttcattttcatttcttcacttatctccgaacaagtatcctagagatgagcctccaccaggaaccgatttcaccttcgtcgttggacgatcctgaaattttaattataacccttatttgtttaattttcttttcggaaaaagaaagaaagtggagtttaattaataaagacttacggtgacgaagttgccggagttttggccctgaactctttggtagttgttgttagagatcttgggtttttggtcagcttcatggtcctcctctgtggaatctacaccgtacggtggtgcaggctttggggctaccggtggagcgggagtttttggaatctcattgtctgacccaaaaagataacctaacgagctttgtccgcctccaaagctcccacctcggctcattttccgattgagagccaattaggttgatagattatttaattgccgaccaaaccctaactaaatagctgacttgttttgtacgacagcttaatcagacaatgctgagtactaagcaagatattgtaagacagagaagcttaaatagaggtggcggtagcgattgtagacgtagtgtaagaggtataatctcgtaagtacatttactctaatgtctaaatagagatggtagtagagattgtaacttgtaagagtgatatatatacaatctcataaatatatattcaaatgttcgaacttatgattttgataagcttttagagatgattttaaatgttttagtttacaaatttgttataatttgttaatatacaacataaaatatgcatgaagatgattaaaattgagcagctagcttacgaacacatcttctgaacaaattataggctattaattaatcgacagaaccaggtgggttgggccgaacctttattaaattatttaattttcatatcagtctttttatcatttagtgaagggactagaaaattaaagtatcgtaaatagtggggttaaatcgaagagtactatgattgcaactaaaagaaaaatgaaattgccttgtttctctttaaatgggaaatggctaactaattaaagattaattcctcacaaaaatgacatttccagattatccataaatgggaaagtctaactagagaaaatttcctaaatatatatgtttgtaccaaaccatcatttcttattaggaccttcatagtttattttaatgattgtgtttgggtttattgttcagattctgtttgtaaatattcataattatcattttatcttttaactccattttttaacaatttgtaaatcgttcatttcaactacctcgttcggttttatctacatatgtatttgcatgaaaaattcgaggagatggttcacatccacgtaccagtcagaatcatatatatactatagcaagataaatatcaatcatataaatatctccaactctagactgctcattgtgatctagaaaagcaaccaaaactcgtccgcataaaattaacaaaaaaggttattaagaaaatatgatggaatcatggaacagtacacaggagcatacgttttgtccactagaattagttgggtgggaagggcactggtaggacagctatagactatacgaaggagccattccattaactacattattaatacgttaatatttaatataattaacattttgtaggtagattatgtacttaattacacctaattaatctttattaaagccactttatacacctaattgctcaaatcaagagtcaaaccatatatcatgtcatatttatgtttttagatgatttgaatgcaatgcaaatgtatggagctaatactgtccagagtgttggactgttcaatagtcttttgcagaggcgttttcatttgtcgtatctcaacgacatcgctgttttcataaaactggatgatctctagttggtctatcttgtcagtcttacaaacctatgattatatgattcgtgagatagtatctattcgtcgtaaaaggaatctatctccattgtgttggtctccgtttggtttaggtttattgttctcaaaaagtcttcatgtatttggatctcttgcaagcatggtctatggttttatgttggatttattttagttttctgtttaaaaggttgtgtttcagtccaatccgtttttgaaccgcatggttgactgtggtcgtctttagcttcaatctcctagggaaattatgttttccttcagtgttgtttatgaaatttcgagtagtatatgattttaatatgattttgcacggactagctgcagaactgggccttttttttgtaattagtatggcctaacattatagttgttggatcggacgagcctttaactaaatcggtccatgtaaaatccctatccattgtttgtttattgcaaaaacattttcacattttagattagaaaaatggttcacggtaaattcaggattgactttgcaatgcaaaacatgtctacaatatacaaattcttttaactgagtaagaaggagaaaacagaaaaaaaaaaaaaaaaaaagtttcgagctaagtttggcataatggattgtatataaactgtcgaacattgtcaaaaaaaaaaaaaagaaaaaaaaaactgtcaaactgatatttgtttaattccttttttgttacttttttcgggtattattattaaatacaatatgaaaataattctctctctttatctctcgtgcactccaccactatcgatcaaaatgcttggtcggttgcttcgcaatttcccgtgacttgagaagttcccttttcccaattattattacaacaaccccactttcgtggtacaaaataatacattttttcactaaaggatcaaagattctatatcactaaaaagttatgttacactaatccgttatagtaatatgatatagttctatcctgtttgttgtgtacgtttaatatgcacgtatagaccatataacaaaaggaagaaaaatacaaacaaaatgatggaaaatgcttaaagaaacgtaaactctttctaaaaagttgttgaaaatatcaagcaatatgcatagccttgcactatacaatatgtaaacggtaaagatgaagcatgttgatatttccgcttatttccgttagttatacctttatcaaaatagaaaatactattatacttattcttgcatatgagtctatgaagaaagataaaataactacaaacaaaatagaataaaaacaaattataagaagtgggagaagatatatcatgggtaatgggttcatgctattgctgaggctagctcacggataatgggcagagtaatcgtggcgtgcaagccgacataaaaaagcacacatcattagcttgtatcacatacggtcccttttcagccaatacttaaatcccacttcgaaaattgtagtttctcatttatcagcttaatccatctcaattctctttgattaaatgttttattaggtataaggcatgaagtgtattttttttttttttagcaacaaggcatgaagtgtatatgaactcgaatttagttgagctggcataattaaatgagcacactttactgattctgtattattgtcaattggtggggagatatacgctggtgacattttttttttttttacttgttgataaataacaattcttgagatcaagatacattttttagacaagaaaaaaaagagaaaaatctcaagaatcaagatacatttttttttactaatcataatataacttgagaagttttttattatccatatatatatatatatttgttttattttaaaatcataatattatttttagatagtttattttcttttttaatttatccaatcatatactttatgcatattaaccggatttttaataaacttgccaccttctttcttctttaaataaatttcattttctcttgctctccaatcccatacgtctccatgatcttccataccgaaaagcttgaatgctgtaaaattctgataatgtctgtaattaggcccttgtttcaaagtacacataaaacgcgttgtacgccaaatgttaacactaaaataagttacaaaatgccctccgattggtattatttttggacctaatacatcatctttggaataacacctcatccagaggagtttttggaatttaagttcgttcccgatcctaattccggctcccgatacatgatcaaacatgcaaagactaaaaacaaatataaaaactaaaagatttttcatttattttttacttttttgtaatgtttggatttttgggtttgttaacttggtttttgtgtttctcgtactttatatacacacacatttgtattggtattggtacacaatttgtttcagtattagtttccaagtttcaacatagaatgacataatcaatcatgtatatcgtgattgatatccttaatatatatggcataagattttatatagttacatgtgaagatatctataataatcatacttggtaatgaagatatccttaatattagtatattataaaaatctatagaaattgaattttgaaagaaaagatgaaatcaagaacccaattttggataatactggaaagattatacggggagatcaaatgataatcaattaaccaattgtgcataatcaattgataatactggaagttcaaacgtattcaattatacatcacctattacaattttacaacataatcaaatgataatatctttttttatctggaaacaaaaaatctttccaaaatttatttatcaaatttcattcctttttaatcagttaattataccgatttttttttttaaacgtgaatatattaattagtattaacatagttttacataataaaagcaaaagtgggaagggaaaatccgttttataccataaaaacaaaagtgcgtaggaaaaatccacaaaggtaataattttttcttcaaaatatccttattaaataaataaaaacaatttaatcgaaaatctattattgtgttttacgaattaatgaaagataacaaaaaaaaaaaaaactatttccgaagattatgaatcataatgataaatcgtctgatgattatgatttattatgatcaaaaatctatttttggacctaatacataatcttttcacattgttgttcactttaagaattgtaaatataaaacacatcaatatgttactgtaatattttggctgttataattgcttaaaatatagttattaagtacaagtgtacaactaaaatcatagtaataatttatatttctattactataaatgtaaaaatattacaaacacactaatatagtattataaatacatacacatctgtatatatatttttctgaatgcaaatttattaataaaataaagtacatatgtacaaatgttaagtggaaataggcaaagctagagaaacagagcaaccaacgaaacatcattagagaagccgtccctatgagaattaacgctattggatatacatcatagtttctcaattctcataacattatttttctacaatttacattatttactgttagaagtttgtgtgtatacgtatgtgtgtgagttttttttaaattataaattcgttggttccaccgcgttggttttgttagatcccttcagattgattaggttaatttagccctattaggtttagtttggtgttctttttgactttaggtttttgataggtagcttggaagggtttagttagagattttgactacgaattctttagcaagagatgaaaagtctcaactaccaataactaatcttttcatttaacatattctcatagaccccatgtgcatgtatatacgtaataagctaagatatttttaaccgttacagaatttgactaacgatactgaacgattagggtaagtatttttttgacatgtataaattaatacttattaacggcatcattatatgttattatgttaagttccgaaatagaggcaaggttcaattaggtgggtgggagtgactcagtaaaccattgtggctctagttgtatataactttttcttcactatataatttcactaaaattttgttgatttatgacatggctatacaattttgttgatttatctaagagttgtatagccatgtgatatatatacatttataaacaaggttacattatttagttttgaaatttatttatgtgatatacactaacaaacattttctttatttgatgacattctcacataatttaatagatgaggataacaaaatcttcaacgcaattgctcaaatgggggaagtctcatcctacaatgctggtttcaaagtcaaagaagttagcggttgcatttccaattttttttgttgctcaatcaattgaaactttacccatagcatttccttgtaaggcattgttgtatttaagtttttctttttataaaagtatataagtttaaaaaaaaaaatcaaatcccttagaaatacaaaaattattgataaagttttttttttcgtttctaaatgattcaaaactattccagtcttcttataagttagaagtattatattacttagactcaaattccgcaatgatcgaataacattctctaaaatatataaaccgtatcctataaaaaacaaacaaaattaatgctattacaattcgaactatttatgttgttcccttatataaagaaactcttcctttcataccaaaaaaaaaaaaaaaatccattttcatttctcctcttaaaaaaccgccatgacctctctctccaccgccggttaccttcttctccttctccttctccctataagctacgacggtggcttcatcggagccgccgatgcagaacatgacctcagagccactgatctccataatcatcgccatcgtcgccaccgtaaccaccatcgcggagaagagtttgagtactcagccatatcatgtagagcttactcagcctcattggacgagtttggcgccgtaggagacggtgtaacttcaaatacagcggcgtttcgcgacgcggtgtcacaacttagccgtttcgcagactacggtggctcattgttatttgttcccgccggacggtggctcaccggaaactttaacctgaccagccattttacgcttttcctccaccgtgatgctgttatcctcgcctctcaagtaagttttttttctccattataatttatctttcatttacaagaactcaaaaaaggaaaattagtaacacccgtgacacaaaactccacaaacgtctttgatgaattttttttttctgttgcaaatcataacatacataacgtgacatttgttggccaacttctgatgatatattggttgggccattcaatttatgtttatattcggtaaataatttgtttataatataaagtagcccaacttaaaattgcgagatttaaaaaatataacaattttgggttctacttaaaagctagatattttattagcatgcgttactctagaattgaaggaggtggttacgcaaagacaaaaaatagggaaagttagtggggaacttgggatcgaattcgatattggccggttacacgagtgtgcgacccatacttgttaggaagatctcacccgtccatttctcttccaaatctgagccacatgttacttttgggcacatctgtttttaccttgccccacagtttaaccaaaatatgagaccctttctccaagtttcccttgtaagctaattatgaaaattcttggtcctaacgttattgataggaagagagtgactatgaagtgatagagccactgccttcgtacggaagagggcgagacacagatggtggaaggttcatcagtctactttttggttcaaacttaaccgatgttgttatcaccggtaagtagttcaatttatatcgaaataaccaaaatatccgaaaattacacactagcaaactgaatcttaattcgaaattgcaaatttctaaataaaaggtgagaatgggacaattgatggacaaggagaaccatggtgggggaaattcaagagaggagaactaaaatacacaagaccttatttgattgagattatgcattctgatggtatccaaatctccaatctcactttcttgaattctccttcttggcatattcacccggtctacagcaggtaaattaatctcacccggttaaaccattcggttatcaaattttaacatattaaaccggttttgtttatttcttttgaaaatgcagcaatatatatatccaaggtttgacgatattagcaccggtcacggtaccaaacactgacggtatcaacccaggtacgataatgaaatcataccgataaaatcttaaaattccaataaccggctttataaaatctggctgaaattatttccggtttattacagattcttgtaccaacacgaggattgaggactgctacattgtctccggcgacgattgtatcgccgttaaaagtggatgggatcaatacggaatcaactacggcatgcctacgaaacagctcttgatccgacggctcacatgcatttctcctgatagtgccgtgatcgctctcggcagtgaaatgtccggtggaattgaagatgttcgagctgaagatattgttgccattaactctgaatctggaatcaggtatgtaaccaccccgttcacacatatgaaccggtttaaattcggtttggctaaccttaaaccgataaatctgcaggattaaaacagctatcggacgaggaggttacgtgaaggatgtatacgtaagaggaatgacaatgatgacaatgaaatatgtgttttggatgaccggaagttacggttcgcatccggacgatcattatgatccgaaagcgttaccggtgattcagaacattaattatcaagacatggtcgccgagaacgtgacgatgcctgctcagttagctggaatatcgggagatcagtttactggaatttgtatctctaacgtgactatcactctatcgaagaaacctaagaaagtgctttggaattgtactgatgtttcgggttatactagtggtgtgactccgcagccgtgtcagttgttaccggagaagcagccggggacggttgtgccgtgtaatttcccggaagatccgattcctattgatgaagtgaagcttcaacgttgctactccagaagaaggaatatgtgaacatgtaataagatcttcttttttttaacaaatacttttcttgggttataagtaaatgtgttatcaaatggggacatatttgattgaataataaacaaagcttcaaggagaaaagacaagaaatactcgtcaaacacatatattttacatatccgtgtatattatttgattatttgaggggaaacaaaacagagacttaacttgataagtgataaccaaggaaccaaagaacaagtgctttttaagtgtcatgtctttagctaattccatctcaaagtatgtgtgttatgcaacatttgtatcaactgtcaagcatattggttatttaatgtgatgcatatcagaccattgttcagattgcggttgtaatcacgtttacttttatgtggttcaggcaaaaacagagcatatgcagagacagtcagtaccttgatgaactggtcaagttgcatatttttgtctattgaggtcaatccgaatactattatcgagtggctgaaacattgaagaagcagctacaatgctaccactagcagaagtcactgaagagttgcgttcatcgtcatcataagacagtctaagaccagttgagactagattctctttaggcacttcttctcggacactaaaatgttgttatgattaatagttcaaagacaattgaagcatctgttgtctttggatgttaccaatgctttcggcttcccctcctcttttgttaaaatccaaagacaacaagtataaaacctgcagctaaggaagaagaagagacaaatcaagatttgacctgttgcttaatattcagttaatgaagtccttggtgttttaagatttatctaatctttgatttgtctcttcttcttccttacttcagctctgctcttggtgtctttaacaccatgactttaatctggtgttttctaagtaacttttgttgaataaccagagacagaggttcaagggataaaaagaaaaaccaaaaattccttgaatacacgtacatttttttatgtatccgtccattgtcttaattatgtgaggaaaacaaaacagaggtttaacttgatacccaagtaagcaaagaagaaatgctttttgagcgtcctgtctccaactgaatccatctcaaaactattgttgagattgattggactctaattccaatgccagggaaggctcgctaaatctgatgacaccagaaggattcaaagcaaaaccctgcaagggtaataataatacctaaagattttcatgagaagccacaaaagttgcttcagatttgagagaagaaatttagggttggggagaaattaaacctctgtgaggaatttgaatgagtcagaacgttgaaatctgaccagattttcatgagaactcagtttgaggaacactagattagtgtgtcctttaagcctcagaagtacaagaccatttgggatatcagtgaagctttcaaaatctgtaatgtcacggtctatagcttgtaagaacgaagttcgggaatagaataagtcatcagcatcgagagttttgacaactgttgttgctgcttctgtcttctttctctcccttgaggcaaatagttcattgaccttggtcacaatatcactaacgaacacgtcatcagtgctgcaaaaatatagcccattagtgagaaactaatgttgacatagaagaaacacacacacacatatagttatatacctaagctcatagctcagacccggtcttgaggcaatggacgagagagcatctctccatccccagattttagcttcagtatcaagtatagacttatcatctctcgtcttgatgttcttacgcacttcattctctatcttgagaagcctattaaggaaatatcccttgagattcttaactggttcatcctttaagctgtaaaaaacaggcaagggatcgattttccctgcgtccataagtttcttgatctcaacgagctcatcaagacacttttcagaattagggtacttctttgagaagaacactactgcaacccctgactctttgatcctgctcttcgtctcatcctctacatacactaatatttggttcgattccaattcttcttttagagagctcactaggaattttccgagatgcttttctccaagaccgatgaatactctttgagatagagggtcgattttcatttcactacgtttcagtatgttacataagaatgaaaaacaggtcaaaacagtatcagagtagctaacttcatggttacgaagattgtcattactctctgccacaactgtgtaaccaggcaattgttgagatttcttgggaagaaagatacgcttgaaagtgaaaccctacagagaaataattaaaagagagtgtatatatcaaggatatattagtctttagtattgtgtataccctagatcaattcctatatatgttgtacatgttctctcttaatgaattaattcactctcacctaatatggtatcagagcagtgattccaaaaagaaaaatcaaaacgtaaatattttcctctaatatatctcttatagtaataataccaagtgacttcctagctataacaattcagtgaagagactttgagggggttgaggaaactaactttattgtagtattctagagaacctaacaacaccaagagattccttccagcttgaactagctcgattaatcgatcagcgaggataggattctgaagagagatcaggtcaagaaacaccagacgatcagtgccatgggaaacgacgccattgatatgaataagatcttcaagatcagatttcttaaggtttagagcttgtaacaatgacgttacttcttcctgaggatgcatctgaggcctctctatgattttaagaccatttcttggagatggagataaatcggctaacattttcttgatctggaccacaatatcgttaacgaaatcgttatcacatttatgattataagaaaaccccattcttccaccaacagagactaaagcttgtctccatccccaaatcatatcctctgtttcaagtattgacctgatgttgctcctatcaacctttttgcgaacgtcttcctcagttttgaggagaacattacggaagtgaccagtctgattcttgacggactcagctttcactttgtagaatattggaaagggaacaatagatcctgtctccatttgcttcttgatctcaactagctcgtctaagcaccagcgtgactcagggtacttgtctgagaagatgactagtgcgatacttgactctctgattcgttcgaagagtgttgtgattggcctccctctaatctcgtactcgtccatgaaaacattgatttcgctgatctcctctaactttgactttataaagctcactaaggttttcctttgagctttacccctgaaactgatgaacacttgaggcttccgcgactgagaagagttcgtcatttggatgaggttatggtagacagatcttgattgcagaggaagatgtagaaggagaagatgtattatagtgtttccttgatgttaaccattgaagtcaacacaccaaagtcccttttcatgtattcataattttttgattactaaatgtggagacaccgtttttaactgcacatggttccattaattagtgtgagcttttatgttaaactgatacacttgatccgtataacctaatgtttctgtagagcttcttatttaaaatctatacatatattatctccaacaaggcaatagtttagatacatctgtatctgaaagatattgtctctatcttgtgtcttcaactgctacattatattaaacaaattaggttccatgccttaattgatgtgcaatttttaaagtttattatggagtctttggacttttggtcataaactaataatattgcaagtttgcaaccaccgagtcttttctttgtcttagcatattttttgtcaaccaatctttctttgtcttaattcatttttggccagattgtaagtatgttttatattatagggtgacgcggtccacagatgcaccagaaggttcatttgaggaagattggatcctctatcatatctcactactacttagtttcgtgtcttttaacctctactctagcattatccaattgttgcttcttctgttgagtcttcaaagtaaaataaataaattattcttctttcttgctctgctaatgctctgtaaaccccaattcaattgcttctggacagttatgattttattggtacgcactagaaagaaaaagaaacactctcgcaattgaataatcaggcatcgaactatcttttagtgatctttcttaaacgtaaatccagtacgagtacaatcttgaaacaaaggcttttgcttaagaaacaaggaaaaatagaacagactctcagttgcttgcagcggaagtttcttttcggcgattccttcctttggatcattttttgctcctaaccatgtaagacacaaacaaagctccaaacagtaacgcagagacgaaatgcaagttgtgccacgtctttgtttttttcaagacaatattggcaatgctccgttgattctcattctgctttttaaccatgagcgcttcaactgtggatttaaaatcaagttgttgtcagtcaatattcagacgacgtatgcagaggtctatgtacttacatggaaatgggccatattgatctctatggtcaagatttgaggcactgcgtgtaagagtaggagacgaaggctttaaatcataactctgtgagtcacaccataagcgtacttatcagatactgatgaagtttacggagccaaaaaaaaaaaaaaatctcagagagacactaagacagacaccttgttgtcttcttcaggattatagctcagtttaaaattttccaagctctttgaacgatggagccggatgtttatgacattataaattatctggtttggttgtattactggtggtgtctgcaataaagagatttaaccacaatgtctgcttttaggtaaaaactactcatgtaaagaactaattaagaacacacctcactagtttctagcgtactattgcgtccttcctctgctgcaatactggctaaatgtctaataatcttttcaacgactttctccacgaaagccaactcaggactgcaaacagatagtttaaactaaagatgtaataaactaaacacattggtcaatggaaaattttagaaggaaaaaaaaaaaaaaaaaactaaacactttgatcatgtcccaaatggccaaatcgtacctattcttgtcatgagtcaatccagctatttcagtgacgatcttcagagctttcttccatctcttgatcctggaattaatacgcttaatcttcttcttatcgacttcttcagcaagcaaatagttttgcaaagccagaaacttttccccaaactttccgctctgtttcttaacgcttgaaaccttcaccctatgaaagatgggtatgactgctttaagtgcctccgtctcaaagcatttcttgatctccacaagttcgtccaaacaccaacctgactcggcgtagttcttggaaaagatcacaatagcgatccttgactttcggatgtgtccgaaaagattctggagcggttgtccagtcaacttatcgtcagtgaacacattcacattgccatcaatcaatttctgcttaagaagagttaataatccgttccgctcgtcttttccccggaaactgatgaatacttgatccttattgtaatgcgtaatccccatatctcaaacacagagtttgatctttgttttgctagttagagactagagagaatacaaagtttgagagtgataaagaaaagtcaaccaaacaatctaagggtctatacttacttatactactaataagtactaaaccttggttactaaatagtatatcaaaattgatccaatgaaactttgacgcgtctcacattacgcgtttcagttttcaccatctaactttcctaggaaacatcaattctatggggtttttctctcacaatatataaatggtacacatgctatccctgatcaaacaagctaacgtgggagcgaagacaaatttaaataaattccgttatttaactatacgtaccaaatatttaaaaatgatttaagagggtatcatagtgtcactgccataattatgctgatggatactagtatatgggttcagtgttactatgtaccaagtatttaatcaatgattttgttcataaacaatagtttggccatcagttgagtctttctttacaatatgtcattttgtcaaccaatcgccttagtcattttgaccaaatgatatatatatatatatatatatatatatatatatatatatatatatatatattaacgcgttccaataatggacattaacgatccatgtgtttagtaactaaggatattacgtcctaatctacttaggccactggtctcattttacgagcatgcaaatggaaatcttaaattcatataacagagatatgtaaactcagatttcaattggatacaaaaacaattcagatttatatatataattgtttgacaaaagaaaacattgatttgctctaaaagttttgatcgattttgagagtttcagaaaatgtaaactttattatgaactataaatatatgtttttaagaaagacagattgacaaatgttcgtaatatattatacagagttagtcttagtggtgtgtatgatgattgacacatttttctctaatctactaaaagagattggttgttccacaactgctttctcgtttaataaaaaaaaaaaaaaaaaaaactgctttctcgttttcctttcctcgttgtatattatttctcgtttttgtcatatgaaaatcgaatgcttagcacatttcaacaaaattttaattttaagatttgtttgtaaactcttaaatatattgggctaccaatatcatagagagttgagttctaattagtatgtagttgacaacagaaaaaatcctgtaaaacttgtctaaaaaaaatcaaatattttcgacattttgttggaaaaacactaccaaaattccatcaactgacaccagttacaaatttttgaattcttttgtcatatccttgaaatatcatgtagtcgagacgcgagtaaaaccctaatggccctaaaaaaaaaaactaaaattccaagtcatacacataatacgatacgttttcacattaaatttgaataaagcgaacgtagaaacattttattgagtcagcaaccatggctaaaagcctaaaacatcttaaaaatccagacactcataacagtctcttttcaaagtactagggcagattcctttagacatactgaaacaaacacatgataactctcatgcattggaagccgaattcttaataggatatgaagcaagcatcgcaattccacagagaccttttggatcttcaaagttacgagcaatcttaatgtagccagcatctccccaagtcgttccccatgagtttctcacgatccaatagtcctgaccgttctcactaccgtacccgacgataacaagtgcatggtcaagatttgttccgcatggtccattatatatacacttaatgacatcaatcatgtaaacatagaccatatgagtttattaattgtatatacttggatgcaacaaaaaaatgaattttataaggtatgatagataccgatcgatagagcataaattcttgggattttttgtcaacgccaacactcacgggctggtgagcaaccgccttttgtaaggaaatctcatcattcgctggcacatcctcgtagctatcaatcgtgatgaccttgtttgaggtagactgcgaccaacgtaccaaaaacaaaaattgaaattagctacttataaatatatgcacatatatgtgagtgtttaattacggcagcactaataggtgaacctgtttgcggttacaggagccttgagtgccctggtatggataatctttttcggaatcaagaccattgttattgataaggaactggaaagctgtgtccattagtcctgatccataacaaccgttgttgactaggttgcagtcgaccaattcttgctcggacaatgagattaactctcctgtcacaatcttgtttaatccctctactgctgccactgtggagaacgcccagcagctgtcttttatttaaattaatatacaaaaaaaaaagatattaaagtactaatcgtgatgcctttcaaaattcttaatataaaaaaaaaatctgattgtttcaaaggcatgtacgtagttgcataaagtagttaaaatgttttgctaattcttcaaacaaaacaaaaaattttaaaagaaaaatatatatataaaaaaagaaaattaccgaaaagatactaaaaatatcaaataatttaacaaaagtaactagcacgccaaaaaataagtatgaaactctactatactacatataaaggcattctaaagggaataacaaacttaatttaggtcacgaagtcaaatttcgatattcggaaataaaaaacctaaatttatctaagaaaaacaaaggcaagaatttgttgaataagcgaaaaaaaaataaaaaattcggacctaaataaatcaccgtacgaatattagggtatgaatgtgaagactagtaaaagtactcactgcaagtgccttggtctttaatttccgacactgcaccttcttgcctccagtcaactgactctgggagctgatctccggcgagtggcacgtacctacgactggttttgagattcctttgtttcggtttagggcttccagggaaaaggtctcggtactcttgaacggttaggtctgcaaaccgagtcaaaccaagctggtaagagaggttctttgcattgtgctggtcgatgaaacggagattgtccttgaagttctgaaaacgccgttccttctctccgagagcattggtataagtcttcccgtgcttggacatccacatttggaaaataaactcaacctcctcgttgctccggttgtgaccaccggatgtggcgggaaggtccatggccgaggacggcgccgaaagaacgaatacaatcaaaagaaagaggattgtcatgcaaacaggtctaacaaagcccattttgtatattcttcttagtgactatgagatattgcaaattggtccgaaacaaatgaatgatgggttttatcgtagccaattacgtgtgtttgtgtttggatatatatgaatttaatcctgatttttaaattcttgacctacagctacttctatatattgtacctattcgatatatattcagaatcttgagtcaaaattactattagaattcgttttcaatctttctatatataaagtttaagaaaatccttttaattttacaaggggaaacttggaaatgaaagaaatttatttggagattttcccagctgtacctttattactaaattaacataattgtctaaaattaccctttttactagattacaccaaattttagacaatttcaaaaggatacttagaggaaaatttggtttagtctattaaaagagtaattgagtcataattgataatatagtaataagtatagatggaaaaatatccggaaaaaaaaatcttttatttccaactatacctttattgattagcattgtccagcaatatttttatataatgttaatcctacttttctcttaattttataatttttaaataaactaaaagataaaaaaaatctttgataagaagataccttattttttcaacaatgcaaaatgaatgttagtgtttgataaaccccataatttagaaagaggtgttagtgtatagtcgaagatcttagtgagaaaaaagcttctttaaataactgtttacataagtaaaacaattttcaaagttttaaataattataaactttgtagagcgtaatataaacaatatacgttgactattttacatatttctacaaaatataaaaggtaatgatcactttattgccacggcattctcatcattgctctctcgtgttaaagaaaggtgatgcaaagaaagtttttgaaataacgaattacacaataatataatacaaaattggaccgacaatgttataagactatttgatgttcttttataaccgtcattaacggttaatttaaccgaccataagaaatgactttaaactgattgtgaaagaccaaagtcctgatgcccgcaattaccgcatccatttatctgaccgcattcattttcgccatagtatcggatggtctcgtaaaattcagtggagtcataggtttgtgttgaatttgagattttgaaagaaaaagtacattgatatctgacaaatatatatcctgaaaattgtataatattctccgcatgcatcggcatctctaattctttttctgtctgtttacattttaaaatttgagattttgtctttttacttttataattatccgggcagtttgatattcagagtaaagtaatttagtaaagaatcgattttttaactgattgatgtcacttctgacgaaaaataatttttgtaaaaactatcaacattcttgatttttcattaataaatctgtaaaatcagagtataacattttttcataaccaatatcatttttctagattatatgttacttgatcagttaatctatgcaagtatatttgatataaactaaatggttaataattaaaaaactttcaaaacaaaaataaacaaattatacaaatacaaatgactccaaataactacaaagggagacgtcacttggtcaaagtatccgatccgtttgttctcacttctatttacttttgcatcaacaaattagttctccccaaataaatatatagttttcaaaagttgatttttatatgtttcgtttttcaaatagttttcatgttttttaacttctaatgcttatccttttctgtgatttgagacttcaaaaaaaatttggtttaaaaaaaaattatacgagcaaatttgtgatgtatccttatttttatcatacacgcttcctctacgtcaccgaaccatatgagatctagctgggtctgagtaccttttactaaaaaagcgatgattaagtcatcattctttacatatcaatcaggtttcttctggcgcttgaacgtcttttcataaacgtgatcatacactaactctatccatataagaaccaattataaatatatgatcatttttgccagaacctaatcagtagttgctcactataacagtattcttgagattaacaaattttctttcctacttttgtcaaggtcatggctaactttgccacatgcgaaagcgaaaattatgtccacgagatctgtttggtgaaacataaagtacctattaaattcggtccaaataaaactatgttgtaatgatatatctaccgctttagtgacatatacattagatagaacgagagtaaattaatgaagagagaaaatactaacctcacatgcttctttttccttcttaaaaactaacctaccattgctttttcttcattgatacctctcacaagcctaattgaaaaagtagaatattatttcattgtgaaactattctgcatatttttatttggctttttatgacctagcaaatatgacctagcaaaattagttttcagataacttcaaaaatagaaatagtgtttttttttggcctatagtatgacttgttagtcccaaaaagataaaatattgacaagtttcttttcattttgagataaaatgacgtcatgaggatgtataaaagaaagaaaaagtcgccaagtgaccaaagacgaatattcttcacttcccgagtcccaaagaaacaaaacctaaaaataaacttaaaacattgaaaacaagtcttgtctctctctccgacaagacatgtttaccaccaattcggttccttccttaatatcatcacttcctccttctttcttctaaaatccccaaaacctcttttttccccaattcttcaaaaaaacctctcctttatctccggaaaaattcactcactgttgcttttgattcatatcacaacacactacactctaatggctcgtgcgacggaatttcaaggctcattcctgagtcgaatcagcatccgccgtaatcagatcgtctccatggatgtcaatcacgagcaagagctcgaagaactcgagtatttccagaaacacgtagccgaacgtttctcggatttaatcacatctccatctccgcctccttcctcctcctcttccgccgtctctcagccgtctgatccgattctctcgatcccttggttacagaatcttctagatgtttttatgtcctgtgaagcagagttcaaggcggtgttgagcacgacccagatctcgaaatcgccgtctttagaaagggttttgccggaaatgcttgatcggattttaaaggcgttagatttatgtaacgccgtcgttaacgggattgattccgttagacagagccgacgttttgcggagatagctgtcacggcgcttaagcaacggccgttatgtgacggaagcgttcgtagagctaagcgtgctttaacaagtctcctcattggcttaaacgctgatgagaggagagatagaaacagtggaggaagtggttgcagtaaccaaagaaggacgacgtcacggtcttggtcgtttggaacgcgtagcaatgtcaccggaggaggattatatggccaagtcgtcagcaagaattggtctgcttcgaagcagattcaggcgatggtggccaatctggtgctgccacgtggagctgaagcttccggaccggcaatgccggtttacataatgagcagtgttatggttctggtgatgtgggtgctagtggcggcggttccttgtcagacaagcagtgttcttgtggcgccattgccgcttccaaaacaccagaattgggctagcgccgctatgagtattcaggagaggattggtgaagagataaaacggaaggagaagcgttgtggtggtggtggattgatggaggagatgcagaggatggagaagattgggttatctttaatggaattcgcggagaggtttaggtttccggcagatgaagaagaggaggtggaagttgcggagaaggtggatgagatggaggagatttgccggcgaatggaagtgggattggaggatttgcagagacaagtgaggcaagtgttccatagattggtgagaagcaggattgagattgtttcactgcttgagcaagctcctgcaatctaatcttgtaaatcctcaataacaacaaaaacttttctcttttttcttttctttggcgatttttagtcttaaaaactaatctttcaaaaatattgatgtgtataatctacaaatcgtatacgtacacaccaatgttactgtttttggtatatgatgatcactgcaaaactctattactgagattagattcatgttgctttcctgaatctgttcttctgtggctttcgtgtctcttttcctgacttgtgattgtttccagaagcttccctttgttttccgaagcttctgttaccggggcgctgtggtcctgttctactttgattaatgtcggaagcaggtgtgtgttgttgatatgttctcttttgccgtttgaatttgttgccatcttgtttggctgtagtttctgatgaagcttctctgtaatttcttttccgcggcctgtaagaaagaaccaattgttattttgtatgcatataatgagcaagcagtgatttgattggatgtgttcttgatctcgggattataattgatgttcttaaggatcttaccctctggatggatcgatggatgtagtctgtgactcattggtctcttctttgtcttttgatttccccgaacggttctgcacattgagatgaaagttgcgaaatgatgcagacgtttctttcaatttatactattcgaatcttcaagcaaatttacagaggagagagaggaacctctaaaactgtctcgatgaaactcttgtgcttgtctggtgtggctaactggactgcgcgggtgccgcacttccttaccataatctcaactatgatcgttacctatatgcacatttttcgtaaggcaaactacccgttttgaggaaggagaggaactgaaatcacttggaaactaaagtcaagcactatcctcattatttaccttcgacttaaaataatgtcttgaaacagacgaccaggggagaatttcgtataagaggttctgcagtagactgtgcaagtcctgagcttgcgatgttgagactaaaactttcacaaaacctaaaacagcctggagatacatgaagacgcatgagaaacttagggagaaaaccaaaagtacatattaagtagagcaacaacatcttggggtctgattaaaaaggcataaggtagacttacttttataatctcaatggatttagtgtgaagcaatgataaaacagatgaaagaagctcaggtgacgataggcatatctcagggtctttgtataccaaggcagataatgcagacactgctccactccttatgtgcggcgacgttccagaaatataacccgttatctgaagattcatggatgctaattggttatttgagcggtaacgaaagtggattaaaatagttatggcgagctcatctcatgtacttaccatgttaatcaatttgggacaaagttcatcactggtgatagatgatgaatttttcagggtggtatacaccataaccagtgtatcacaagctgctttcctatgttcttctttcccctgtatatgcaaaggcaagataatgttaagtagttgagtaattgtattgtttccctatgcaccaacaaactaacatagcaacgaagcaaacagtatatttacctctttaagtgtcaggatcatctcgttcagaataaggaaagccttctcattctcctcctcggtgcttgactgcaaaaaaaatgtaaacatcaaaaatacagaaattgtcttcataaggcaagattgaattatacattattacattttctaaaacagagcatggggatatactcaaacaatggatatttaccgatatcaagttacaaaagtaaaatatttaacctgaattccatgagccattaggacgtggagacatgcaaatcggcttctagaagaagccgcatcctctggagttttatggctgagtaacatctctatcacctctgcaaaatgagatgcacaaaaccaaccatgttcctgcaccgacgaacataagcatgagggccacccagtgaacagtataagagcaactgcaacaagcttagatggggtaaccaacctgtagaactctgctcagagtatcatatgccccataaagatcagcctcgtcggtggcctaaaccgaaaacaactcatgtatcagcctctacataagaaaattctctaagctcaagtttagaaacatacctgaaaactttggcgaacaagattataaatcaactcaataagatcttccttggctccttcaacaaatgaagatgcaagatccagcacagcactcctgcaagcaaatgccagtgaaaaaggtcatacgaggtataggagaagaggagaaataactagatatacatatggatctcatgctattaccgtatccaataatattcaagaaatttaacaagtcaggcaagagattttacgaggatgagtttcataatagaagtaaatataacagaacgactagaactatacctctttaactgtgtctttgtggaactgcagttttctttttcttcatcgacagaatcattcgattgattgacctgcccctcagtctcgctttcaccggcaggatcaaacttatttagcaaggatatcagaatctttttcctaactgacgaatccagagtagaagctaagcatccaattgcagcctgccatttcaagatcattagctatatactgttttcttcagcctatcaaaagttcaattattaggtgaaagtttacatcatatacgacattaattgacaatatactaacaagagtttgagcaacaaatacatttagagtatttttcatgcttataaatagtttctgctttaaagttgttaccctctacagtctatgagcagacaaggagtcaatcaaaaattaaactcaccaaaaaatgctatttccctagccaaaaaaatatctagagtatgtgtaagtgttttcctctaaaacagagacaatggaggatctgaaaccaatttgatataagtttataatgcagagaagaaggaaatttataaaccttaaagtctgcactgatctctgtgcctgaaactgtgaaaacatcaacaagagtttgaagcaactctgtcgagcttgatgccaaagctttcatgtttttcgttgaagctttcttcgaatagtgaaatcctctttcaagctctgttgttgcatcttcttcgcttatggcttttgcttctcccatatctgtactgggcttaggcattcctttattctgatttacaagcatctaaaaaaggaaaatttcaatgagatcgccaagttgtcagctcaccctagcataaatgaaatgtgaaggaactcacctgcagagaaagagccacagcttcatgcatgaaagatttctttttgataaatttaaccatcagtttggctaacgatccaaatttgttggccacatcaactggatagttacaaaaggcaggtaacagtctcagaagctcatgaccacaagcccgcaactctttgccgtgagttgactttttagctaacgaacaagtaaataaataaatgttagtgaaaaaatcgccagacagagagagaaattatcaactgattgtgccctaggtgataattatattcttgcatgatgtaaagcaagtggcagaaatagaatagtatagtaaaaaccgtgatatgcaaacaaaatccaaaggactagaagataggaataatctatcccgtttaatgtaattgaaattctcattgtcggaatagaagagtacctcctttagaagcaagcatcagtgattttgcaagcggaacaatgttgtcaacataatacgcaagagatgctccaatgatatattttcttaagataggaattagccaagcatttgtgcatgagtgactctcagcatgaagagtgataggaagaagtgtcagtagccttactggtcccattgccaccactgcagacccaatacattgctgaagctgcagataagtgcaatcttagtataaatcaaatagtaaagatagactctttatatcattaacaaactgcaaacatagatatatgatgagaatcaagatgtcttttctcttaattatgaaatatcattgaatgcatcattgagtatcaaactcactagtctccactgggacactcagaaaaataactttcaaccttctgaaccaaccaaatttctaaattaagaaaccagtaccataactgtaatacaataggtccctacgtaccaatcatttacaaatctagaaagttacggaaaaagtcaagtgggagaattattgaaaacttacatcttgtgagctagaagtatctccgattgcatttttcatcaagtcggcaagctttaatatgatattctttgcaagaatataagaaagctctcctgaaacaattggagatagaattaaaatatgtcgctaaaaatgtttgttatgcacaccaatcttaattaactttttggaaagcaaattgtttgcttgtaaaaaattgttctgtaaataacatgttcaggatgacaaaacatagcacccaagtgaaagtacacgtaccaagtttctcgatcaaaagatttatgacagttaaaatgtgctcatttggaattc

SEQ ID NO: 617 - DNA, 119430 bp, Arabidopsis thaliana
gaattccatgagccattaggacgtggagacatgcaaatcggcttctagaagaagccgcatcctctggagttttatggctgagtaacatctctatcacctctgcaaaatgagatgcacaaaaccaaccatgttcctgcaccgacgaacataagcatgagggccacccagtgaacagtataagagcaactgcaacaagcttagatggggtaaccaacctgtagaactctgctcagagtatcatatgccccataaagatcagcctcgtcggtggcctaaaccgaaaacaactcatgtatcagcctctacataagaaaattctctaagctcaagtttagaaacatacctgaaaactttggcgaacaagattataaatcaactcaataagatcttccttggctccttcaacaaatgaagatgcaagatccagcacagcactcctgcaagcaaatgccagtgaaaaaggtcatacgaggtataggagaagaggagaaataactagatatacatatggatctcatgctattaccgtatccaataatattcaagaaatttaacaagtcaggcaagagattttacgaggatgagtttcataatagaagtaaatataacagaacgactagaactatacctctttaactgtgtctttgtggaactgcagttttctttttcttcatcgacagaatcattcgattgattgacctgcccctcagtctcgctttcaccggcaggatcaaacttatttagcaaggatatcagaatctttttcctaactgacgaatccagagtagaagctaagcatccaattgcagcctgccatttcaagatcattagctatatactgttttcttcagcctatcaaaagttcaattattaggtgaaagtttacatcatatacgacattaattgacaatatactaacaagagtttgagcaacaaatacatttagagtatttttcatgcttataaatagtttctgctttaaagttgttaccctctacagtctatgagcagacaaggagtcaatcaaaaattaaactcaccaaaaaatgctatttccctagccaaaaaaatatctagagtatgtgtaagtgttttcctctaaaacagagacaatggaggatctgaaaccaatttgatataagtttataatgcagagaagaaggaaatttataaaccttaaagtctgcactgatctctgtgcctgaaactgtgaaaacatcaacaagagtttgaagcaactctgtcgagcttgatgccaaagctttcatgtttttcgttgaagctttcttcgaatagtgaaatcctctttcaagctctgttgttgcatcttcttcgcttatggcttttgcttctcccatatctgtactgggcttaggcattcctttattctgatttacaagcatctaaaaaaggaaaatttcaatgagatcgccaagttgtcagctcaccctagcataaatgaaatgtgaaggaactcacctgcagagaaagagccacagcttcatgcatgaaagatttctttttgataaatttaaccatcagtttggctaacgatccaaatttgttggccacatcaactggatagttacaaaaggcaggtaacagtctcagaagctcatgaccacaagcccgcaactctttgccgtgagttgactttttagctaacgaacaagtaaataaataaatgttagtgaaaaaatcgccagacagagagagaaattatcaactgattgtgccctaggtgataattatattcttgcatgatgtaaagcaagtggcagaaatagaatagtatagtaaaaaccgtgatatgcaaacaaaatccaaaggactagaagataggaataatctatcccgtttaatgtaattgaaattctcattgtcggaatagaagagtacctcctttagaagcaagcatcagtgattttgcaagcggaacaatgttgtcaacataatacgcaagagatgctccaatgatatattttcttaagataggaattagccaagcatttgtgcatgagtgactctcagcatgaagagtgataggaagaagtgtcagtagccttactggtcccattgccaccactgcagacccaatacattgctgaagctgcagataagtgcaatcttagtataaatcaaatagtaaagatagactctttatatcattaacaaactgcaaacatagatatatgatgagaatcaagatgtcttttctcttaattatgaaatatcattgaatgcatcattgagtatcaaactcactagtctccactgggacactcagaaaaataactttcaaccttctgaaccaaccaaatttctaaattaagaaaccagtaccataactgtaatacaataggtccctacgtaccaatcatttacaaatctagaaagttacggaaaaagtcaagtgggagaattattgaaaacttacatcttgtgagctagaagtatctccgattgcatttttcatcaagtcggcaagctttaatatgatattctttgcaagaatataagaaagctctcctgaaacaattggagatagaattaaaatatgtcgctaaaaatgtttgttatgcacaccaatcttaattaactttttggaaagcaaattgtttgcttgtaaaaaattgttctgtaaataacatgttcaggatgacaaaacatagcacccaagtgaaagtacacgtaccaagtttctcgatcaaaagatttatgacagttaaaatgtgctcatttggaattccatcacatgagtttaggacactctcaaagacagagcatacacatcttgctgcatttatattgtctccactggttacgttatcctcgtcttgattagacaagcttccctcggtcagaagtttctttttatcgatgtggctactgatcaagtcttttaatatagttgacgctttggatgcaatgtcgtccgtggaagtcagaaggcctaaagcatatgaatggaaagttggaattcatcatgacagatatattgaaaaatcgaatcccacaatgaagacgaaaagaactacatgctgaaagctagggagggaactaacaaacctgccaatgacgaacaaactagtggaagtttacttagacataatgtcggttcgactgagtaggctttctccaaagcatcctttaacagggtggtcacatgcacgatagtgtcagcaggattcttgtcgtgtaaagataaataactagtcaaagtagttacaagtccttctatctcaggaacaacaattttatcttccgaattcttgaagatagtatcaatccctttgagaatttgcctcgtcagcggcgaaaactgagaagccataagcccgcaaagttctgaaaaaactctcgaactaactttggcagatagaaatggaattgtagcactgaggacatttagcacatgagcagcctctgcattctcggatttcaacgtcgagtcaaccttagaaccttcctcaatcttcgtcgagcttaagtcagataagacaggcttatattctttaagtaaagcatatactgtattactagcttccttgataacagtagatgatcggagagaaccaaataacttctctagacactcttgagcacatcttctaacctaacagaagcaaaaacacaaaaaccacgattccttgttactataatataatacttcttcactaaaatcaaagaaatgggaaactaccttgggacgtttatcaatggcgaatttaagaagtaaagcaaaaccaatttgaagagattcccaatcattcaaatcacagaaaccaataagcaaagtcccaatgcacttcacaccagctctcaaactcgcaactcctagtttagttccttcttcttcaattggttttactaaaacagccacagcatctcgagccatagtagctgaaatttctcctgaaggaaccagaggaacgactatggaaaggaaagtaagcaaagcagaaacggccacgggatcttcagttgaagaatcgacagaagatatagcagctgcgaagaaagctgaaggagatggtggaagagactctgaggtgagaatagagcgcatagcgacggcggtggcgacgagatgacggtgctgagcggctgaggacttgccgtaacggtccataagctgttgggagatatcagtgttgccatctttgaaggcaatttcatcgttttcatctgctctgtcttcaaaggccgccatagctcgaagaagagatttttgattagggtttaaggaagaagaatgacgttgacgaagaaattcaactaaataaaccagtggacagaataaaccgggaaatcatccggtttaatttatcctgtctaattctcatttttacctggtttgatccttgggttttgcttctcttatgtcggcttttgggagattggtttgattttatttggttagattcaaggttacctttgagacgaaaaatcgattcatccgttttatggaccggttggttgaggtttagccaattattttgagattatgatcatgctaacttccctaaaggagctaagatcactgagaagtcataaagagtggttagactttgccggaatactttaaaactcgtcatagttcttcatttttcgatttgctcatttggcaacaagttctaaatttatatcacttcaacacaattctctaaatctcttagaacattgtataaccaatatagttggtgatgtgacacatgaggccgtcaaaacgtctgaatgtgtgtgagaaaacattaagacgttttggcggcctttggatcaaaatgcttgcaattgcatagcaaactcataggtttatatggacagttcgaggcattacaaagaaagaggaagccattagtgaatctgtctcatgaatcatatttatatatgtcactaggagttaagattattttcttatcaataattagcatgattcaactctctaaattactacattctttcgagatctcgaggatttcaatattatatgccaaaatttaacaatgtattggaataaaagtttctgacaacacttggatagtttgaagagtcagttagtttaggcgaattttttttgataatttggcttccaatgcagacaactggtgtggctatattaccgtgttctcaaagtctttaagcagcccaattaacttaggcatgcaaacgccattgttaataggggatgggcacaatatttagggcacaacctatacacacaagtggttaattgagaacttgagattatggaccagattttgaaaggttatcgttttatacacttcatatcaactcatcgtatcatttcattttgttcacatcattaatttcattttttgggcatttaatctatgtatttaaccaaaaaacaggaattttattttaacaatatttatgataatatcattgatccattgatctattgccgctttcaccatcaccagttggcaacccatctgccactaccactatgattcatttagtttccattacatcaaattttcttgtaataatcactttttacaaccgaaatcgacataagtgtataggtcgaatcaaaacgccaacgattttatcagtttatgatggtttagtaagttcatattcttggtcatatcgtttaaagcaaatttagttgtaaaagttaaattgagtggtcacaaatatttttaaatattagtagtttctgttagtatcgtaattatgcaatcctttccgtatattgtacgttatttaaccaaaaaaagtttcaatagtttattttctcttaccctcaataatttggttaacaaatatataatccattaattagtaatgacacgaaaacgcgtacggagacatgtcacatcaaatattcaaatccaaagcaatttaacagaagatgaataacgataattttattggctttagactttagtattgaataatcaaaatcaataatctgtatataaacaacaataactctagtcgaccaaaaattatattgagtatgataatgtcatcttatcaccacgttatatacaaaaatgaattcgtgcatcgagacgtacgacacagcattcctttgtacggaactaactttaattaaaagttaataccaaaattatatcaagttactcaacatatgtgtatactaaagtattagaatttgaatttcaacagtttatttgtaccttcggatcagagttgccttaagacttcagaggaaattcattagtgatgactgtttaattcttcaaaaataagaaaataaaaagatgtaataaagatatcccttgttgctgtgataatttatgttttcaatttttattgttggttagaagttataacttaaaattatttcaaaattaaagggaccaacctatattaatatgagaacgtattcagttgtaaacacacaattcctttatactgataaaactaacagggaaaaaacttgtttggttaacttattacgagatgccataacaacaacaagtgcagcattaatctatcacggattctttttagtgtatgtttgttacttttcaccgcagatggtatatgcatggtttcatttttgttcttatttttattgttgaatatggaccaattattagaaagataaaattgaaatggtcaatctatatatagtgatcccatgcttaacggtacatgtacatataatataagagttgtttataactttatatacgtatacgaacaatatatacaaattaactagtgcaagtggaaccctacgcatgatgtcacgaatataattcggatgtagcttgttgaaattaaattcattatttaaaatttcggtaatcatatattaagtgataccatatttaatcaaatctattcttatcagaaattaataatatagtaatcacatcattgtacatcatatatatcatcgtatatataagatcgttagatttcattatttgttgcttgtgatttgatcactcttgcaaatctaaattcatttccatatatatttatgatatcgtatgatttatttggtgttacctctcggtaattgaatttggaaatgctatgtatatggagcgtcgtccatgatggacatatatgtgactgcgtatttacacacaccgcacgtatgcttatttcacacgttagaagaagaattcaaagaagtcggttctatttgtattcttgtgagatcatcaatatgacaatatcgttctattaatatacgtataattcatatgttgtcatggtttcacataccatgtcgacagtcgacgtacgtacaaaagtataaatagtatgaatctaataacagcaccaagattgaagttcatcttctaatcaaaactatcataaagtggtttcaaaatagtgttttttctgatgaaactataactgagttataatcaatccgaaattatataactaattatatttgggaactagataaacgcaaaaacatgagcagtttcttattttttttgtccagatttaaaatttggagtgttaaaatatacggagtgttacacaatgaaaacacaagaagtcaagaacccataagttattttaattaataatattgtatttaaagtgattattaaaaaataatgtaaaaactgattatttgttgacaaaaaacagttagttatagttaaatagtattgatgcatatatatactatctcattattttggtattactcagtactcacatctttaataaagacaaagatagttagtgtataattcaaatcgaactcacagaagtcaataagcgcgtaaaaatacaaaaatatctggcagactttagcaaggtttgttttccaacagaaatggtcatttcagaatcatttacatatccatatatatagctcttaaatggtatatattgggtaatgggtattcgtttaaataattttgttttctgtaaatttcaaatattaatctgatcagtttatccatgtgtgtatatttagtgtattatcatcaatatatgacatagacagactttcaagttggtgcaagaggggatgaaaatttcttcccagttgcaagagtaagctgactagcattttttttttatatataatttatttctcaaatggtttttattattgttttgttgactttaagtttttgccttttatgggactgcaatcacccgtgccaacttttaatctccatcgcctaaaaaagaaagaaaaggctaccattatggaccgaaatatttaagaccataatacaaaattatacgaatattttctgtaacttatatatatgatcatttgacaaagcaaagtcaatcaaataaacttcaaagaaattatgagcttataataagtttgatagtgttaaatataatcaaatcattaaatttagtatttatttcatctcggtttccatttgatagatagataaatgaaagatagcatcgccaataatgaaaaaactttatttgatggcaatactttgttacatcatttctgttttcttaatttcatgtcgaaatattgccatgattgtgttcaacataactagttttgaggtaacaagttaaaaatttgttatattttttgaatatgttattcagttgaaagtcatttagatgtaagtaaaaacaaacataagaagttaacatatcaatattaacacagcgaataatcattattacaaaaaaaagcaaaaaaatagaagaagatattatatattggagaatctttctttagtcttagttgggaagattttgtgctatgggattaaaggtatccatccctattctatgatagaggcgtggggttattggaccaatctatatatattaccacaaggcttaagatgaagtgataatacagtattattaataccctcccaaattatttttaaatatttatcaaaagaagcttacggtatagatcatacttgcagcattattctataagtttatttaatttcagtggctcgttacgtgaacacaaggtaagctaatagacttacgtgccccattaaacacatacataattatacaagtatcatgaaactagtgacaaaacctcgatcaaataaagaaattaccatgacgacaaaagataattaaaaaaaaaactactatatgtcatactcatgcatatgcatgtacaaatgccgctttaaatatttaatttagttaaagcaatgatatttaaattctctctacttcatatatattccaaaagacatattgtcaaattcctttttttagttatatataatcatatattcatattgttatattttcaatatttaatagtaagatggactttcctgaatgttgtgtatgatttataatttgagatattttgtcggagatggatatttgacaagttaatgttactttattaaaattttctaaacatttaggtacgaattgactttttcaaaagtcaacacaataaattttaaaagtttaatgacttaacgggttcacatgggaaacgaaaacaccctaaaccacaaacaatctaatcttatttccttctttatataaaccgctgtttcccaaaaggcttgttctcgtcatatgtacttgtacaccaacccaccaaaagagataaaagaggaaacaaaaactcgaaaagagagagatatatgggtgaggtggcttatatggacgaaggagacctagaagcaatagtcagaggctactccggctccggagacgcgttttccggcgaaagttccggtacgttttcaccttcgttttgcctaccgatggagacgtctagtttctacgaaccggagatggagacaagtggcttagatgagctcggtgaactttacaaacccttttaccctttctccacacaaacgatcctcacaagctcggtctctctccctgaagattcaaaacctttccgagatgacaagaaacaacgatcacatggttgtcttttatccaacggatcaagagctgatcatatccgaatttcagaatccaaatcaaagaaaaggtcagtattcttgaagttctttaagagggttctttaaaatgcgaaatttggttctaaaatattcttatcaaattaatcatataagaaaattgggtttaagttgtcttagttactagtataaatcattagtaaaataaatagtaacgcatacgcgttttgttatataattcgtataaatatacatatatatgctccttgttgaataattagatcataaataaataatataagtttgaatttggacagcaagaagaatcaacagaagagagttgttgagcaagtgaaagaagagaatctgttgtcggacgcatgggcgtggcgtaaatacgggcagaaacccatcaaaggatctccatacccaaggtctttaaccaatcccggtttaatctcatcttcctttctcctaatcaaacataaccggtttactaatctttcaattttggtgtttcttttttttcaggagttattacagatgcagtagctcaaaagggtgtttggcaagaaaacaagtcgaaagaaatcctcaaaacccggagaaattcaccataacatacactaatgagcacaatcatgaactaccaacccggagaaactcattagccggttcgactcgagcaaaaacttcccaacccaaaccaaccttaaccaaaaaatccgaaaaagaagttgtttcttcccctacaagtaatcctatgatcccatccgctgatgaatcttctgttgcggttcaagaaatgagcgttgcggaaacgagtacgcaccaagcggctggagcaatcgagggccgccgcttgagtaacggtttaccatcggatttgatgtccgggagcggaacttttccaagttttaccggtgacttcgatgaactattgaatagccaagagttcttcagtgggtatttatggaattactagagagcattaggtgtatgtatatatatatatatatatatatatatatatattcaaaattatattatagttttagccattgaggaaaatgtatatttatgtctagtctctggagattagagcgtcgtaattttcgtcttgtttccaacttaagccttaaccaatataattcggattttcttgttatacaaattggtaagaagacaatccacaagaagtgaagtgtctaacgtgaaaacatatagtaaataagaatgaactatatataatgtatcataaaaaatctatacaatacaatgatataagaaaacctatatagacatctgtaattaaatagttttcattttagctaagatatacgattcaatgatatatatgtgagtgtgtgtatgtgtgtaggtatatacatctatatagagatatatgtttaaagcaaacgatacatcccctgactaattatttaagtttgtagtcataatagtttgttgatgagtaatgattcttctttgctaatatttgtttccccacaaccaatctaaacgtgagtttatccggaagaactgattagagctgcaacaggtccaataaaggcggcgttgatgtaagttgtgggctcagcatgagagtaatctgattttttgtcgctatactgatcggatgaattcggtccgcccacaattgcaccaatatgcacattcgggtttggtgtatcagaattgtagtatgaatatcctccattacagtcaattttctccggtttagattggatcgatggtaaagatgagcctctatgatgaggttgtgttggatactttgtcccaaatccgaccatgtaagacattttcattggattatttccaaggatataatcaacctgaatattaaaccggttgattaagaacatgaaaatggtgtacagaaccggacaaggtggaaataatttatttacctgtgatttggcaaaatttcgaatttgagatacggtgaacttggtcgaaccgcactggattgaaccaaccccggctttggtaagagtttttgagtaatggaacaaaacagttgtagccgttgttacatattgtaagttgctactgtctctaataaacaaaaggccacctgaataaacaaaaagaaaaagaaatgtaataagaaagccaacaccaaaagaaaaaaactcaaaaccaattaaccatttatttagctaactagtgaaaattaccaggagttggtttaatttgttgagagctacttcctggcatcattgcacagacgaaggattcaacatcggacttaaattttgccaagtcatttgccccgttgtaaaactcctttaaattagaaatcaacaagaaaaatattaatttagatccacttaattaacgtttatagaatttagctaagtcggtttagttatatatatactaaccgatacgagtaaagcttgagcgccgacgaatttgttgtcccaactgaattcattaacggcttggctccaatctttattgcttataacataatttatgtaaattttatctcctgttgctttatatagccaagccgcagcccataataattcatcctaatttaaaattaaaagtgtcttgttagtaacttatttacgtacgtaacataaatatatccgtagtttatcggtttaatctatgtataccggtttgatttgattttattacctggtagccggagtaggagcagtagaaagggcaagatgcttgataagaacctctgtacttatcagcaaattcaaatagctgcataaaatagataaagctacgttacatcacgattgaactaatgtaatggtttctttggacttgatgtgtaaatatactcacggtttttgcatggtttaatagtgtggatgaataagtagaatcgaccgatttgaaaacaagtgaggccgctgcaagagcggctgcggcttcacccgcggcttcagaaccaggggaagaggaagagatactgtagagagttcttgatgtgtccatatcttctggcctctcccaacaactatgatctgaattaccatctcccacctttttgtatccattataaaacaaaagcaataataagtatttgaattttgatagtgaattttttggtatgaaatatagaagatacgagatatatatactattagaatgtgtaaaccagggaaaaggttgtttacctgggtatatagcatgttgggagatgtatgagcgcgtaggatgaaatcggttccccatttgatagtagaccggagataaccgagctggttaacggaagaaatctcattttggtattcaattgcagcccaacttaacaaggttgtggtaaatgacattggccacacaaattttacattgtcaccagcatcgtaatatcctccaattaaattcacctagagaataaaaaaaaataaaaaaaaagtgccaaattatagataaaataaggttcaactttggaagaaatatctgcatatagagttgtgtaagaatataggcagcttacattagcaagtgaaccatcagagagggcagaatcggctcgccatttaactcgttggttagtcgggagtttaccggatcgttggccttcaaagaacaagattgacttgttaagtgcatctccatattcaagagcttccaagctttcaaaagccaagaacatcccaactaacattaacaccaagagctttcccattatttattaataaaactttttaaagaagtgtttctcttttgaaatgggttttgagagtttcttgattttgcatgaaatgtgactcatgagggtatttatagatattgcatggaagttaagttgggtacgtaatgtcatgtcatgagatgtttcacgtaattttagggtaatttggctgcactgtttttattttctctaacaagaattaagtttcgatgattacggacttacaagtaaaggttttcgatatagcaagttgtagttaaacatttcacatcgtatattttttcctaaccaccacactttttttttccttcttttctatgattctatctgtgaaggtttataaactgttatttaatgtagaagttttaatatatttccttaaataagacctttctggttcatttacagcaaaacaaaaaaaatatcaaatcactacttcttttaaatgattttattgttttttcttaaaactaataaacaatgtgtaaaacctatgtttgtatgtagttctataatctatatcaatttatatcggtttcctaagaaacccatacctataggtcctctggtcttacgcatatatattgtcgtaaatttgtaaaaatactccataacgatccacaattgtgtttaggtatgtatctgaaacttgacttaagaaacaaggaaatgaataagaaaagatcgtaaaaggtattggtttaaaaggaatcaaaatcaaatacgccgattccatgcctatactttaggatatacaagcaaactaataataaatagtcaagcagaaaaaatcccatattttggatggataatgaatgtatcccacaatccaagttcactaagataaacaaataatactttcacatgcagaaaagataaacaaacttcatttcctaattcgcatgtataatttgacagaaattgaattgaacatttactagttacccgtttggaaaatgaaattgcaaacttattagatgatgtaacgaactaaatatataacatatcatcgtaaatattgtaaatatgttcacttttatagcttgattaatggtaaaatgaaaatttgatctaaagaaaaggcaatcttatctagatgtgaaaacgcaaagtgtcgtttttcacgtgtgagaatactgattgactggactagtacgtagtaatatggagatgccgtgcggttgaaatgtctgtataaaaacatttcagcacccattccttacaacgtcgtcaatgttagattttgccgttagtttttattttattttgttttcagttgtcataaacttatttcagttatcagttattataactaattgttttttgttcctcttttcctgctaagtgtaaacctattgcacaaatttcttgcatgcgtgttcaccgtatatatgtttttaattcctctttcgttattgggtttttaatgatgaaataaaacggaactcaactagggacagtacagttcatgatcatattggatacatgtattagttcatttaatttaattcaattatatacacaatagtttatttaatttctctctaaatgattgatgatgattgacgttattttcacggttttggtaccgtataagtttagtaaagtgtcaaaacgacattgtttgtgaaacatatggagtattttttcaagagttaatttgccactctatcatatcgtttctaaaaattgaaatcatttctagttttaatcctggtttagctgtagtgatactattatgctcctcattctcacaatttatttctactttgtttctttaccttcacaatttctgccaaatgagatcaatatagacgtcttcaacatcaaagtttttgtttataaatacaaaatttaaaataataattttggtcagagtcgatggttataaggtgatgggcgtgatggcaaagcatgtgacaaagttttatgtccactattctcttttcgcctaacgcaaattcgtgtacgttacaactccctaataataatgcgttaattactctgccaagctcattttcatttattactttacatgttttttttgtttaaagcattgtcatatttattgtcattatgaaacccaaaatgaaaggagttaattagagatcattgttttcatctagagcagagctctgaaactggaaccaattatttggagtcttgatgcaaattcatgtagccttggagctctgaaattgttcttctatatgtttgctgatcaaattgttaaaataatggtgagactgagactcatggtttaaatactagcaaaaatggtaaatttaaaatcccccttagccacggaccttgagcaaagagtctagtgtatgtgtctatatatggttcaccttttggataagaaatcaatttcaagctcatctttctacatagagagaaacttggatcttgtactttttaagatggaaacatccataaaaaggtaaagataaagctgatatggcaaaacgccaacaaaatcctacaagtaaataaatcttgggccaactttaatgttcctaaaagaaatgaacttagctacaaagttactagtcacgtctctgctgccaaaattcttgacacattctttacacttcttcgaacaaagagaatggtttgatccacaaaggatgcaatgcgcaccgcttccacaacatttgatctgtggcataaatcaatcttgcaccataagggcttgaaactttcagcttttgccactaacactctaacgcaaacttgtgttagactgcaaccaaatgaaatatttgagaagcaccagatccattaacagcaactatgagcccattacaatgatttgcctccatcagtgtcttggatcgctaacactatccaataaccagcctagctggtacttagacagaatttttttttcttctggatctgtgaaaataaatgtaacatgagccattgactaagatctagctctaattaactcagtcaaaacgacgatcaaaagattgaactattggaaatggaaggggccgcgcgaacgcaggcccccaaggcaacaaataatgacgcaggatctcccacttggggtgacctttggcttagcgcacctcaagtgcaggaagccaccagcctaggccacggatcttcatgatcacccgtaaaccccgtccaggtaagtaatttgcaatcctcgaccatcttctttatttatactatgctacacacgagtgcccatcctcaaacttccgatgagggagcatcaacattatctcgtatctactataggcaggctttcgttgtttgattagcccaagttttatttcttgataggccgcaatgtctatattccggtccaaatcaaacccaacagattttttttttgtcggctatttgtcacagatttctttttatatacgaggaacaaggttaattatattgaactaaacattaaaaaaaaaaaagaattttacagatgcaggttgatatttaacgttattgtgggtcaactcaactcataagcaaagttgatatgatactatttaaattgacttcaccacatccacttgacactaataaattgacttctccatccctatccacacatatttgaatcttccaataaggttccacgaaactgctaggaaaacaatattttctaaggcaatagtcccactttggttaatcataaaattgtcaaatccactatgtaatttgtgatccataataaattaaaccagttattcatcatctaagtcagacactattttaactctagaaaacttgacaaagtacatgaaatgtttttgaagtgaagtaacaaaattccaacatgtacaaaatatatatttttttttttaaacgaaaatatatacactagagacctcacctatttttcttaataatatcaaatctcacatatttgatgtacacacaaaattaaatttatagaaaatgaaatatattattttagaaaaataaggagaaactttgtggaaaaaatagaaaaatatttaaattattgtttttataaattttattttgggttcgaactcttcaactccctgaacacaagtcgcataaaacgaaggaacaatctagaagaagaacgataacatccaatctctctttatattccttccttccattgtggcaataagtaacaaaccttgccctctacttcattccctccttgttttgatttcatcgtctttgttagctctcctctgtttttttttcttagtcaatcgatggcgaaggagcttgctgataaggctaaagaggctttcgtagacgatgacttcgatgttgctgttgacttgtactccaaagccattgacttggatcctaattgcgctgagttcttcgctgatcgtgctcaggcctatatcaaactcgaaagcttcactggtagcttctttgttctgttatcttcgtcttttactgtcgtggacgccttctggggttctgggtttttgtatgttttcggtttcttacttcatcatagctgaaagttgttgactttgctggattatgtgtatttagggtttcgttttgtgtcctgtcgcttgatagtgtcacaattcttttcgaaagtttaaagctttcgtatcaatttgatactaatgtgtctctcttttgctgtttgtggaggaacaatgtatcggaattgctttcatgagaaacgaaatttagttatttgttatcagtagcgagtgccctttacaagttatgcattcaaacattggtttaagttggttttagctgtgctagtcttttgattctttgattgtgaatatggagaattttgtttacagatagtgttaagtattaacggagtattgaaagtttcaatttttgcttgagtgattagtctttagttcaactatttcttgctttaagaaagtattctctgcatttttagcgtagtatcatagaactttactagttggataagattttggtctcatttgattctcaatgagcagaggccgtggcagatgcgaacaaagcaattgagttggatccttcattgaccaaagcttacctaagaaaagggtaacgttttgctatttcctcctatgtaacatttttaagtcgtatataagttgtagtgagagtttaattttctctgattccttagtccttagattgttttactaccagtttatatggtctgcaaatgtggtatatatctgtcaagctattacttccattgttcatggtttggtttttgtatttgtagaactgcctgtatgaagcttgaagagtatcggactgctaaaacagctcttgaaaagggtgcctctatcacgccgagtgaatccaaatttaagaagttgatagatgaatgcaattttctaatcacaggtatgttttttgtgtttttttcttgttttctggttgattatgtttacatgcctagagtgattgtattgtttgccatggtgcaaaatattttgttatgtaattcacctaaggttttgatctatggaacttgtaaatatcctttttccagaagaagagaaagatttggttcaaccggtgccttcgactttgccttcaagtgtgacagcaccaccagtatctgaacttgatgtcacccctacagccaagtacaggtagttttattgtagaaaacaataccaaagtttttaagaatcattaaatatctgatattcttgagtgttaacaggcacgagtactaccaaaagccagaggaagttgtggtaactgtttttgcaaaaggaatacccaagcagaatgttaacatcgactttggtgaacaaattgtgagtataaggctcttaagaacccaactcaatggcacttctgtgtgcttgtgtgttaatggtattgttttgtgttttgaagctgagtgttgtgattgaggttcctggagaggatgcgtattatctccaaccgagattgtttggaaaggtaatttatctgttgaatgaattaatgttggtttttctttcaacactctgagctgaacatgttacatgactttgttttacggtgtatattcagataataccagataagtgcaaatatgaagtattgtcgaccaaaattgagatctgtcttgcaaaagccgatataatcacatgggcctccctcgaacacggcaaagggccagcggttttgccaaagcctaatgtctcatcaggttttctaccttttccttcttcagtgtcatctgatgagcttaaacaacagtctcttgtaatgtaaatcttatgttgtatgtatgatgatgcagaggtttcacagaggccagcttatccatcttctaagaaagttaaggactgggacaagctggaagctgaagtgaagaagcaggtccgtctcttaccatgtacttaaaacctcgaccaaacggttttgttttttctcttcttttgtttgattgtggttgacttgcaggaaaaagatgagaagctggaaggagacgcagctttgaacaaattcttccgggagatataccagaatgcggatgaggatatgaggcgagcgatgagcaaatcatttgtgagtatctcttttcatggagtactgtaaaagttttgtccttttgatcgactcatttatggttttcgggttttgaacaatgagcaggtggaatcgaatgggacagtgctgtcaacaaactggcaagaggttgggactaagacaatcgagagtactcctccggatggcatggagctcaagaaatgggagatctgatctgatatgatatgatgatcctttcctttttatgcagttgtgaattttgcctaaatgtagacaaatcttgaaacctggtccctttcttcctgtaatgaggatcctaaggtttttgcttttttgttaaatatggctttctacctctgctatgttgtgacttgtgagttatattgtctttaggtctcaacttttttgtttttgtttttatttgagtattcataatttcatcatgatcactattctttagtttttgttaaaacttacttaattagtctacaaaaccaaatatatcccaagtatggagttaaaagtcaaagaattgagttaacctctcgatcgagttgtaaattgtcactttagagtcgtctcgatcgagttgtaaattgtcactttagagtcgttttaaacttaagtatggagaaagtgattttttattaaagagttatacaatatttgtaattatgaaaggaactacgttaccgacttggtgttgtccaatggtatattttctaggtagagatgttggattcgacatctttagagatatgttttctttaaaagaaatgaatttaacttgttgtagatcctgcttctcgaacatatagagccttcgaacttaaacttccatatattccaaagaaataaaaaacccacgttatttgtgtaaaatttttacatctcacaacctttattttccgataaaattgtgattttttaatatatattgacatggaatattcttttgattatgcaggtgatcagagcatcgagtcaataatccttaatgttcaataatccaatcagccgcacgtaataggagaagaaatctatttgtttttaaggccgcctatgatctatatatatgaactacccacacctgttttaactaacaaaatctaaagttttctcaactagccaaaaaaaaccctaaaaggctctgatccaatttcatccgtcaaaaatcttataataaatgaactatcttaggttgaccaacgtatcttctttgatcaccttgataagagaaagatttggttcaatcggtgccttcggctttgccttcaagttcgacagcaccaccagtatctgttgatgtcacccctgcgactgcagcaccagctaaagccaagtacatgtattgtagaaaacaatgctaagtttttaagaatcattaaatatatatctcatattcttgagtgttaaacagacacgagtactaccaaaaagacagaggaagttgtggtaactgtttttgcaaattcagattgtatagtgagattaagtagcgaggtttttttgaagtaaacgccatttgttatctctcatgtgtatttttccttgtttgatctctaatgtaacaaagttaataatgaaagccaaaaaaacaaagccaatttggcttcttgaaagatttgggtgaagatttcattagaatgttacacccacacttaaatgaaaaacttaacactaaatattggaagacatactatgatgatacatatccatatcaagactttttcaaagtctttacatcggtaaaacatgtaaatagtggaaaaaattgaggcagttaacatttttagttgaatgatgaatgatttatcaaagtgagccagctttgcaacaagaacttgatagttacatgttgccaaataaaattgcaaaaaaagaagaaaaaaaaatctaagacaaacagttcgacaagactatcaaaaagaaaatgataaatattgcatgggtggttgacaaaattcaccaaaccgtagcagtaagagcatgcactaaacccacataaccgtttggcgttttggatataaacacattgtcaaaccactcaagcgttccccaaatttccccattttggtgtttttcaatcgcaatttccgcacaccaaatctttttttccctatcaacaaacatatactcctcccaagaaatcgccatttttccaccatgatccgccaatttaacatttgaatgagaagtaggcaaactaggcaatcttcccaagcccttcaaaattgtccatgctctattcttgaggtcataccaacgtatctccccctcacagtaacggtagaacacgttctctaccacacaataagatgatgatgacgacagactccatccattattcatacatatgtctgcctctctccatttacctttatgcatcttgtaagtcacatctttttcatcagacttcacatagacggttccttgataacttacgcttaagtactcagagcctttgcatatctcctcgctagggatctgtagaaactcccaagtttgagtcttcgtatcaaaaatctccatccagttcattgtatcgagattgtcgcagcctcccgtaacatatattctcccatcaagagtacaagcagatggaaacacacggcccacccgcatgcttggagcttcatgccatgtgtgagaacgagagttcataatcataacgctagacaaagcgttataagtctttgatccagtggcatatatcgaaacgtttttattctttgatccaccgccaatggcatatacatcaggaccaaccactacaacacccggcagggatggggaggtaaaactgggagatgaaatcggaaccaaaacgtttttggagctatgtggtctgtggcacagaatgaaccaatgtagtagttcagaatcggtacggagtcgtaagcacgcgtaaagacaactctcggttcggcctaagaggattcgggtttggtaaagctccgttgaagcaagaagagagcgaaatgttttggagactaatgagagagttggataatgtaatcttgagatgcgagctaagcagtttaataccaaatcatcaggaagcattagaaaacttcttctagttcttttaatcgggggctcttctccatattccatggttgttgatcactttttttctcttaaggtttaaggttgcttgttaagtaagaagatttctataacaaaaacgtatattctgtttcgttctttgtgtgctctttctgttacaacgatatatatatcaagttacttaccctaacagatccataactttatgtgttttcctatatttgttatgtttatccaattatataaaaaatgcataacaaagttaactattatcttccgataaattcgtgagattttatgcaggtgataatgttcaataatccaatcagacacgtaatacttttttccaaagctaaataggagaagaaatctatcaaaataggatatatttttttaggccgcctatgatcatctatatatatgaacaacccacaccttgttttaacaaacaaaatcaaactttttcacaacaaggcaaaacaaaaaccctaaaagcctctcagctgctctcttcgacaatggtgaatacttgtaggaccagcttcatcatcatcatgatcctcttgctcttcatcaatcagtctgctctttcttcttctgcacgcgtccgtcatctagaaggtcgagatcatcttcctcaccaccggacacttagtgagaaggagaaagctgataaggaacgtctcagtttcatatttagaacgatcgaggctgacatcaatctggaggaagatgtttctctccgtcttccccaatttgctcgatataataggcttcataattcctatttcagttactgaatctactagggctttgaatttgttccattaaggttcattacttcgattgatactcaatgaatcatgtaatctttatattttttagactttttatcatgacttttgtaaactcttcttcaatttaattgatatattattccagaatagtataaaaataagaaagcctcttttttttttttttttttttaatattgacattcttacgctctacgtctaacttttatgtaccctttgatgtaatgcgtcacaattaattttcgtgaatcttttggattgctgatgtgataatcaatttatgtagcataccgaatgaaacagattacacatgccatttaaaagtatgaaccattgaacaccaaaatcggttggtaaatatactaaattgttgtgttttgtatatatagtttatcaatctttatccataagcgttatcaacaaaatatgggtacctctttttaatagacgtgctcagggcataagattaagactaattgcatgatccgtaatttgcgttcttaattaataaggtttatcatcttgcaggtagatctaactcatgagtatataatttaatttatttgctcaagattgaacatgaacattattgtggtgttacaaagagagatagtacgaggtaaaactatcatagaaagtgattcaagtttcttagggactataaaccaacttgtataattgaagatccaaatataaaaaggctctgatccaatttcaacagtcaaaaatcttattataaatggaccatcttacgttgacaaacgtatcttatgtgatcaccttgataagaggaaacccacgttctaccatgtagggtttcgagatacattaatatttccattcttttcttatctcgatactattatatataatacttaccacgtgaaatatcaaatcaatataaaaaaaaacgtagaaacttttactatataatctcactagtagcaatgagggtaaaatcacgcaaaaacaatcatctctctataaaaataaaagaagttggttagttccaacgctagagttaagaaatatggctagccaaggatgcgtagattggcagttcagtggcagtgatgcagccgaaaaggccgcccaagcctccctaggcacttactcttctgaaatcttcagtctgtgtgaccctcaaggaaagcctattttgcctccactaagtgaagaggcagagaccagccataccgccgaaaaggcggttgttaaggctgtcctttgcggtacgggaaacgcctatgctccaagtattggcctcccggttgccaaacggtaatatatacataaataaagttaatgtccagtcagggtatccatattttgcatcttaactctacgcttgtatatatgatcagtgctgtggcggaatatctaaaccgagatcttgacaataagctaacgggagatgacgtatatatgactgttggatgcaaacaagcaatcgagctcgcggttagtattctggctaaaccgaaagccaacatcttgcttccgaggccaggcttcccatgggacatggtccactctatctacaaacaccttgaggtccgaaggtatgagttcatccctgaaagagactttgagatcgatttcaacagcgttagagagatggtagacgagaacacttttgcgatatttataatcaacccccacaatcccaatgggaactactacactgaggctcatcttaagcaggtatttacgtacgtattagtactcttggagaagtatatattcacatgattggctagatgatctagacttgagatcttttagtttgtgtttacgtttatattgacatggttttttctttaaattaaaagactacatctttgacttaattttataagaaatatatatttcaaacgttgtaaacgtaaccagcaaagcaatacacatttatttcgtttacaatttgcactatattagataaaaaatttacaaaatttaaattttacaatctaatagataacattattttagcaaccaaggccctaatatttacttgaaagatgaatcccagctcgctacattggcacgggaactcgggataatggtcgtttcggatgaagtatatagatggtccgtattcgggagtaatccatttgttccaatggggaaattctcctcgatagtaccagtgattacactcgggtccatatcgaaaggatggattgtcccaggatggcgaacgggctggctcgcgttacacgatctaaatggtgtctttagatccacaaaggtcccggtcactttttttgttttgtttaatatcgatatacgtgatatgcatcgttttcctatatactattatatttgattaactgtaaatgaaaaaattcatttcaattaggcttatctagttttatatggacaggtcttaaaagctgcgaaagaatttctggagattacttccaaaccaccaactgtcatccaggtttggatcattattggtttactctcgtaaatgaaaaaaatacaaaaatcgataatccatttattattgtcaattgttatagtctatggccaattcactatcataatcttatgatataggcggctattcccacaatcttggagaaaactcctcaagattttttcgagaagagggggatttttctaaaagacaaagtggattttggatattctaagctcaagaacataccaactctcacctgctacatgaaacctgaatcatgcaccttcttatgggtattctatcctataatcattacatgtctagtctactataacttttcttttaatgtattagtttgaaacaaacttctcattgtggataatccgcatagcgcagaccaagctggacccattgcattttgtagacattgaagacgatcacgacttctgcaggaagcttgctaaggaagaaaatctcgttgttttaccaggtaatataatcattatccctctctagagttttcagaagattgagatttaagttttagggaactatgatttaaggaaaaatatattcgattgtttttttttttaacttgtaatataaagaaatgtagactaagacatgtaatctagtggttcgtcattgagttacaacctaactttaacacgattaaacgcatgttgttggattggtaggaattgcatttggtcagaataactggttgaggcattctatcgacatggagactccaagattggaggatgcatttgaaagattaaagagcttctgtgaacgccattccgttatagttgaagcttcttcactcaaagacgtcaatggcgtcaactaaagggtcaatataaatttctttgccttaagtcttttacatatgctataataataaatgtgtgttttattgatatgagatcaatcatgaacacttttgtatctgtaacaaataaaattggtgaatttatcaccatgtcgtgtaatgttttctcatagtttgcaatatttcgatcgatgtatttctacttttcgaaacataagataaataatttattttcattaggtatagctagactggtgtgaaaataccatgggagcacaagaacatctatattgacctccttaattagccattcaaatacatttggtcatgtcttatatatggctcaaaagcatgttgaatcggattcgtactgaatagccaggagtacttcctaacccgaactaaccggcaacaccgatcgactagattgagattctaattaagaaaatgttagcgtgcaactttgataagtttgataagctttttatctacttttttttgttcagtttagatcataatgaaggaaaaattgattcctaccattggatattttgtctttagtaacaatatttttaggtttacttaattacataattagtcttgtatgttgatctgatagttttctcaataataaaatttagtattaactattacgtcacattaaaatatacttgttttaaaattaaatataaatttatgcatgacacggataaccttgtaaagataataacaacgagtaaatcatgaaatcgtacgttactatttatattttaaaatgggcaaaacataacaaaaaaccatgggtggttttcctcctctcgtcggtcgaagacagagacaaaaaatatttaaatacgtaagaatctttgcttcttcttgatgctgatgagtgatgagtaatcgacagagttattttgtttcttttgtataataaaggagattgcgactctacaagagagggctaatatagcatgcattaagatcaatcatacagtttacttaaacaagatttaagatcaccgaaggctcgagattcgagatacattattttctttttgtcttctatgttgatgttaatatcccacgtgagatatcaaatgtttagaacaatgtgaaaaccattggcaaaaaaatgaaaagtggttgggaattttcactatatattcgacttcgtagcaatgagagttagtcacccaaaaacaaaatctaatagagaaaaataagtagatatggcaacccttaagtgcattgattggcaattcagcggaagcgaggcggccaaagatgctgctgcggcctccttaggctcatatacctctgcactctatgccctgtgcgatcctcatggcaaacccattttgcccccacgaaatgagatcctggagaccagcaatacagccgaaaaagcagttgttaaagctgttctttatggctcgggaaacgcctatgctcctagcttaggcctcgcggccgccaaaaggtaatatacataaatacattattattgataacatgtctacataagatttcttgaaatttccatattacaaacagctccgtattggtacattttatctctaatggttatgtgctgaaagtgtaactagatccaatttattttggtagagtctgactttgaattttggaacggtcgttttgttaatttgttcacaaaacctttccaaaatcatttgtcatttttggtatatatgcttaaatgaacatttagtttggtttaactcaaatttagcaatcccaaaattttggaacttggaagggaccaaatatttttgattaaattctgatttagccccgttggacacttctattttgcatcctaactctatttatatatctttgacacaatcatttttgcttccgtattctcagtgccgtagcagagtatctaaaccaaggtcttccaaagaagcttaccgcagatgacgtgtttatgactctgggatgcaaacaagctattgagctcgcggtagacattctcgctaaaccgaaagccaacgttttgcttccgagtcccggcttcccatgggacctagtccgctccatctacaagaaccttgaggtccgccactataatttccttccagaaaagaactttgaaatcgactttgatagcgtccgagcgctcgtggacgagaacacatttgccatatttataatcaacccccacaaccccaatggtaacacctactccgaggctcatctcaaacaggtattacataattatatagattctttagtcttggctactagtgaaagcattaacttacttaccttgtttgtttcttgtataatttttgaaccgcagctggctgaactggctaaggaactcaagattatggtggtttctgacgaggtttttagatggacactctttggtagtaacccttttgttcctatgggaaaattctcgtcgatcgtaccagtggttacactcggatccatatcaaagggatggaaagtcccaggatggcgaactggttggctcacgctacatgatctagacggtgtcttcagaaacaccaaggtccgattctttttaaattttgccatcactttataagcaatgcattattcatatacattttaaagtacgttttcttaaaaaaatttggcctatattgctatgcgtggacaggtcttacaagctgctcaagattttctccagataaacaataaccctccgacagttatccaggtatggacggttcgcttttccgacaaatttggactagtactctctcaccctaagagtgaccaaaatatttcatgtattgttcatgcatgtaggcggctattcctgacatcttggagaaaactcctcaagagttttttgataagaggcagagttttctgaaagataaagtagaatttggttattctaagctcaagtacattcctagcctcacttgctacatgaaacccgaagcctgcaccttcttatgggtgagtattctattatattagtagcgcagttttaatcttctttaatttattttgagacattcttctcataaacatttattgttgtcgcagaccgagcttgatttatcgagctttgtggacatcgaagacgatcaagacttttgcaataagcttgctaaagaagaaaacctcgtcgttttaccaggtaatagttaataaatctcttttacttatggtttcttagccctctctacagtttcaacacatagtatcaagttatagggtttaggatttatagaaaaaattattcggacactacttaattataaacataattaaggacatgttgtgtgttggatttgatagggattgcattcagtcagaagaactggttgaggcattctatcgatatggagactccggtattggaggatgcattggaaagattgaagagcttctgcgatcgccattccaacaaaaaagctcccctcaaagacgtcaatggtgttaagtaaagggtcaatatggttatttgcctaagtcatttacgtatgctataatgataaataaatgagtgtttcttggtttgaggtaaatcatgaacactttagtgtatttgtaacaaataaaatgggtgcacttaatatcaatcgtgtgtaatgttttctcatagtttgctatatctttgtgtatatctatctacttttcggaaataaaatagattgtctgcatttaccattggaatacatatacatatatacatctcttaactacttcaaaatactttggacttgtcgtgtcgtgtatttttagaaaaattatgaagaaacccagttttaccttctccttcttctttttttttcaatttgcaacatcaattttcatataagaaataacttggaaaatactttgtccattctgctttataattaaacaccaatcgtaatcaccagagccaagaagttataagccaccactaaaattaaatcaactcttccccaattccttttcgttttctaagtcaatagtcaaacacaaatcagtcttttcgtcaattgtagatgattacgttgtaacaaggacaagattcaataagttttaaactgtatggtatatttaaaatcgaaaagctaattttatactaatattgtttacactaaattttttagctcaaaaatagtaagatatttttatatttttgtgccaataaatagtaagactagatatgttaattttgtctacgtgtctccgaccatcggattggttttaaggaaatgttatgtggtaacatatattttttttcccacaaatttgctttatccaatcacatcaaagatttgaatcaaaaattagaggattcaatcaaatttgctttatatgaaaaatagaagatttgctttatccaatcatatcaaatattaaacgattagaagattcaaatttgctttataaacaccaatcagaccaatcacattaaagattagaagattcacaatactaaaatcaactcatcccactttacattcccttgtccaagtcaatagtcaaccctatttattttctaggcaaacgcgttcttgaaaattatatctccactacaaacgaaatcctaatatatacatatttctactatattgttaatttttatatctccaaagtaaagaaaatggagctagccatgagtaagattaacgaggatcaagctaagcctttagctccactttttctcactacccgaagcgaccaaccagacgaagaagatcagtaccaccacgaccgaaccaaatacgtccattcacagaccaaactcatcttatgttgtggtttcatcgcatctttaactatgctcatcgcagtcaccttcatcgtgctctccctcacggttttccatctccatagcccaaacctcaccgtcgattccatatctttcaaccaacggttcgattttgtcaacggtaaagtcaacacgaaccaaaacactacagtctcagtcgaaatctcgttacataatcctaatccggcgttgtttatagtgaagaacgttaatgtttcgttttaccacggtgaattggtggtggttggagaaagtattagaagaagtgaaactattccggctaaacggacggttaagatgaatctgacggctgagattgttaagacaaagctactagcatctctaccaggtttaatggaggatttgaacggtagaggagtggatttgaaaagcagtgttgaagttagaggtagagtgaagaaaatgaagattttcaggaaaactgttcatcttcaaacggattgtttcatgaagatgacaacgaacaatttcttaacgcctacatttcaatgtttttaagaaacaataaatggcaaaaaacagagccaaatctaaaagagattaaattttgtttccctttctacgcttattagaggtctgtaaataaaagtagttgattgtgaatagaaaataaatgcattgtagaatcaaaagataggaaatatttcatcttctggcaacactaataataacacataaagaaacctccatccgaaaggacctttagagttctaagaagatcgatccattcatttttggtcaacatttggagattgcaccggataatcgcagttaatatgactcaccggtgttatttcttttgcgtgtcagacgatttcttttgcgtgtcagtgacacgtcctccggcgaccttaacaatgggttcgtctttggactttataagctttaaagccggatgaaccttgaggtctcccattactagcttttgtccgatatccaattggcttagatctacttctatatatggtgggataatctctgctgggcataggaactttactgttcttttaatcgtattcagagatgctcctgccaaaagattaagaaatagtgatcaatatcaaaatctaacaggaaactagatgctgcgatctacaaaattgggtagagagtagccagagaaatgaaacttcaaaatcccaaaaatgggtagccagaggaagatacaagccattataagatgtataatgcaaacatagatttcttttaaatcgagttaaaattttgtaaaacatcaaccataacgtcacttgaagtgatgattacttgctatcgactaagcttagctcagtctgatccaagaaagggtaactgaaacccgagcagtatcacttctctacagattagaagctcaatgagctccaatgacgtcaagaatatatgtgtggccttaactacttcaggagttagaaaccgttgtattaatcctgcatttagcatatctactcaagcgtacaggactattcgttcacagcaatcagaagtcaaaaaccacatgtttgatcactatctctcttccaaatctttaaccacatttctcatctattttgttcattgcctatgattcgagaaaagaaaatgctatccagaaactcatactaagaacagtgattcctatgtaagcaccttaacaaactcatgtatatactcctctattctcaaatgcttatcaaaatgcttcctttattttctttttgattcctcactaaagatcccaattataaaaaactagcaaagggtttattacctttcttcaatccaggagaaacatcatctccaatgaacacaagagggatatcaactttcaacaaagcacctggaggcgctcttatgaatgtcacattcagtggagcatcagtcccagagtgcaaatgaatctgaaatcacatagcataacatttctaaaaactcaatacataaaccaataatccaaacacaccactaaaccaaacattgaaaaaatgcaaactttaatcaatttcatgagtgagagaaatggagactttaccgctctaggcaaggctctgactttctcaataacctcatcagaaccaatctcagctcgaacctcaacatcaaagagcctagagaggaaaaaagagtaacccaaatgattcacaagcttcctgatctgattcgtctgaactgaaataagcctcttgtttcctccgtgttgtccatcctcttgttcgaatatgatcgaaggaacccgacccgctttacgctctttcgctgatatgctcttgccggagacagaccttggaacggctaagatcgtctctgcgtgttttggatcgggtcgagggaatccagggaggtaagttaattgggtttcttggatatgatctagggatagagctgcgttcgccgccggagagaataaccggaggttttgtagggttttgggtagtgtttttgcacgacggagcaacattgtttgctttttaccagtgagagagagagacgacgacgaagtgagcaaatgggtttaggagctgtgttacagaaatggggtttctctaataaaacgacgtcgtcgtttctagattattcaatgggctttaaatgttatgggctttaacttagctcaacccattataactgcatttgatttgaacaaagggcaaaagtcagatgcttaattcaacggatattccatttgttgtttttgtaaatgaccaatttgctcttaatgtataccacaaaggctttagtggaatatattatggtaagggtgaagtcgtctgaacaaaaaatatgactccatttaagtagctcgtcttgttctctcgacaaagaaaaaaaattacatttctcagacgttgcagtacctaaaatattttttcatcatgccattaccctatcatttgttttattatttgtgttgtgttctctcatggagcttctactatttcactttgtcttccatgtacaaggtaattgtctgagttattcgaaacacaatacatcggtttgagcatttttgtgtacttcattatttatggaccataacttgaggtttcagtttgtttccgagcatctttttgtaatgggcccatgagagaactgatactgggcttgatcagattgatgtccattatttgtgctttattgggctccactctttctcactctcacattttttacaaggttttctcttcttttttttacacctattttcacttttctatgtgttttgttttacacctattattatatttttctttgcctattatcgttattttctttgccgactatcatttttttctagacgttatatactgttttagaatattacgtttattataatattaagaatttgtttgattgtgtccttttttgacgcagacagaaagaacgtgacgcatgtacgaatggctgaatcttcctccacgtgtcctgcaattaaaaaaattagatcgtaccgcatcatgcgtcagccgcgtgacacctgatcataacctagttacttagctcagacatcgccacgtatacgtccctcatgacgggaaacgttaactctgacggcgtcacatgtcgaccattcgttttgtgaaatgtattttgtgttcccatttggctttttgcctttttccccaaggtttggctctaattaagtaaacgaacctgtagcttcggaagttcgtatccgaaccaaccaacggctcagattagtttcatattttcaacggctgagattagagtttcgatttctttcttctattttaggcttcgagatcttttcttctcaaaaggtaaaaactttgggaagcagctaaaatactgtgttctttgtttcttccatcgaaatcgaaaaaagctaagatctttgcgttttgaaacgatggcggaagaacataagcatgatgaatctgtgatcgctcctgagccagctgttgaggttgtggagagagaatcgttgatggataagatatcggagaagatccatcacggtggtgattcttcttcgtcttcttcatcttctgatgatgaagacgagaagaagaagactaagaagccctcttctccttcgtcttctatgaaatcgaaagtttaccgcttgttcggacgagagcagcctgttcataaggttctcggcggtggaaagcgtaagtttttctccgatctggttttactttcatatatttgtgtgtgttgtggcttgatctgttttcttatatgtgttgtttggtttattctttcattttgatggattaggtttcattgatatgtgtgatttgaatctgcacttgtttagggtttctattttactcgttgatctgaatcgatccatcgtgtccatttgtattattggggttctttattttggcatttgtgagggtttaattagggattccatttctaaatgaatgttttgatcataaaaatgggtttttgacataatctcgatatagaaaccttacagtatcaagttccatgtttttctaatgtggttgatttagatgacagtatgttgtaatgtttgctcaacttgattattcttcctatttgcagcggctgatatattcatgtggaagaacaagaagatgtctggtggtgtacttggtggtgctacagctgcttgggttgtgtttgaattgatggagtaccatcttctcactctgctttgccacgtgatgattgttgttctcgctgtgctgtttttgtggtctaatgccactatgttcattaacaagtaagttaaaactgatgaatgtaaatatgtctcagcttatgattattcacttgtgcattgttgacaattgattctctgtcaggtcccctccaaagattcctgaagttcatatccctgaagaacctattcttcagcttgcgtctgggctcagaatcgagatcaaccgtggattctcttctctccgtgaaattgcatcaggaagggatctcaagaaattcctcattgtaagttcaaatgtgcttaagtagaaactatttgggacttggtacttaatatgtttatccttatatctgacaacaatgtaccattggattgaataggctattgccgggttatgggttctctcaatcttgggcggttgcttcaacttcttgacattggcatacataggtaatgctttgcttatacttctataccatttagtgttttccttctcttgtatcactgaaccctgatgactaaatttttatcttgctgcaacagctcttgtgttgctcttcacggttcctcttgcctacgacaagtatgaagacaaagtcgacccattaggtgagaaagcaatgatcgagctcaagaagcagtatgcagtgttggatgagaaggtgttgagcaagatcccacttgggccgttgaagaacaagaagaaagattaggggtttacacaaggttgtccgtggctagcaaaacgggtgttgtgaaatggtatcgaagtaatgtgttttgggcgtttttttaggtggctctttcggttatgtgaatgaacttggaattttcctgactggtttgttctgttgtttatgtcattgttgatcagcgtcgagggataaaagtagtgatatttcttctctctctaagcctctatataactaagaatttcaagatatttgaattttgcaatctcgtggttaatgttgttctttctctatattctcctctttcattacatttgtaaaatggaatcaatgtcacgaattgataagttgtacgaagcttatacgttttatagtttcttactatatcatccactcaccgatcgtgtaagtataagtatatgtaacgtctttataacgtgtggggccatccacggccgagaacgttttgtgaacctcttgtaatcttgttcctagaaaatgaatatcagctaacaatttgcaactaaaactacacagagtagagtattaagcagaagtcagggtggccgagtggtctaaggcgccagactcaagttctggtcctcgtaagagggcgtgggttcaaatcccacttctgacatttttattattttctttttaagtttatgctcaagaagatatcccccactcaccacaccagtacatcgttttctgtctttttacattatgacttttctacattaaaccgaggcactgagactgagacattgagacttcgtttgaagtctcaccaataccaaagttaccaagaaataaaagaagtaaaatattacaaacaaaaaaacacattatatccaattttatgaaactcgaaccacaaaactctcacaaaggatcagtaataaaaagaaaaaactctcacttacaagtaatagttcatgcccactttgatcaaacaaatgtgaggaatattcaacatcacgcctgggctccggcaattcttcctcaagaacgagtacgctacgtttaccaccagctgttttacaaacactgagttccgctttgccttcacgtgaccgtgtccgacaatgtaagccacttcagcgtccttagcattcaccagatcaaacagctcttccttcacctgcggttgcctgaacttggtgtccattggtctgaactgaaacatccttctcatgctcagcctcggaagctcttgctcatactctgctctcagtttaagtagagccggagacttgctgtttgttactgttgtctgtgatctcgagctgcctgcgatgttggcttcggatatagaccgagacagccttgtcccaaacttgtttgaggctttcacaacagcgagccgaccgtcaatcgaacggtcagtgtttgagccaccatagccttcggattctagctggataaactcggcgatgctcatcaccagctcgtcttcaaagtcgtctccgtctttgttcacgtctttgtagccagctcggataatgcatcggtacatcctgtatgtttttggtccaatccggccgataaggtaccgttctttctgcggcacatacgggatagggacagttttgcagcagacaaagacgacaacttggtagaacgccggtaagtttgttagaaagtgcttaaatgtggcaggaacaccgctggcgagctctgtgtagataagacccatcccggggactttgatgatcccgaggctcgggccaaggcttagtattgatttcatagggaccttgttgtgctggtcgcataggtacttctttctgctgccgtaatgccatacgtatgtgatgaaggtgaagaagagggaaaggagcagagtgatccagcctcctttagggattttgactaaggctgatgcaacgaagataagttctatggtcccgaagaagaggatgaagaggacggagaagacgatattacggttccagacaaagttgatgatgagaggcatcaaccaagtagtcacaaaggctagagtcatgcaggcgagccctggagaacaaaggatttgtttaatgataaaagatggaacttatgagtttgatggaaggttaagtccttaccaaaagcaaaagctatgtgtcgagtgtctcggaaacaaatggtgacagcaagggtgaggatcatgacaacccaattgatctcagggatgtaaatctggccaaggacccatcttggtttgtgaacaatcttcacacgcgggaagcatcccaatgcatagcattgtttgacaatcgagaacgtggcaaatatgactgcttgactagcgaccattgcagctagcatagccatcatgagaaccggccagaaaaatgggtctgtagaacaagaacaaaacacatgaaaactacacgaacaaagaagagcacatgaatgagttgatatattacttgcagataagaataataaaccagaaactttggatctagacatgtaccatggataaaatcaaccactacaacatcccaacattgaaggtcaggtacatttatttgagaaattgtagtattgttgggacttgtagaggaattatataaaattggagggattgatacaggttgtcagaagtagaggaaagagacgtgaaaaggagattgaccaaactattacctggaatggaagaataaaagcttgaaggtagagcagaaaaattctttgataaaaacgcagcttggcccatgtattgaagcaccagacacgggtaaacaacacaacaaaacgcaaactgcagagaaccatgacatagcaaaatgttattgtttcttcatctttattagccaacaaaagaggctgtcaaatatttataacaataaccagattttaatagtttatcatattttttcctcttccttgggtcaagaataaatccataattccgtcaaaaataaaataaaaaaaatccataatatgaccaattgcttgtggattctttagcaacaaaaaaaacttctagtaactgtacgatgcaattcctaaagaactactataaaaagtctctccacaagtttctgctgcataaaggaaccaaaaaagctgcttcacatacccttatagatgtggctgtaaattggccaagttcagcaaagatagcctccgttcctgaattcagacaaattgcaaagatgagacataatatagcattaaaatttgttgagtctattttcagagcataaatgaccatattacctgtgatgcataaaagaatgcctccaagggatagccatccatctattcccgtatctctaaagaatacatagatatagtagggagataaggctttgtatacactggggttccaagtcacaatattgtacacaccagcagttgcaattatcaacaaccacaaaatcattataggtgcaaatagaaaggcaactttatttgtcccacggtgctgcagaacaaaaagtccaaccagtaaagcgcatgctatcatgaccacagtacctatgcaaataacacattgataaagaatataaataacactgacagaatgcgtaagaatatataaactagatatgtaggtatggaaaggaaacgttacttactgtgcttcagacttgtcttggccacaaggccatcaatagacgaagagactacaagaagataaacgttagatgctaaaccatggaaaaggaaaaaattggtaacatactatataaccagaaagaagcgaaacgaagtctgcctaatcacctgaaattgctggtgtaaggacaccgatggttattaccatggaagttcctaccaagactaaaacaagcaaagcagtttttgatcttttatttcgttctataaggcttttgaaagcagaactaggcaaatttctacttgcatctccaggaccatagtatgtagagatttcttcatcagcagcttgctgatttggaagcaaagaaaatcttgcgtgtctgcagagcaaagcatacaaagcaaagatccctcctgcaacataaattcaacatttacatcctaaccctaagtctcagaagaaaacaaatagactcaattagcaaccgatgcacataccttcaccattgtcatctgcacttaacacaaaaaccatgtacttgatgagtgaaaggagagtgatggtccaaaatatcaaagaaaacgcgccaaatatcgtatcttctgtttggtgatgtctcaatcctccgtagaatgtacatttatacacatagagaggagaaatactcaaatctccaaacactaagccaaaactctggtatgctaaaaggaggatctggttacacctgtttctcctatcagcctgattcaatagaagacaacaacaaacttataacaccacgctggtcaaaactacacacatatataaacagatattgccgaacattttaacgtttggatagattatcaatgaatggctcataagctatcacaagaagcttaaacttcgagagcttacaaatcaaaacataagctcagagatgcattaaaacgaatcgctaacagtaattttactttcaagagtgatattgagttggatttgaatatcctgattgaaaaatttagaatcagaagctaaattcaatgaatattggcatcattcattttcagaattctctcaccatttctattcacatcatcacagtacaacaattgtaattccgcaggagtagcaataaggaatctaggggtttaagatttccgacgtatcggtcgagagaagggagcgacataccatgattcaagccgccggcgagtaagatgcggcgtagcttggatcttcaacgatcagagattacacgccggagactagttctttggaatcggaatcgaatctagagaaaaacgatcaacgatcatttgttgtttttattatcgagagaagaaaaatttaacaaattcgatccaaagctcgcggtccttcttcttcttccagttttttttttatatatatctcagttgattttttattcgttcttttaattttttttactcattttagttgtccgatttctctgtgagaaaatgtcaccaagattattagatttcgtcatttttcatgtataaaaatcggatttgaaacttctaatccctcctactgcaccttgcttatttttttattgccttgattagatataatctcaaatttgtttgtaagggttaagattatcattctataattttttaagtgaatttcagcttcaaatcatgcaagaatcaacctgtaattattatatattgaatctctcataagtcattaaccaaacctgcaaatggctttctgatctcaaagtattttttatgttgtgttgataaaaagagattgcaggaaacaaaataattgattgtaacagaaacacaaagtttgagtaaagtgataaccaaaaacaaacaaacaacatcaaaagatctctcacattctgcgtcggtttggcaccaattctggatttcccttcttcatcatcgctacaaattcttcgtagttgatttttccgtcctaaagattcgaatacaaagatgagaagagagtgttaaacttacacgtatacttacagatgtatgaattggacgaaaccagagatttacgtatacttacacgatcggtgtctacttcagcaatgatctctttgatggatttatcatcacccatgttgtatttcttcatggctagctctagctcttccattgttatgtagctaatatcacaaatcaagatcaaagagtgagactttatttatagcttgttaaagaaagaaatagagagctaaagaacaatgttttacccgctgttgtcattgtcaaagaactggaatgcggtgtacaagtgatcctcacgttcgattctgttcatatgcattgtggctgatataaactccaagtaatcaattgatccatctccatccatatcagcctaaaagaaacaaagcatcataagcattattgctttgacatcaaagtagtggattgtgatagacttactgcttccattaactgccttatttcagcttcagagatctttgaaccaagttttgggagaccggttctcaattcctccaaggtgactattccattgttatcagtgtctagagatttgaacatctctttaagaccaatgatttcttcttcagaaaggttctcagcgataacctgaaattgcaaaacgaaaaccaaagattggctttagaacaagaagactacataaactacaatagtgatggtaagactgtttcaatcagtgttttaattaccttcagggccattttttttagtttgttcatcgcccggaattgtttcatcctggataacaccgcattgtcaagcggtttgtctgatgcctccccatcttctctaatccacggatgatctgcgtatgtatcaaaacgttattaaaattggataaaagaaggtgttttcatcaatttattcatcaaaacatgttataaaggggtcttacttagcacttccgcagctgtaagccgatctttagggtcatattttaacattttcctcacaagatctttggcaccatctgatagtgctggccatggatcagctgaaaaatcaagttgcccttgaagaatggcatcaaagatccccgtttcattttctgcacaacagaaagaacgtgactatacattccagtccaacatttaaacagtgaaaccaaattctcttctcaaataagatcaagacaatacctccccagaaaggcggaacaccactgagaaggatgtatagaatcacaccagcactccagatatcagcctctggtccatagttccgttttagaacttctggggcaacatagtatgcacttccaacaagatccttaaacttatcacctgcattaatggatcaacttcattagagggataaattgtctatagaaatcaaatagggaaggatagaggctgttcaaacctggcttgaagaagacagagagaccaaagtctgtagctttcaatggtgagttctcatctttactaagaaagagaaagttttcgggcttcaagtctcggtgcattacacccatagaatgacaactatgcacaaccatcaccatctgcctacacaaatccgcagcagctctctctgagtaaagacctttagaaatgatcctatcgaacaattcccctccttcacacaactccattatcagattcacagagtgtctgtcctcgtaggctcccttcaagtccactatgttcctataatcaactcaccaatttgaaactcaggtaaatataaatatgcaaaaagggaaactttttcaagagtttaacataggaccaccaaacttttcatccacatatgatgcaaaccattcattaatatagaaaacgaatcctatgtctaaatattcaccaatattccaacaaaaggcgtttcagattcgatttcggaaaatgtcaaagaagcattttccagtgagatacaaaaaaagagatttaccggtgaccgctgagatggtgcataatctggacttcacggcgaacatcttcaatgtcgtctttgtgaacaaggcggcgcgtagggattgacttgcaagcgacctgttgtttcgtctctttgtgagttacgaggtacgtgacaccaaactggccacgaccaagctcacgaccaaactcataggttctccgtacttcctccatcggccgacctaagatccgaccattctgctgagtagatgtggtggaacgagatccgcctgttccggagcctgacgatccgacggttccggaaccggatgatccgcggcgttctccggcaggtttaacatggtggactacgttgccggaggaagaggaggaggaggacggtggcggatcggaggatttggacttgctgtgtctgtggcccattgtcaaaagctttctctcagtcaataaagtcaatcgagagagaaagattgtatctccgattcttatggctttttaatgtctgagatcagacacgatgaccacgtggcgtgtttttattggtacgtagttgaaccgcgtataaacaaaagtatttgtcccattggaagataaattagtggatgtggaaatcttctgcatattagttgtttccacttctccaatcaatcacacggctaattcaatgttaatcttttgcaatttgagattgaaaaaggaaaagttattaacatcctttaggttacaaaatcaatgatattgcgtatgtcaactataaaagccaaaagtaaagcctcttgtttgaccagaaggtcatgatcattgtatacatacagccaaactacctcctggaagaaaagacatggatcccaaacaacaacaatagcttcttttacaagaaccagtagtaactagtcactaatctaaaagagttaagtttcagcttttctggcaatggctccttgatcatttcaatcctgaaggagacccactttgtagcaagaccatgtcctctgtttcacttacagtgtgtctcaaaagtctacttcaattcttcatatataggttcctcacactacagcttcatcctcattcgttgacagagagagagtctttattgaaaacttcttccaagtacaactccactaaatataatagcaccaaaccacttgttcgacacaaatctgtacagatataaaaacactattaggttttccaaggcaaatcacataattggattgtgaaagagtacaaaagataaacccaaattttcatactttctactgcagtcagcaccagatgataagtcagctgtccctatttgccatcctaactgtcctgatgcagcggccagtgatgcgtaatattgccacccttaatcattagagcgagaaacaaaaagaatcaaaagacagtaaatggaattaggaatcacaaatgagtccttgtaaagtttattgagtaccgagatctgcactgaatccagaaagtgcaagaaaacctatggatgctgtgccaaatccagttaaccaaagctttgtattatcaccgaatctaagggctgttgacttaacaccaacttttacatcatcttctttgtcctggagacacaatatattagacattagtccatggaaaaaaaatgatttaacctagaatatctcaaaattacttgcataaaaactgaacttgagctgaaattttgggttcgtagcttgtggcatatactatttcattttcaatgggccacaaaggtaactttcttttctcacttctgttgcaaacgggaagacttttatggggctaactcttcacttaaagtatagaaatcagatggaaaaggtgggagatcagggtaattttcttctttatgattgacaaaagtcgaacatcgaaatggatgcatttgcatgagacatgaaacaaaagctgaaaaagaaatctgtggtggtgaagctagaaaaagaaaacaaagcaagcaatatgcacacattgagattaactactttgctactggtcataatcaaatagattttgaagctaaaaaataaaaagtgaatatacctgatgtgcataaatagtatcataaacaagggtccagcagactccggagagatagagagggagtacaatagatggtgctatgcttcctttaactgcagtccatcctaacaatgctccccagtttatggtcaaacctaaaaaggcttgaggctgcaattataaaaacgaatcaatcataagaaaatcagaaaatatataatgtctaactttgagaagccagaatagatttaaattacccaaaatgtaaacctcttcataagtgggtaggaaaagacaagtaacaaagatgaagcccctaaaacacggctgcagaatatacatactgaaatgagctcaagtagaaaagaatttgatcacaaaactaaagacaagacctgagaacatatcttcagaatttgggccaactacataagggtgaaccatatgtgtatgtgaatttttaaacaaacacttgcaaatacgcgactttagggcaagtaaaaaatccaaacaaacctgtaattgttaagttggagaagaatccctaagcctaaaagcaactgcagcccgagaaatccaatcccttgaaatggtgtcaaaagaccactggcgataggtcttagttttgtacgatcaacctggatataaaagaaatttgtaagacaacataatctaaaacaaaacaaccatacaaaatcttgagctttacatacaagcaacccatctttgtttatggaagaatgaatccagttacatgaatgctgtgtatctaccctaactactaaacacatatttcaatcgaaaaacatattccaccttcaccatatctaacacctgaagtctttcactttttgaacgaagtcatcagaacatgcagataagctattacccaaaacagagatatgactggaaatgttgtcgtaaattgatccaacatagaaaaatcaagaccagttccagatgtcaaagcaataacactttcccaccatggttacagaaaccatagttacacaaaacatgtttcctaaaccaacatactaaagggatatataaatttgacatcactttatcaccataccataagatagcttaaaaacaaactgacctttgtatctatgtcctgatcaagcagatcatttatagtacaaccagcacctctaagaagtaatgctccgcaaccaaataaagccatatatttaaaacttggaaggcttccaggatcagcagccaacgcaatcgacctatacaacaatgatggagattcagagtatcgatctatttacatagctctggaactagatccatgacgaaacatggaacatcgttataatatctaaagacttccaaacagattcctgagtaagaaacccagtggaactatagtactgtaacatatataaaatcaaagaaaactcaggtttatagcattatccaatcctgatttctgccaatccttaaccactctcccatgctatcaaaaacctcagctcaagatcatactacctaattgcctatgagctcttgggaagatcattatggatttgataactgaaaaaagtaacagagaaatagcagactgcaagaactactccaaacttctccactgatatgtatgtagtctaacaataataaacagacataaattcttttatcaagcttcaagagcaagttagtcagaaaacatcacagccaaaccaaccaggaaaacacataactttatcacataaaactaaatttaatgtaatctgacttaacataaaccatcctttgggacgaaaggaaactatataaacatgcagtctttctttccctcagctattctttcggatggattataatgaatctcaaaagtgaaatgtcttgattctcagctacattactcaaaggcgaagataaacttaccacatacaaggccacgcaagcaaccaagttccaatgggtttatccaatcgagcaagcttagcataacctctaacttcttctggtaaatacaaatctatccaagaagcttccttaacaacaacaccatcactcttctccttatcatctttcttcggctttccctccaaaaccgaagaagacgacgacattccacaaattaatctgtaattccaaccaacaccaaaaaacttctcctgatgcaattctcttcctttactccatacttggtaattatcattccatgaaggataacacttagtgaaaggatttgtgtaatgggtagtcacaggattggacaaggatttatgttgtgattgcaaaagagcagaggaagaagatggagttacggagacggaagatttcaacaaccgtcttgaaacacgggagagcccaaaaaacgccatctttgagagaaattgttgcctggaagaaacaaagacttgagatttcaaacgtaagtgaattcttacgaacgaaagctaacttctcaagagaatcagattagtgattcctcaaaaacaaacaaaactatctaatttcagtttcgagtgatgaagccttaagaatctagaacctccatggcgtttctaatctctcagagataatcgaattccttaaacaatcaaagcttagaaagagaagaacaacaacaacaacaaaaaaaatcagattaacaaccgaccagagagcaacgacgacgccggcgagaaagagcacgtcgtctcggagcaagacttcttctccagtaacccggatggatcgttaatgggcctgtagattattatatttgggccgaaacaattgggtcagcaaaaacttgggggataatgaagaaacacgtacagtatgcatttaggctccaaattaattggccatataattcgaatcagataaactaatcaacccctaccttacttatttctcactgtttttatttctaccttagtagttgaagaaacacttttatttatcttttcgggacccaaatttgataggatcgggccattactcatgagcgtcagacacatattagccttatcagattagtggggtaaggtttttttaattcggtaagaagcaacaatcaatgtcggagaaattaaagaatctgcatgggcgtggcgtgatgatatgtgcatatggagtcagttgccgatcatatataactatttataaactacatataaagactactaatagatttcgatcgttgtgatggttattctcctttcatcgaaatatttagagatcttaattaagaatcagaagatgaaaacaaaaaaaatgatattaacattttagtaaaaataataaaattatcaagtaaatatatagacttatttcttaaaggtttttctgcaatttttaaaaacaagttctataacaatgatattttttattttattttctacaacaatgatatatttcttaagtataaaaaaaaataacaaaaacaatttctgtaggtagacttcttcatcaatgcaaggttaagcgcataacagtccaattaaggtgaaaatgagatgtataatatgtgagtgtgaccaaagtaatatacgtactcttgttatttacttaattgctatctagaaatttgcatataccacaccgactaattatagtattataccactagatgtttactatgatctacatatatgaagaaaaaaacaatgaaatatgtagataactgaacgtactttatttaatactcattatatcgaaaccgatatatgatgagcataacaacatatcacagcatattccaaaaccaaacagttacagagaatagaaactccacaagaccccctttattatattgattatcgaaaagacaccataataatacaatatcgatcgagatagtgatgacggtgatggttgtggttaagctttgttgacgtggccttcaatgtcaacaaccatttgcttgacgaatttcatgtagccgcttggttcgggaaagtcatcgttgcgcttctcccatatcatagtgattttgcagacgcagctatcctcagatttgggaataaattcgtagatgatatcaaatactttgagatgctccatcacgtgaccatccagtcctcttttcgtcaatgttttattctcatcatctatctctctcttctctttgaacatctccttctttccatcttacacacatgtgtttattagttacaatttccaacatcccactagctagttataccataaggattaatatctgactatcatgtttttccgtttatatttttcaaaattattctcaaatatgaaaatactttttacttttaaacatatgactttcgttttcatatgtaaacataaatgcaaaatatgattattatatatgtttttggtcttatagaacaaattccttaattaatgatcatatgtagtatttcatatttggcagtagaccaccaaaaccatagtttcggacgcacataggccgtaaaagtgataaatatatagagagaaagtataagtaaatgactaaatgtataccatatgtgtagtcccaactcctgatagacccgtgagagtcatgttcgccttcgtgaacaacgacattttggatgtggtggccaatggcgtcagcgaagacatggttctcgctcttccagctcttgtagtgtttctccgccgatcctttcaacggaacctccgtcacgtacgttcccgatgtcgccatttctttctctctctctcgttttaaagtttctacttgttttctgattgattatactgaatacttgtcgtcgctagctcataggtttatatagggaccgtgacggttaaaaacaaggtttctaccgtttctttaaatcatttgatagtgcatacctaaaatcttctctgtttcttttttaactcaaacactatttaatgatagatgtgtgttgttttttaacttttttgttgaagagctttcaattaaattgttatatttaatgttggaccacgttatttacgtgggtagttggcacagcatcctttagaagataatcacggttcatgattcatgccccatacatattaatcgcgaggaaaaatacggtataataatgccccatacataatgatcgcgaggacaaataatgttggtatataataatatatatggaaaatcacatttttttactttcaaaattttactggatggcattttaaattataaaataatttgactaacactataatcaatcaccaaataattttactaacattttaaactttaaaattagattttaaatgaaattcaaactaataaacatacatatatgggatagagatttgaagagagaatgagagatcatgagacaggctcataaaaaaaaagtggagccgtttactcaatctctagtaatcagaataggtcatttatgggcccatacaattggtcttttgatccaaatgggccaagaaaaacttggagtctaattaagaaatacatacgtcctctctgttaacgctttaattagtatccaaattaattagccatagaattggaagcagataaacaaaccctaatttacttatcttctgggaaaaaactactgtttttacactacaaaaaaacaatttaaaacatgcaaaaaaaaagaaaaataatttttataactcaggaagttctaattctaagctcatagtttgtcttcagactcggaaccagccgttgataatgcttatatgggacattaatcatgctctcttatacttctaagactctatttagaaggataaagttaacgtcttttaaaataagctttattactagttgaaagaaacactcttttatttttcttttcaggattccaaatttgttaggatcggcaataactcatgagggtgagacacatattaattagccttatcggattagtggggtcaagtatttgaattcggtaagaagcaagcaataatagatctcgaatgcatcagagtagttgcattttccgtaaaacaaataaactcatctgcatggtccagggatcctgtaacatcaatcattgaacgcatatatacgttacaattttataatgatgaaactgcaaagtccgattttgggtgatctctctggtggtaccacgtttatggtcgtcaactcaaaattttacaatcaggcacatttacaacataatttatacaattatactagatcaagcggggtacttaatttgttatgtagtgaaaactttgtagttctatgttttacaatttttagtgaattttgtaaaattttatgtttcataaacatgtataaataaatatataaatatttatagatgccgtttcttatggttcgtttcctccatgtttaggaattttaaatatcagaatatattattagaaaaaaacaagcaaatattttgcataaacgatgcacttgtcattttttttcaatacgaaggcctttattttgagagaaaaatggaaaacttattaaatcgatagattatttagggtctttcggcaatttgtaatatcagaattctatcacaatgaaattgtgtagacaattcgtcatcaagattaggggcataacagttcaattgaggtgaaaaacaaattgcgggaaaaattaaaaaattacgggataggtcttattttggaacaagattatgtgtcaaatggatttgaatcaatatttataaaattttaaaataatattaacataccgttttaatacatgttaaatcctaagtatattaacaattgtttcgtggaattctgatatacattacttaataaaaattaaaaactataaatataaatattttataaatatatataatttacaaacttttatagaaactaactttaataataaattattctgcagtgaatcgcgggttaaaatttagtatatacatgagtatgactggttcctagaaaattaaggccaaaatagtaaaatatttttttaaagttatcataaacacttttaaattttgggggtctttttcataaaaatatctttttcggagatctatttgaaataattctcttttggaaaattttggagtccacatacatttgtttctcccggcttccctcatggccgccctgtacgtgagtatgaccataatatacgtactcgtgttatttacttaactgttattcagaattttgcctagtccacctatactagatcgttaactaacaccattagatgtttagtaatccgtatatgaaaagtcataaattatagataaacactgaaaatctgaaatgtgtagtaaattaatcttaagaatcattatatcgaacccgacatatgatcatgaacataacaatatatcgaagcatcatacagaaccaaacggtttacacatagaaattaacgatccacaagaccccatttattatactgaaaacatcataacttataaatcgagatagtgatgatgatgatgatgatgatgacgacgacgactgtgggaatgatgattaagttttgctaacgtggtttcccatgtcagcaaccaagctcttgacgaatttcatgtacccgcttggttctggggaatcatcgttgcgcttctcccatattaaagtgattttgccgatgcaggtatcctcagatttgggaatgaattggtagacgacgtcgtacactttgagctgctccatcacgtgaccctcaagtcctcttaacgtcaacgttttggtctcatcgtctatctctcttctctccttgaacacctcctcctttccatctttacacacacatgttcattggttcaaatctaaaccttaggagagatatattcacaataatacgttctttaagactgtaactagaccaagaccaaaccaatcatgccatagaaaacaaaactagaccaaccaatctagattgtatattaactaatgaactcgattgtttgctaatttttgcgttttttcgtgtttaatgtacgcaaacacaatcatgtgttccagtgtttacgtttaccattttcaaagatcttcctaaaaatgaaaaaactttactaatagaatatctgaccctcgttttcttatgtaaaacatatatgaaaattgaaatagtcaagacctatatattatgaatagttttagatgtattcttgcgcctacttctgacaatatggtgcaactatttaattaaccatcataattcatatttggctatatactacgaaaaccctagtttcacacatacaccataatattgtgtatagatatatatagtgttaaataatatgttgatatatatagagaaagtataagtaattgtataccccatgtgtagttccaactcctgatagacccgtgagagtcatgttcgccttcgtgaacggtaacattttggatgtggtggccgatagcatcagggaagacatggttctcgttcttccacctcttgtagtatttctcggccgatccttttagcggaacttccgtcacgtacgttcccgacgtcgccatttttgctctctccctctcgttttaaagcttccacttgttttttatgttttgttttggttgatgagataccacttgtcgtcgccgtggtttatatagtgaatctgacagttaaaaacatagtttttaccgtttctttttatcatttgatagtgcatgctagaatcttcttttcttcatcttttttaacgtacgtattatttaatgggcactgatgggtcatcaactcgtcataaaaatgtgtactttaattggtaggctgattttcgaccaccacgttattaatgtgggtagttgccacaacatcctttagaagataattatgacataaaaatatatttttaccaagaaatggaagaaattttctatgattgtttaccatttttgatttcatacgagactttgaattttttttaaaaattatataaatagaatgagatccatttcatagcatggtgatgcatttagtagttcggatttggtttgaaatgattggccgaactacgtttatgatttggtctgtcaaaccataacaattttcgagacctaaaataatgtaaaagggtggaaatctattgcccatactatctttgagatttattttaattatgttattgggattggaaaatgacaattttgtgtctagagtatagtccgtagttattatatagtttggtattgatttcctttatattttaatattggtatatcgagtatggaccattcatcgatcattgttgacataattgcatcttataagatgaatacaatcaagttacgacaccgaatgagagctttatgaacaatcgaatcatatattaacatcgagttaacatgttttaatttaccatatatattttaattaagaatctcctaatttgttatattttctcggaatatacattagtaacaaaatggtttggtctttatcataagtacaaactttgacattgtatttgtttactatatgcgaaagctaatcaatgtttatctgatacttaagctttcacttatcttgaaaccataccatttctgttcaaagcgttgatatccccacactatatctgcccttgccgttgggccattatactatgaatccataaaatcaagagaaccccttcaaaattcatatagagattacgaattcccttaaattcatagcccataccccaaatagagaaagacaaaaaaaataacggattatacacaattccactgaccagttgaaaaaaagttagcaaccactttcggcaagatggatcattaatggacctatatattattctacttggtccagcttagatcggcctgataaaatgggattgcaagtacttgggatctaatgaagaagaaacatatatatcttcttatctaatgaagaagagacatcccaaaaatatatttctttgacagaaataattgactattgataaacaaaaagacaacaccaaataaaaaggccacaaaaaaaaacactacttattagtaacacattatctctgtgtacataccaattttcaaacaaaacaaatattattcgctagttagtaacattcatagagcttaatatccatcttaactcggaaatacttatccccttgaaataaatcacataataattatagataaacaaaaagacaacagcaaaagaaaaggcaaaaaaaaaacttaattattgtaaacacatttctctgtgtcaacataaaattttcaaacaaaacacacattcttagctacttagtaacattcatagagcttaatatccatcttaactcggaaatacttagccccttgaaataaatcagtcacgaaggtagcgatcccacgagccatgaagaagtcacctgtcccaccaacgaccgatagatctcttgttggctccatcatcaaatcagcacccattatgttcaatgtccctttgtgttccgttgagttaaacaccaacgtgtaggaaaaccacgaattgaagtccatcttcatgtcatagaaatagaagccttgtgcgcgagccacgggttttgagagatagttcttgtccattgttatgggcccatcaaagatcacaaacttaccgaacttgaagtttcctagtcctggagggctcacgatggcggcggaggttgcgtttgctacattgtcgccatcgtagaggatgtcatggaaatagaacgagaagtgtttgcagggttttttctggtcgattgtttttcggaaagataagacggtatcggagaagagtaaaactaataagaagaatgagaagagggctttgaagagttgtttctctactagaaatgccatggttagctagagattagtgagttgtgagatgtgtttaatgaaggaggcttaaacccatttatatagaagtattattcacttgttttaataaataatttatttggataatcgttttcaaagtttgagggacatatctaatgggttgttgatgttttgccgatttatatttaagatataaattagaaagatcataaggtttaacgaccatgcggaagcggggttggtggtaactaagctacaacctaatttcactttcttgatagatttaatattttttgacaggaaaaagatatatatatatatatatataatgatttgaaactattattaaacggtatggtgagtccaacctaaaagcataaagtcgaaggctagctagctaatgtaacagcaagtgtatactaattatctgaaaaataaatttaaacaaaacgtcaaacgaaagtgttacgcagaaatggaaaaaaagaccaattattaaaagaccattttggaaatattgctttgagaccgcccatcattcatgtgcggtccatatggctaaaattaggtaacttgtaaaacaaatcaccaaatcacgttctagctttgcttctaagattgctactaatcaacgattttcttgaaatcacgttctatttattcgtaattattcggactaacggatattgaaaaatcaactccagatttaaacaagatggacaattgatgaaacaatgtgggaataaagatgttgaattgatatgatacgaattttacatagaaagccaaattttgaaacttcaactacggtagatctcgtcaggaggacatgatcacgattcatgaagatgtttatataaagttaatattgataatgtattttatgtatatagatgttataattatacaagggcatgctcgtgtactagaacaattattcccctctgccgctttactttcagtgtaagactaacatataaaaaaacattatcggcgaaactttataatcaattgagaaaaaatcatttaagaaagcgtcctaattttctttcaatacgactctttttcaatcaaacaaaagaaaaaaaatcgtccaatttttctcatatatattttaaaagccgtataagtcaataatatttgtcactaactccttcctaatacatgagtaaaagcataaacgtcgaaaagtcaaacaagaggatttgattaaaaagaagaaaaaaagagttcaaatgggtttagttgcctaactagtaactacccttttgttcctttgatttcagagcagacccatgtgaaaagtaaacagcttctaaaccaattatgttatttacaaacttcacaacgatctaactatcttgaaaattagaaaaagaaaagagaaaaactgctttgaaaccatgaaccccaaagatactaaaaatctgaactaaagctctgtaaagtcctttgaaaatggagaagttagacagagttgaaaatcaaaccacaccactatgtcatgaaacgtggccgaagagttttggtttcactgggtgtcgtgcatgctcatgtttctaagactttgaagagagttaaaaaaaatagattgtttctatatttttctaaagataattataattcacattattatcaaaaaagtataaatataatttagtttcgtgagaatgttaggatatcaataaaaaaaagtttaataaaagtgtgatttaggaaaaaagcttcttctcttagtagtacgtaaatcgtttttgaaccacattactaaggaaaatgccttgttacgaaataagcacatgcttggttttactccgaagcatgaggcatcaaagaagtcgagagcttgctttgctgcatgatttaccattggttgttctctctactttctctagaaacacttacaaaattccatgagaaatattttatgtatgcatgcctgaaattcgatcaaccggcaatgaattgactaatcatcaatattcacaacatatccgagaattaggtttcataattcacagaaaactgatcattcgtgataagaaatctcaaaacaaattccaaattcatcatggaaacattataaaatttcactttataaaaaaaaaaaaactcaactaaacaatcactctgcggcttattaaagccaaaattagtcagagcgagaaaaaaagatcaatatatggttgcgcatatatacatatatattaatccaagatatattttgtttttcatttagaagcaactctataaaacaatccatgcaacagtttcagcagtcattaacatcaaatttgaaactaaaacatataatagtccatatgtcgacagaaaaagtgatgaaacacataaatcatcacaacgcatatatgcataaacaaacaaatttaagccagcatcgtttttttttttagaagtctcccaaaatagtcattaactacaaaacattcgataaagtcgtcaattaaattccatggaagttcggtaattttgtaaaccaaattaatttctattttgaaaactaatttgaagacaaaacagaaaactgtgaaaaaactatactatattattcaccgttggtagttattatataaaatcaagatgtataacattttattttattcaccgtaggtagttatttttttgtcaaaccgttggtagttcaattgatgtatataattagttggtcatgtaaattaaaagaagaaaatgtcacggagaccttagcatatagaaatcatttattcgcaattattatttacaatatgaaacacatgttattatacaagccaatcttttgacctttcgagtcttggaatcccaaatagaaaattcactaaggactctcagaatcctcaaccagcgactcttcagtcgtgacgttcttcgaaattccgaccggacggcttgctatatactgttgcaccaccaacactgatgccaccgtcgaaacactttcgctttccgttaacaaattcccgatcggtccaagctcaggcgtgtcgcttcttacgtttatccctgacgctacagaaccttccggtgacttccccaccaagaaaaggttgcttttagaatactctttaataacttcgataacttcctcgtaacatttcacgattttctcttcgtaaatgatatgagattcagaatccgaattagaacgagaactttctttttctttaatctttgctttaagttcggttatagcttcaatatcaatcaatctagttgcccctgaacagagctgatcttcggttatctcgatcctcacgttttccggtttgaattcatcgctagggataaaccgaacaacggttaagcttatcccgggatgttcagccattcgcaccgcaaacgctaacgcctcacgatcatcattccctccaaaaaacaaaactgttatagtcaacgagaaatcactagacgcgacacgtgtcgtaccaccaagtccacgatcaaccaaaatcgcaacagaacatggagattcctccataaccttcttgttaatccaacggtagtcattcctagtcgtctcccatgttctgtccagcctaacgtgcttatgaaacggaagaatcaccatagcggtttttttgcgttccgcgctttggcaaatatcctcatgtatagtcgccatcggtgagatcgctgtcatgggacgcactgagacacggctgagtcttcggaaagcctcgaatgcgaccacaaccatgtcggaagaagaactattgttctcagatttgtctttgttccagaagggaagaccgtttctcctgaccttgtgtgccatgagtatagccgatgatctctctgaaagctccataagatgcatcgcgtagactgatagattttctttacggtttatgcctcgggatgcttctatgaggttgacgatcgtggggatgttcattatgctctggaaacagaacatgaggcagagcggtttgtttgaacggttcgtctcctccaccgttcggttcttataatcagctttggttaaggatttacccggtttgtacactgccagaactagaggagtcgtcatgaatgtggtgaatatcgccattagaaccattatagcgaaaatttgatcattcagaacctgtgacaacacatcaagaaattaagtaaatatgcaaatatttttatacaacatgagttttagtttggaagttaatggacttacccctctgtctttaccaatgttgaggacgatgagctcaacaagacctttcgtgttcatcaagaaaccaagcgctaaagactggtcaagcggaactttgcagtaaagggaaactaggactgtaccgatgattttaccgaaacaagcattaaatataaccaaaaccaagagtccccaagactgagctccttggatcgtcgcaacattggtctttaaaccacttgagacgaagtagagcggcaagaaaagacctgacacgagatcctcaactttctcaactaaagcattcgcgaaattgccttctttagggaaaataaccccgatcacaaaagcaccaaacagcgcatgaatcccaataaagtctgtgacgaagctagctgcaagaacaatacctaacgtgcaacacacgtaaagttcatttaccggttctccttcagggcaacgtttagcaatcaacttaatccctggttgcacaacaaagatacagaacaagacaaaaccgcaacccgagagaaacacccaaagagaagtaagcggagagctcccctctccagaaagagccaccgcgagagcaaggagaatccaagcagccacgtcattgaccgcagcagcggacaaagcaatctttccgatatcagtggttagaagcttaatctcagcgagtattcgggccaagacgggaaacgctgtgatggagagagcaacacccatgaagacaaggaaaggagctttgctggctccatcagctatggaactgcggagagcaaaagaagttccaatgcctaatacgaaaggaagagtgattccggcgagagcgatagagagagctctctttccggttcgcttaagagatttgggatcgagctcgagaccaacgaggaagaggaagaagatgagtcctaagtttgcaagtgtgtctaaaaccgttagactctttggtgggaaaactgtgttgataaacttagtgcttttcccaagtgctgatggtccaagtaatattccaccctaaaaccacaatataaaactcaaacttaagacattataattccaaaaaaaaaattgtaataatcaatgatatgtgttttaaagtgtattatttgactaaacatttaacaaggaaagtaattatgaattcatgatccgtgactgactatcttatctgttcaaaatgttgaaatttatcaattcccacaagattcataggaacgtggaagcataaacggatattataagatatctcaaagcttaacgtgtcagcgaattttgtggaaggaaaaagaatattcccacgaaagttcctacgatatatacgtcatatataagcccgaagactaattcatcaagtgtatgtatgattggggctactagttttaacttgtaatgtaaatttccaaaaaattcgtcaccttatctaattattgatgaaactagtactatctttgacttttaattagaccccaaaaatggataaataagatttttaataataaactttgacccaaaaaaaaaaagataaatcataaagaagtaaagaaacgtacgacaatctcggcgatgacacgtggctgccggagaggacggaggagaaaagcaagaagacgagtgagaagaagaacgatacagatctggagtatgagaagaggcaacgcgtgttccagaggattctctccttgaaagactccattagaggttgctttcattggtcctggacatgttgtaccgtttgttcccatgctttaaagatctgacaaatgatgaatatgccacgagaattagtcattgtggtaagttaaaatagcacgtgaagcgatttaagacttttgattcatttatcaaacattatcatgatacattaattacagagtaaaactatgatcaggcctttaacaaaaacaaaattatgattagtcattagtcaataattttcttgattacgttattttttccttgaaaccaaacagatcagatcaatacacgagatttcgataggtaaagaggcgatactcacggattaatatctgaaaacgcagattatatcgggacggagatgattatccgatctaaatcgattgatttaatgtagttgatgatttatgttcgtgaagttggaatatttttgggttttaaagagagacttgaggttgaggataaagtgtttgagtaagaagcggatgcagtatcaggccgttactaggggtctttttataggctgcaagtcaacgaaataccaataatgtccttatttgcgcgggaatgatttcttcttctgttttttttttctaatataaataaaacaagtaaacattatcttgattcttgaggctagggttggcaactagcaaactgatttctttaagaaattggtgagaaatgcttcccaatttggacggtatttggaaactagtaatatataaatatctaattatctacttgttttcggtatgggatatgtgagtggtacattgttttaaattatattggtttattagctcaagcaataatgtagtttcactatcactagtaattcctttaggccacaagatctaagatttcacatactattagtcttattttaccatattttggtatggtcaaacaactagtcttgatagttctaatttgagctccttgattccaattcccattaatcacataattcttattcacttatcaaatattggatttacacactcatttcatcgtatgcatgttctcattgacgtcgattcgttcacatgtcaacatctgatattcgtcttctctcctaccatcaaaatttaacccaacatattcatagaatcgataattagttgatatgatgagtataacgaaatttatttttaagacttctatttttaactaatattatgtgtataacatataattatataacattagtatatgagatgacatagaaatttgacagtatgttcagataaaaatacaagtcttatttgtatacttgccagttgccacttgtaggataagccaaaattagtctttttttctatcttggtattcatatttcaggccaccaaaaaagaagaaagcaaataaacagtcaaattagactctttcgtaaaatagacctcaaatgtatattatctctctctctctcttatcggttatcgtcggttcgccaccatcacatacctttctagtaacgtaaggttgaccaaattaagcttcttgatcgaattttgcttgctcttaaacacagaaatacaaccatatatctcgtatatgcacaaaaagtatatctgtatgactaaaactcttgaaataaaacaccgatccaccttttctatatacacgtatccctatataaattaagtaaaatggaattaaggtctcagttgtacaaaggaatgaataagacattagattgaaaatattagtttgacaggtgattcaacccgccatatgggataacaaagagtgaatacatatccaaattcgattaacattcaacagtgcaattaatatgacagatcacatgttttaactagagaaatttaagtcaaatatattccaacttctaattgttaaaaatgaatcattgggtacctgactgaaccaaaaaatttcacatgtttggatttgataattttaaaaagaaggttaaaacaaactcaggtagaggagactttcatatttttcccaaacagtaaatttttaagctagacataataatatacagcaaatttttaagctagacataataatatacagcgcaaaatctatgaagctcgttgacacttgacgaaactttacatctcaaaactaattaactaattatcttagaatagtaatacatttattttatatactaaattacgttctaaaatttttcaatgcagagtttagagtagtaatacatttaaattatatattaaatttttcaatgttcttttctttagcgattgaataattgtgtatagtcaatttggataattttacattatgaagttgtcatatgactcatatacagtatatgatatcactatattcgttatatacacgtgccataaagttagacttccattcaatctttataactgagttgtatccagacctttgtcaaaaattaatccaaaagttaaaaaaaaaaatctatatgaattagtaacctaactaaacagggaatatgatattagtttgaaataaaagcatttatgtttcaaaacaacaaaaccattctttctcccaacataataataatatatttgaaatgttcatcgataattaaaaaatcatcaatcatacttgtaaagtcagattacaaattcagtgtattatcgtttactaagttaatgtcaatgctcggttgattgaacatataaaaaatgttttttgattattggaccacttacaaaatttagttctttgaacggaaataattataatgacacacaaactattgtcagattcttttcgaatctcttataaaatcatacattgctgattaatgttttaacatacagttacattaacataaaccattagtatatccacaagtttgggatatgactcatatgatatgttagcgttcgcgatcagcattcagcaagcgattaagtctgtttagatgtttgaatttatgatatatagacaaaattatcattgcaatttgtctaaatgtacaaaagtatatattatcgtaaatataaatcgtggtactatactctttatctaacgctttggttgtgtatagtgtgcacacctgttacgtatatctgtcatgttgaaatggtaaaccacccaaagtttagataactaaaagagtgattttctaattggaatccgaaacaaatattatttaatcaaaacattacgagacggcaaaaaatacaaaaaaaataacatagtggttttggagttccggacacgtgggaggaactaagataccggtgacacgtgtatgtgtaacgtttcggccatacaaaacgttcattagattctttaaacatcatctttcatatacacttggtcatataaatcgctttcatcggagagtcaaccaatataagttgatgatacatctttagccgatttttttttttctttttttaatgttaaaacatgatcacaattaggtttggataggataataacaacagcaactgaatttggtaatgataccgatgttaatatttatgtacgttaaacgataaatttgaataagaaaaaaaaaaagcacaaaaatcatacaatttgattaaacagacagtttatataatgtgtactgttggtaatcctaccgctagacaatgtacttttaatgtgattactaattacaaaagtggtaagaattagtattgcgctacttctatgtcaaactaatcataccaaatagatcttatcgataaaacatagatatattatatatatatgtggattgtggtgatcatagatgcatagacttttgccccaatcatatgttagttaatcatgcctgacgtagttttatacaataattcttttgtatatcagctggggccacgtaagaaccccattcttacctcaccttgatgctatgcttttactatactatcagataatcacataaattagattagaggtgtgattggtgtttattactagagcaatcagtactattcagtagaaattaagaaaagaaaaaagtttttttttttaaagatagagaggaggagaaaagaaaaggtaaatttagagaaattttgtttcttcgtgtaatggcaaaaactacagtgaacgcaacaaaatttgcaaagaaagatgaggctatgaggctatgactatccccattgaaacagagcaaaaccccaagaacatcactgagtattttcaatgactatcgataaagtttcacattgttgttttcatacattattatatgcaacagaaacagttttcagtttgatttttcacttttgtccttttgtctgcctctctgagagataagtagacagagaaagatgtttagttttttggattatttactttgcaaggattattacggagaaggaaacacgtaacgaaatgaaaatgcatagacatgcaaattgcttagtgcttactccaccgttcattgctttattttttgttgttggaaatttggaatggaccattcctatattaatgggcctgatctgtttagagaataatgggtttcattaggcccataattttattcgaattcatcaatcttcttgatctctctattcattcttctgtattcaataatttttaagtttttctccggtcttctctgtctctctgtccattttcgtggcgaagaaggtgaatttcttctctttgtttctcctagatttctcaaaaagattgtaccttttggattctagatcttatttgatccaatgttggatcgaaattatccttctttgttctagaatttggttactgggctgaacagatcttgtttgactcatggaacaaattgtggatttttgatttgatctgattgaaatttactgactttactatgaaacaaaggggatcgtatcttatgcctgacccgatcaccgttttagattcatgtgtttgtttaaacaatgttgttgaagttgtcattttttggattctgtggtttggtttctcacgttgtttatgcaaattcatagataaaaattatatgaagatttgtgttgtttttgacaaacagattttttaaggtcttttcaagaaattatggaatctgcagggatccagcaactgcttgctgctgaacgtgaagctcagcaaattgtcaatgccgctaggaccggtatttacaagttctatgcttattctctgataccttgaatctgagactctagaattgcttaaaagtttttcatttgattggtttactcatcgttcagtgttcttataactctttcggtttctacgcgtatgtcttgatttaatgccagagttcttcatgtactgtggatgcgtttatctgatgatatagtcttaggatcatgataagagtgatgacataaagcctttggttgaatatagcatttgattgtaactttgtactcatcatggaaatttaacagttgggcactaaatgagttgcagaattacaacttgtgattgagaatctgtatgtgttttgattttcagcaaaaatgactagactgaagcaagccaaggaagaagctgaaacagaggttgctgagcacaaaaccagtacagagcaggggttccagaggaaactcgaagcggtaatgttgataaactggtttataagccactgaaaatgtggttcttttattacatcttggttctttcaaacacttgttatattgatgagaaatcttgaatgtaaaaacagacaagtggagattcaggtgcaaacgtgaagaggcttgagcaagagactgatgccaaaatcgagcaattgaagaacgaagctacgagaatttccaaagatgttgtggatatgcttctgaaaaatgtgaccacagtgaacaactgagtataatatctcaaggaaaccatcaactgtaaaatggtgtgatattttcagtggatacgttcattcctttctttatattgttttgtggaatccagactcgtctgttgctattgattttgaaattgtgtcttgaagcattgtattcatttctacagaaagtcgcttaggacttttgtgtgttgtaataaaattgagaacaaaggagcccattggattttgtttcatcaagaagattggaaatattcgaacaagaaccgtcggttgttttgcaatatcactttgtggctattttggaaaagttgcttaagaaaatatctttgtgaacaaaattaagcattatgtttgttggaaatgaggtaggacttcctgaaaatggaaatggatccatgatgggtgatgggccatcatccaagatggactaaatgatgaagaaatggagtggagggtgatgatgaagaacgatagagattttgatgaactgtgatgaatgttgacggtgttacagttagaacgtccaggatttggagtgcaaggatcatatatacccggtatgtgaatttgatcgttaatcttgatggcgttgctcaatggtaagttcggtcttcgcagattgttaggctcgtctaccatcttcactcatcagagctaaggcagtgctagttgaccggcctcttgacattatatatgttcacggctctttgtcattagttggtctttatcaggtttttaattgaaaatgttaagtaagactttttattgactgttataacaatggttttaatatgctaacgagaatgcaacatcaaaaattatgtagttttttcttctcatatagaaaacgtagaaaatgtagttattgggcaaaagaagaataaaagaatatagactagtagtaaaagcaaaaaactagagtaataataaaggaataaaagtgtgtagatgagaaaagggaactacccggtctaagcttctacgcattaaataattgacagtttccaacattatcttagtttgtgtccaagtccacgttccaatgaagtaaagaaaaatataaagggattttttctacaaaatttaccccaaaagttctaaatttgaagcttataaaaacccatcactacttttgcatacttgtatccgcagtgtatttcctcgcatctaccatcccttttctacgcctctctccctctctctctttctccatcaaatcttgttttgttcaaactctctctctctcatctattctctccatacaatacatgaatatacatacataccatcatcttcttttcccatctctagtttttcatcaatcttctgatgttccaaacgctctatctcttcatatacatacatacgaatatattattgttgtcatagatccatttagaatcactttagcttttagatgagatctagggtttctttgttttctttcaaattttgttgcatattcttctaaatcatggtttttcgcttgctaggttatagatccatgcaaatatggagtagatgtacaaacacacgctcggacgcatattacacatgttcatacacttaatactcgctgttttgaattgatgttttaggaatatatatgtagagagagcttccttgagtccattcacaggtcgtgatatgattcaattagcttccgactcattcatccaaataccgagtcgccaaaattcaaactagactcgttaaatgaatgaatgatgcggtagacaaattggatcattgattctctttgattggactgaagggagctccctctctcttttgtattccaattttcttgattaatctttcctgcacaaaaacatgcttgatccactaagtgacatatatgctgccttcgtatatatagttctggtaaaattaacattttgggtttatctttatttaaggcatcgccatggataggtgaagaagaatatgaccagttgtggatattcaaatctggtatgacttactttcttcatatctctttagattagcgaatgcaatcattttctccatttaatttttcatctttctaggttaactatatttgatttgatgaaccctagcgagtaaactaggttttcatttttgtaagccactatcattttctaaaatcgcagactaaatttacccttataagtgttccttgctttttctttgaatctctctctttttattctctgggaattggcggtttcaacaatttacaagtagggttttgtctattattttagatggctagggtttagcgtaattacaaatatttgttttaaaaaggaaggaataaagcttggcgacaaactcatgagctttgtttgctcttggggcatgaagagttaatactgcagcaacaagttcccataattttcatttattttacacttcccaattatgctcctctctcttcaatgacattctttagttatttttatatttttggtatttacatatatatcacatttgaaagtgcttcggtttctgcttttctggcctttggaagttgaaatgacagattttatcttttgttgcaaaattcattcgtttattgacttgattaattattcaaaatttgctgtaagatttataaatatataatttctaaccaattactgattgctaatgttacaaatatttgaaatcatgttaccatagtcacataagatataacaagatttatattcataactttaattacgaactatttttcctacgttcacatgttacattgatatcttcaggtcgatgtcggtctatattttctgtcacatttcacttcttctttataacatgtttctctttattatgtttgaacccgcaataattttgttgtttatatcaaaatttcttcgttttttttttcccttttgttttggctacatcatatcttgtctttaaaaggcaatgttatttaaacacaaaacctatctgttactttttttttttctaatgatagtttttggtcagcattatcttctaatgtttgtaattaatctaagcatatgagttggcccttccaatatccctaaacatcaagtacaatggcttaatattggaaagaaacaaactctagattctttacaaagtgaataaaggaatctgaaagttctttaatttatctttgattttttgttttatgcagccaaattaaaaaagaaaaaaggctaattctcctggagactatttacaacgcctaagaaacgaaggacccacgagcagcgttctttggtggaataagcggaatgatgtcgacgtagggctgctagggttttgctcgtccaatggggcgaacgttttgggcatacaagattcagtgaagatcggggtttatcgagcatatgagtgaggatgttgaatgctaacttaatcgcgagtgaataagaagtctaaagagactcatcatgactcgggctgctattggttaatgcctgattattcacatacgcataagtgcttagcaatatatgtatagtttggtgtaatagtctgttctgccaaaaagatcttttattcgttttaggaactactaagtgtgtcgatgtcattaagcatcgatataaaatatgcttaatattgaatctatagacaatagacacacacttttagagtttttttgtggaagagacatatttaggtaaactcatttgcttttgattataccccataaaggcgtgtttttagaggttttaactctagttataggtttgtgcacatgcaataaccgatcttttaaaatgaaataaaaataaaaatatccaaacatttcttaaagaggtataatagacatcattgtaaccaaactgaagtacatatgattttattttcgtacaaaacccataaaacgaaagagaccaaaccaagactaaatcatctatgatataccaaattgttgtagccaaccaaattttttttttagaactatacatctaaaaaaagacgtcaataccatcactaaacaactctaatactctattcacgtgacttaattacgaatggaacatacttgacccaacctgtatggccactacactacagacgtaattacgaattattattaaaatatataaattataattttctcataaaaagagggggaatatcatcacatccgattctcggtggagaccaaaagtgaaaataatagtaataaaggatattacttgcaaaaaaaataaacctgtgtcacaactttaagaagataaaatgttttagtctaatcaaaccttttttctgatctgtccatcggcacatctagtctcataccactctttcttctccatccatcatttcttgtagtacgatttttttctcattcaactttttaatttatttacaatgttactatggtttacgaacgtggttagaaaccaactgttcatcaaacagttgcaattggtgtaacagttgttttggatgatttgggaaattggtttaaacagttgtagaatcatgcattttgataatgaggtaattaagcaccttttctccggaacggcatggtcatttgttgcctaaacgattaccaatataaaaaaaggacacataatcataaaaactagtagcatatggagacagcaataatttggtgatataagaaaacatacgacagatataagcaatcaaacatgtcgtctattctttggtgcgctctctaaaattcaaaatagttaagtattatagtatcgactttaaaattctgttcttttacaatcacaagattaccacttataatcaaaatggtaatcttgaggatttgtgatttaactattggtgttacttgtcattggtgtgtcatcacctgaattcataaaatttctattgtatgttattgacaaaacaaattattgtatattgaagtcttttatcttttttttttatcttctttttattgttataaaacatgatgtctttaaaattttactaatagtgattctcatatttaatcaaatcagtagtgatcgttagaaaaatgattatgaattttgtatttgtaagaatataaataatttggtgctataataagatattagcgtaaaacatgatgttatttgcaaatcatagcgatatatctaattaactctcttttatattttggtcaatctaattaaatttcttttttctaattatggagttataattatgaaatttgtaaggtaaatagaggtgatacaaaggattccaatacctttattggacatatagggttgtcccatgatttgactctgtccttctacagctgtcttaattaaatcttatgcaattttattcagtatctgctaattttctatccttcaaatataaataatatatgtgtgtgtgttttaaattgaattttacatataaaacaaagagatattgatagaaaaagtggagcatggaagaaaaaaacagaagtgggaaacaaaactgcagagattccatgggtctcttgttaacttgcttcagtcttcttgtagtcttcccatcatcatatcagctgtgtcactgattttttttctgtttcctgaaaaaattgaaaatttctaagtttataaagcttactgacatcatatgatagttcaatggtaaatgaataattttattttatttttttatcaaggttggtttgttataaagggaatttaaataacaaaaaaataactaacattataaagttccactcgatctttcattcatgataacaaagatttcttctgctaaaactattttgttttcgttttgtctagaaaaatatttattctctttaggttcaccatatttacttaagatataatatgaacatgtttgttgaattctcagaatatttacatactaaataaatagttttatttggtgtaaaatgtttgttgtatattaagcatggttcaatatgttactgctgtccagaacttaaaattctgcttcaactcgatagattttgtgaatttgtgattaaatatcgttaatcgagttctctctaaccaaattttgcaagatctacaataaataaagaaagacaactaaaaaagcaagacctacaacacaatatgttgcattttaaaaataattacaaaggaataatcgaagggtggtttcaatttgggtatagaaggtgagtacctttttgttgtggtgaaatggaaacacacaactcatggctaagcagagactctctctcttacctgttttttattttattttgtttgattattttattccaaaagagtgaatcctcagttttccacatcatttgatatgaccattcagttaatttttttatatttctactttcttacatttatacactcaccaacctccaatctactttcaggaagaaaaaatgtagcattagtgagttcatcacttgttatacaattctttcttctcaaatattcaatttcattacaaaaattcataattagtcttactttcttgaaaattttccaaatcaaaatttataatttccttttcagtattggcgtcaaggattataggaaaggcaaggaattaagtttttcagtataaacgactaaagtcactaaataatcatcaaaaaataaaatcaaattcatatattgggccagtttaggcccattaatatagagttggatatatgctccatttattttcacttgtgggctcaatattttggtctgtgtacatttgttttggcaactaaaacttagttttatgagattttttttgttaatgataatataatcagctttaatactcacagtgccttagacaaattcaaatccaattcaatgttgattactattattttcttgtcaagtctaaaagtgctaaattgaactcttataatatgtaaactgctgtaatgaaaatttatccaatccttttaagtttatgttttaggatttatagagataaaatgatgagaaagcaacgcatgcatagaaaaaaacactaaagagttgactcttttttctctttttgacttttgagtaacgagttcatgccgctgattgcgctctttcttcccttccctaaataattatctctacttttcaaaattaaaagtttcaattataaatttgcttcttttttttcattttatcccaatttcattcgaaaacaaaacttgtctataacgtcttatagtacgtaattagtttataaatcaaagaaagcaaaactataatattaatatctaatttcgatatgttagaagattctaatccttaacgacactagattcatttaatcgagttataatatataatacatgcatcatcatctatttacttatggtcctacatttacttgcctttttcacttctttacacaacctcgaactctaacgaacattttcccaaagacagaaaaaaaaaacactaaagagaaacatgaactcaaagtctctcacttgctgtgttgtgttcttactacataccagtttgttttcttctacattacaatcctctcttatccacttgaactccacaacatcaatccttaatgtcactttaccacattccttgtctcaatccttagagaatttcgccctcaagacgttaaccactcaacatcataccggtgcactataccgagctatcttaccggaaaatctctccggcatcgaagtctctgtcgtccgtctcaccgggaagagtctttggaactccggggccaagttcagcaacgtgcttattccggaaaggtcagtttcggttcctcctgctaggagagtcgttatagtataccaaaatctagggaattggtctaaccattggtataccgtacctggttaccggttaatcacttctgtcttagggtttaaggtattggatgtgtcggatcaagacaatgttaaagaaataattctaaagatgaagaatcctgtagaggtttcgtttagggatctacctaaagagagggatgaggaaatgctgtctagggtaagatgcgtgagtttcaaggcacagaccaaagatgaggaagcgactcatataagccgaatggttatcccgggtgtgtgttatggttcgagccatggggattattcggtgatcgagcctttggagaacgataagaagaatgttgagtcgtggtccacctggtggtggttgtggatcgtgggatttgtattaggattcggtttattagggtttttgtgtacaatggggataagggtttcaagagcgaagaagattcaagtgatgatggagagagacgctaatgatggtgaagtgtttgagagcagatggtttggtggaagtaaaatgccatctgcagctgtaaccagaactttaccagagctcgaatccgggttcgaaagggtctcttagataaatggttgggtcttacttggttcaaacttgaaaattactccttataaaaatatgtagtcatcacttaatatagtatagaaaaagcttttactttagtcctagctgggaagctttgaatccaaaactctgtttactaaatgagtccataagcgaactatctatctactattacgccagggctatatatatatgatacattattcctttattgtttgtgacttgtgagactctgaaatgggcttttaaaatagttttcttacctctggaagcttcatacagtatgaaacatccaagtgcccatcaagtaggttgtcacacacaatcttcccaccgtgagacgctgcaacggattaagataacaaatacaactcctcctgagctgcaacgaaattccattcatacctatactttatatagaccgttctagtcaccaagcacacaaattctattattcagcattgctcctcttttctaaaaggaactagcttctaggactttctcacaatatataaaccagatgaccaaaattcgaaaataactatagctatgatctttaactaaaagccacagatagtcaataaacggttaacagttagtatgggccagctcatttaaacgagaaacccgaagggttcaagcctcaaggcctttgacacattttttttgtgtgtgtttgctaagtccaaaaacaaataaaaagcgtctttgacaaaataaaattttacatatttttgaagttgatggatttttcatttttccatacatttggtatttggatataccaaaaacaactttaaaaaaccaatttaattaaggtggtcgttttcaaaatattattatacacatgtttgatgtctctgtgtcttttatattctttttcaattgcaaaataggagttcgggttgcatgattacaaatgaattatcagcaaatccatcttattcaatcgttttccaatcctaaaatgcaaatttctctggaagtttagaagattgtaacgtgaaaagaacagagttagattatgaatccggaccatccggtctattgacatattttgatcgccagttgttgtgcacttgactttttaaatattcagattattgcatgaacgatgaatcattcctttgatataattaaagaaactaatgattacataaaacaacacgaccaacggcgtcgcagagggacgcaattgacgaattaaagatatcataggtcggcataaaatgacaagaacaatctgataataccttaattttccacgtttcaatagaattttataaagaaaaacatagatcaatcgttagctatctaaaatttaggaaataacatgtgtggactatatttaaagtatagagagacctcaatccatttgtttatcaagtaaattggcgaaatttgttagtatttaacattcgatggaactgattccttatcctaaaatgacggattaaatttcagttttcgtgaaaacccaaacatagtggtcaggtggaaataccacaagttttcatatcatttatatatcaattgaacatttcttattctacatattggatcaataagattctgcactttcaaattagtgatgatcaaaagaacgctacattacacataagtaggtatcgtccctttaacaactcgtaaaaaggggacatctacaagactactagctagtaaaaactgagaaaataagctatatttgatcatgaaacaaagtgccatgcaagtactaatgtttgggctaaacttattagatcatggaaacaagtcccaccagaccacttagacatgataaattgataagcttttcttactctacccgatgaatcttgttcttgtcttacataaatttaccaaaggtttcttatactcgtaaactttatacattaattttttggtatagagtgaaagttaaaacaccgacacggtatggtataaaccaataatacgaatgttttatataatcatgtttgagaaacgcttatcttctttttattaagttcaataactttaaatatatagtcgctgtctcttttggattatttgcttgcgcagacttctttgtttgattattctctctgttgaaacaccttttcgtttagtgattattcttttaatgtgtactagtatagtagtatgcatgttattcatctgctgaatatatcgaaaaggttaaagaaacagttgacacaattatcgactacaataagacttgcgaccaagtttataataaaattataaaatgaatttaattagtaattaacgataattttagtagttaattaattttccctccaaatatgaacaggtagttaattccgttaatcatggtggcatgtcaagatctaacccatccccacacctttcatcacaaccagctgtcctcctgccatcatcttatttgttctttggctttttcttctttttttttttttttttttgcaactagatttatcatttttcaattttattaagccagccaataagattgaagaaaaaaaaacttaaccactgaaaataaattaaaaagaattcgacactgttttttgacaaacaaaacttgatatttacggttaaattcataacgtcaagtgaatatttgatcatttttgagacgaaaatagatatttaggtttagtagttccaaacgcaagttttattatgggattatttcatggcgttatagagtttggtgactttggtctttaatattaacctaatgaatttcagaaaatatttatctaacaacttgatagattacggagtgaggaattaatcaagtaaacaattacatattaaaataccatttgcagtcttttattaaaacctgttgaatctttagcaacttttctacatattgcccaatttttctgacttgtgtctttttaaatatctcttccgtgtcaaaaatagtttgtgtgttcttgattatacgtaaattcatctgggcatctcttaattttttctaatcgttaaccttaattacaacctcacgatctgtcttaatcgtgtcttaatcgtgtttttactttatcctctttttattgcaacattagagagttttgtgtgttgcagctttatcggtgtgtaagaaaaagacttataagcaagcagttgaagtggtggttgaggtttcggtttcatttccacgagatctctttggctttcttgttgagatctttccacaagaaagtttagttgttttcttcttcctgtgatttcttcgcctaattttttctggatttaaaaacacgagaagtcaaggtgaaatattatcgaagtctctgaatctgtttttgaatggaaccatcatctggaaccggtcctgagaagagaccaaccgttgacttggtcaaggatagaaatggaacggatcagattcttcttcagaatcctagaggcgcctctgtaaaggttatagcttttgtatttattcttgtttcattttggttctcctatgttattggttgtgtttacgaaagtagaatcattcttcgatgcaagattcaggattataggataagatgttgacttttaagatatgcccactaactgttcgatgttatgcctcttccaaactcttgatacatttaaattggtccaaaaggtcttattttgggggaaaattgtgtatttggttcttagtatcagagtgtttataagcgtgtttgattgctctgtttctactggttatttgggttctgattcttgaaagttgaaggcctagttcgtagttgtggctttaaactctcttaacaagacaaatctgatagctttagatatagttttgatgttgttggccatggaaactttggcttttatgattcatggaccacattcataagcatttccatttcgcttattgaactgacggtttgtttatgattcagattagtttacatggaggacaagttctttcatggaagactgacaagggtgatgaattgttattcaacagcaccaaggtaaagaactcgcctttttcaacattctacgcaactttgtatcatatttactgaactacatgctcttgtttcaggccaacttgaagcctccccatccggtacgaggaggaatccctatatgctttcctcaggtatatagacttttgaaaagtaacatgtaatattggacatgaataatcttggttttgatcacatttctttatattttttttattcataagtttggaactcggggatcacttgagcaacacgggtttgcaagaaacaagatgtggcttgtagaaaacaatccacctgctttaccttcatttgactcaactggaaaagcctatgttgatttggtgcttaagtcatctgatgaagatacgatgaggatctggccttacaggtaggttgcaaacccgatcaaatgattttattttgattcctcgatatgatctgattcttttcatttcagcatgattaaattgctattgctcttgtttcagctttgagtttcatctgagagtctcattggcattagatgggaacctaacactgatatcacgagtcagaaacatcaattcaaagccttttagcttttccattgcttaccacacttacttctccatttccgatattaggtgaaacaccgaatttagcctctactagtctctgctgtcacataatataacgtagaactcaatacattctcttttcttttggtatttatcagtgaagttagacttgaagggctggaaactcttgactatcttgataatatgcatgatagagagcggttcacagagcaaggcgatgcattaacctttgaatcagagatcgatagagtgtacctaaattctaaagacgtggttgccattttcgaccatgagagaaaacgcacattcctcatcaagaaagaaggtctacctgatgtcggtaagatccaaataccgaaaaccttaaccgccctttttaccaagaatccagtttttaacagtattagattctcggtttgttgcagtggtatggaatccatgggagaagaaagcgagagcattgacggatttgggagatgatgagtatagacacatgttgtgtgtggatggagcagccattgagaaacccatcaccttgaaaccgggtgaagaatggaccgggaaattacatctctcgcttgttctttccacctaaaacccggtaccggttatcacaaactctgtgtctttcattatcttgtcttgtgggctattttttttgttttagtctatagaacatcacagtgtgtgtgattcgtcggtatcaaaaatccgaaatattaaaaggaaacctgagatttgaaaaggtcacccatttttaggaagtgactagatctcctggttttgtgcgagatttaacttgtgtatgaagacaatgttatatactatattgaagtttgtacttatttgatgaaatcttcaataatactagattttaacccgcggtatatcgcggggacaatttatttttttaagttagtatatataaaagtttacaaattatatctatctataaaatatttttattttatagtttacaattgttattaagtaacgtcctatcaaatccgtcccgccaacctgtcccgtaaaaaaaactcattgatctcatttatgatatgtttatgaatcattgtttaaatattttgtaattttgtagtaattaaatgctatcaaatatttgtgcggtttgatgattataatcgaattgttatagtcatgtagaaaaacaatatcaaaaataataattttgtagtaattcaatgatattaaatatattggaagttttattttagtaactaatcgtgtagttaatgtagagagatttcgggaagattttcaaatatttaattcaaaaattttatttttaattatcaaaacaaacattaaaatccagtggcagctattgtaaataaatctcaactacaaaatttatttcacaaaatggctgcaaaaatgtatatgtagatttaaagctttcttgttctcatggttgacaattcttgaataaaccatttctgagaccataagctaatttttttgggtacatatttcaagtataggaacaaaactatagtataaaataatctttatagattcaaatgctttaatggccttatactcattgcctctcaatgtggtaagatggtgtaaaatcatcataataatcatgaaagatttgaaaattattggtctattatgatgcactataaattctataattgcgtcggtcaaatatttaatacaccgaagaaatagtaatattataaaaagagaatatttattgatgccaaaaagaaaccaagaattttattaaaatggtagaagtcgatatgctttaaatgccttgagcttcattatgacaagtactacaaaacaaaaaaaaacgtatttgcctaatacatttggtaagttaaataatttccttcttaacataattaattactatatcgttctttttgttagcgttgaccaattaaacaaccggttatgtatatctcggttcagaaaacttaaccggtttaacaaatagctaatgttccgattaatttacattacttcagaacgaatcgaactttgtaaaacgaagatcgattacaaattgaaagatacagccttaatttggcattaaaaagttcaatggtccccggttcggtattaaataaccgggtacgtacagactcaccggtcaccaacctgtaaaccgtataaagaaacaatagagtcgcatcagtatcttccctcgtcactttcacccactttaatatgccaaaaaataagaacaaaattatatccgttgcttgaaaatcacaagctcttcttaacttcacaagtgcttcaatggcggttcttcacattatcttcactgcgtaattgaagaagttgttctctcttcctcttaatttcgagttgtgttcttaaaaaactccagagctgattcgattctcgagaagaaactaagccgacaataaagttcagatctggaaaaaagcgaggttaccaattctttatttttaataaatttaatctcgtagtagagttagggttctacttttcgacaattttaattaccagaaattctagggtttatgtgagtttaaattaaagcttcgtcattttcgaagcttaaagttactcactttttatgtctcccactcctgttgtattttaaaatctccagtggtcacatagaacaacttcaagattccacttttgcttttataatcagcagtcttctagaaatctgtaatcttttcgcttttttggtaccttttattttaaattaaagttcacaaattttcaccatttatatgtccatcatcatcatcaccacaatcaaattgagctaaattggtttttgattgttgtttttctccagctccagattacaaaaagaaacagctcgtttttttcactttcaaaaaaatggaagctttgaggatttatctatggagtctctgtctctctctgtgtttgattatctatggagcaaactcagatccattagaagacaaacgcgcattgcttgagtttcttaccattatgcaaccaactcgttcactcaactggaacgagacttctcaagtctgcaacatctggaccggagttacttgtaatcaagacggatctcgaatcatagccgttagattaccaggcgttggactcaatggtcagattcctccaaacactataagcagactctcagctctcagagttcttagtctcagatccaatctaatctccggcgagtttcctaaggattttgttgagttgaaagatttggcctttctttatcttcaggataacaacttgtctggtcctttgccattggatttctctgtttggaagaatctcactagtgttaatctctcaaacaacgggttcaacgggacaatcccgagttcgttgtctcgtcttaagcggattcagtcgttaaatcttgctaacaatacgctttctggtgatattcctgatctgagtgtgctctctagtctgcagcacattgacttgtccaacaattatgatcttgctggaccgataccagattggcttcgaaggttcccgttctcgtcttatacaggcattgatattattcctcctggtggtaactacaccctcgttacgccgccaccacctagcgagcagactcatcagaaaccgtcgaaagctcgcttcttgggactatccgagacggtgttcttgttgattgttattgctgtttccattgtggtgattacggctttggcgtttgtgttgactgtttgttacgtaagaaggaagttaagacgcggtgatggggtcatttcggataataagttgcagaagaaaggtgggatgtctcctgagaaatttgtttctcggatggaagatgtgaacaaccggttatcgttctttgaaggatgtaactactcttttgatcttgaggatctattgagagcttctgctgaggttcttggtaaaggcacgtttggcacgacgtacaaagcagttcttgaagatgcaacttctgttgctgtgaaacgtcttaaggatgttgcggctgggaaacgtgatttcgagcagcagatggagatcattggaggtattaagcatgaaaacgttgtggagcttaaggcatactattactctaaagacgagaagctaatggtttatgactatttcagccgaggaagtgtggcttctttgcttcatggtacgtttcactttttgatctaatgcatcataactactatcagaatcaaacccatttgctttaggctcattgtagagttgaaatgttttggttttcaggtaacagaggagaaaacaggattcctctagactgggaaacaagaatgaaaatagctattggcgcagctaaagggattgctcgtatccacaaagaaaacaatggaaaactcgtccatgggaacatcaaatcttcgaatatattcttgaattccgagagtaatggctgtgtctctgatcttggattaactgctgtaatgagtcccttggctccaccgatatcgaggcaagctggttaccgtgcaccagaagtaaccgacacaaggaagtcttctcaattgtcagatgtttacagcttcggtgttgttctactcgaactactcacgggaaaatcgcccattcacactaccgcaggtaacgctacaacccgaagtgactagactgtttcagctgatatattttcggtttaatgatcattctgtgatggacattgcaggggacgagatcatccacttggttagatgggtacattcagtagtgagagaggaatggaccgcagaagtattcgacatcgagcttctgaggtatacaaacatagaggaagagatggttgagatgttgcagattgcaatgtcctgtgttgtgaaagcagcagatcagaggccaaagatgtctgatttggttaggctcatcgagaacgttggaaaccgacgaaccagcattgaaccggaacccgaactcaaacccaaatccgaaaatggagcctcagagacttcaacaccgagtgaaatttgaatctatcaaaattctaactgttgattcatcatcccatattttacatatgaagtttgtatactcctgtgtttatttcttctctcttcggtttagaaccggttcaacaaacacatttctgtttaggaattcttggttttcaaaattcgctatgaaatagattcaaatttctgattcacaagtttgtttcatcaaagcctctaaaccagggaaaccaactgcttcagagcccaaaaagcccattgggccgatataattatacagagtcgacaaagttttatttctagtacttgtttgacccataatcttcttcggctagagcccggcctgtgatcgaaccgacaaaatggaactagtggtctcaagtaatgcgatatttggagggttctaacttctaagaagcaccacaagccagcctaagacccacatggtatcctcaggatcatatttgaatggagtttggactaataatttatgtttttcatattatctattttactgaaatactaacattttctgagtcaaaagaaaagagttcatacaaaatgttttgtcgtgaattgtgttttggagccttggaggaggaacaggtaggtggcagggattacaataggaaggagacaaataaggcaagttacaacgtgaacttgatttgtctaattccagaaaatgacgtgtccttgctgctcatatactgcaataaggcttctcttcttctttccaagttgcgaaattagaaacctaaatatatatatacaagaaaatctgaatctcaaaaatgtgtcaattttatgtaaatccttaggtccccacgaaatcggtggatcaacatgttatttgttttacttctccgctgttaaaccgacggcttagttaaaaccatttagtataatctcatcaaccaatctatcttcttgttgaaaatttaataattgactacgatatacaacttttaccaatgatacctttttggcatacgtgaaaactactacagtagaagtttatattgtaaataacattattttcctcgtgattaaatcaaacatgagataaaaaataaaataaaaattgttcattttacataggtttataaaccattgttttttctttttcaaaatgttatcctttatattgttagagaattaaagttgaatcataactttctaacgagtagagcagttcgaatagtatagtagtacactcttgcagtacttgttaaaattcatactgtctctactgatgaagaaaacaattatctcttgaatttatttttgttatgaaaaaaccaaattatcttgaattacttcaaaaataacatgagaatagtatagtagcacactcttgcagcagtacttgttaaaattcgtattggctaatgatgaagaaaacaataatcttttttatttttgacaagaaaaataaacaaacaaaaaatcttcatttaataaaaaaataacatgagaatagacataacagtcaacgtccacttgctttatatgttcctctttgccttttctcaagtcagggtcaaacctgtttaggtggtctgtcgacaagttacacaaaacaaaagataattacatgtaattttccgcaaataaacaattgccttgttaatatgttaattatcaaaatagtgatagaaaaaggtcaattccgtgcgtctaccaaaacagtgatgtggaatataatagaccaatggttcctgattttctggtaaaaactgaaaagatttttaccctaccctctatgctatgattagtttttttctaactccgaaaagtttttgatgtttttcgtataatttagcaaccttgtattaaatttgattggttgtgtagtcccttgaaatacggagtcaaactagacattgtatctcattttaactttagtcgttagcactttttatttacctttgcaaagatataaaatattttgttatttttctatggaacctgaatctttccggttgaggctccggatttatgacaacaaatatgaataaacaaaaaacaatacattatttcatgggaatatgtgaagattgtctaagtttttccacaaaacaaaaacaatggtataaataatttcatttgtataaagtttacgattctttatatgaaccattacgacccatgtctacacctttagtcatagaagtgaactggttgtcaaatattttataaatgaaaaatcttgattgttagtactctcgcgacaagtacagttttaaaacgttgtttaatctaataagtttaattagaaagactagttaatgtcatatgtataatctaatgcacttgcaaacccaacagagttgtattaaacaagtaaaaaatgattcaatgtacatatctaactggccggcaatagggtcgtgcgaaagtgttggaaagagttcgtgagtccataatttaagggttcctaattagatttaattataacacattaacgaaagatggtaatatttattgagatttgtcttcactatatgacaaaatgtgacaatcacttgcaagctcaccgcccaccccacctccactccaccactttgagtatgtgcaatcctaattatttatatatcccattttctaattaataagttttcaaaattttgattatacatatcacaacaacggccatatttcaagagacaccatcatatagtatataactttatacgtttttatatttttttgaatttataatataagtatataaccttgaaatacttcaactattaacgatttagtggaatcagattttaaaatcaattaatagcatttgatagcattggaatgttataaaccatatctagtaaacccccatgtgagtttttgtggtttgatttttatcggcttttgtgtttacaatgatatatcatgggtttacactttacaatgatatactactaattagttaaaattttgtgctttcaaaagataattacaaacacaaaaactagtgcatagtagttaaaattttaatagatgatttgaaaaattacatagagatgtcagaattaactaactcgcggtggtgcacgaggtaccatgttaattattgtgtaagaaatctcgaagatgttgcagtttcacaaaaccaatgagtaaatgcctttaaattattgtcaacaaataaatgcctttaatcagatctttgacaaaagtgaactattaacatagtgtttatgtaggtgtatgttttgatcatatttagacatagaaaagcaatcatcaaccaataacgaaaaaaacacttatttactcatatttcttatatagttctcggtttacaagtgcatgataagaaggttgaggccataaaccaactcacgcaactacagaagaatcgtctgattacattctcttttaattatgttctccttttcttgaataattctaggttaaattaacgctaatgtgttcctgcccactgaccagcgtcactgaagctctttccaggtacataatgtacattcaaactggataattggataattattgaatcttttactatttctttaatcatcttttattctccttctatacatgcgtacgcttaatctatggaaaaatcatttcaccaatcatgtgtttttttttctaattaacaccaattatatctttaaaacttttttaaaatgttaatgccattgtaggaaggaaactaggaagttaatcttgaattgtattttcgaacagaccctacttatgttatttccataaacactaaaatgacatcatttctgtcctcttcaaaaattttgatcagaaaaccatttttttcgaaactgctattaaatattttgtgaaaaggttttggattttcccttcttcttctttttttttttcatctgtcaaagattatgggttttattttaaatatacaaaagaaacaaagtaaagagagaaaaaaaatggaaactgagacgaggacgtcagccgtcacatgacgggaggaaatgaccaagtggacctgtggacgggaatagaagaaagaaaaggctcgagaaaagagaacggcgccgttagcgaagtaacggagagaagaggaagataggtcccacgatgggcctgagtgtacccatcgtcggtccaacgagtgtctttgtattcttcgacaaatatccgtacggtctcgtttctttgcttcaaatcaaactaacccttccttcttcttctttgaatataacacaacatcatcacttaatataacacaaaatttagatgtataagattttagtatacaaatcatctagaaataaatgttcagtgaccttgtaatctaacatggcagaagagacaagactcacaaccaataaacatagtatgctataattaataatctaaccaaacatactgtaaacaagaaagagagttgggaattattttagttttgaaaaagagaaaaatatcataaattcacctaaaattagtagaaagaatttaaaacttaatttgacccacaaaaaataatatctaacacttcatatatgtttccattatacgtgatgatatttaaacagttttcctacaaaaataaaataaatgatgtttcggttttgaatatacggcaggtttaattatttcgttatatgaaaatgataatcctaagcggcgtggtctaacccacacatttctcttgcgatccagtgaaaaaaaaataaaagtttcgattatcacgtaaaatttacattgtgaaatatatcgagtttctatgaacttatcgttgtctcaagaactgatgattaatgattgtgtaatgattattatttcgtggaccaacaaatttttcattatcttaataattagtgcctattattatactgatttatttccggaaacgaaattttatttgtttcgaaatgagacatatgaaaataatgttatgggattcctgaattacgtggctcgaagtaaattttgctcatctagggtttgatgcttaattatactgtagtgatttagaataatctatttcacatttttcactcagctctattgtctgagaaattttataccacatttattacaactatatatatttatcaacttaaatctaaaatctatacatcaatgttgtccggaatataacatatacataatacatgatgaattatagtattatactatagttgtttgttatgcatgtattattcaaagattcgaaattagtgatactatatatatgtacatcagtacatggtcgagagtttgttagatgatattcactgcaaatctacactaaatattcatgtgaaaataattttacaaaacgcaggtagagtgttacatgttaaacgagtacgcttaaactagtgcgtacattgcagagtaaagaagttggacaaaaactgcatagcataaaggaagcaaataaaaaatgaagggaaagacaagacataacaaacgggtacatggttcacataccctgcgatcagattgtttcgttctttggtaatgtagcatgggcttccaatatcttctctatgcaaattatattattatatcagtacgtttttaaacatttctgtaatcaaaactcaaaaataataattcaatatatatgaaaactagttgtacgaaatacaaagtgttacccgatcgtgtcaaaatcaaaaacatttcaatcatgattaggaaacttaactcaaccatacgttacataggaaagtagatgctgcatagttgaccattggtcaaagtgtttaacacttttaaagatttttaacttaatagagaaagtaaatttttattctctaattaattagaaatgccaaatatgcttgtctttaaaaattgtcagtaaattaaagtcactctgttattatacattttatagtcacataaaatctgcaagcaaataacagaaaattatcaagtactcctaatcataattaagaagtagtaatacaatgattccaaaaaaaattactgtacttttttttaatgtgtgtgtgtggcgcaacgtcctagattgttgtctgccacgttagccagcaccagctgtaataactaaaaagtggcaaggttatgactggtaaaggttaaaacagtaaagaactacgagccgtaacggtctcttgtctttcttctttttcacaacgcaacttgcttaggtgaaagtacgatactatccctgtggtgaaaaagagaacttcgcacggaggttatgagattaatcacctgctgttaattataaattattggttctggtcaaaagtaagactggaccgtgtctccggtgtcacgtgacctgaatctccaattacgaggaaattttaaaaaatgattatagaagtaattagtattagtaatacatatgtttttctctttgtcagctgccccatggaaaggcacgtcccagccgttggattggacccaattctgtaattacacgtgtcgatatctcaatcgtttgacttatgcggcattttggttttgccaagctcgttttttccggctataattagtttttgctaaaaatcagtcaaaaattaagatttcattctaattttaaaaagacaaatttccttggtcggcactaatatctaattatcgaccattaatgtcatgattcttatttgcgttacaataattactgtcgacacttgttgtagttcttagtttttgttttttatctagttttgtctctaaatttcaatttcaattaagtgtacatttggactgtaacaagcatagttttgacaattgtctttcattcatttcatcatttgacatcaccaatgaaaagttaaaaatctcttaacactaattatgaaatgtctttcatattcttgtacatatatataaaacactaaactcaaagtgtttagcaaataaaaaagaatttagatacaaatgaatcttgtccacctcccttaaacagaaagaaatatctttgtcaaaagttttttttataagatattcgaaaattaaattaaataccaaaaaagaaagaaaggagtaaacactaataatatgagacgtttcaaagatcctataaaatagtcactctctaccattacatgtgctctgccgcttttaaatctctcatcttcttcctcgtgtcactctttctctcacactctgcaaaaacattttcttgtctctcctctgcccaaattttttttctttccaggaatatttcctagaaaaacccaagcaaagctttaaccccttcctcctccaaaagtagcatcttcctctttttctatttctcctttcctcttcttatctctctctcgtttgtgaacgattccttaagaatataaccaaaagcccttttctcctttcttcaactttccgggaaaaatcttcacgcagcaaggtttctctctcggctctcgcagtgtttttcgtgccttttgttctttctataaaaaaaaaattcgcgtcctttaagaaaactttttccacctagagaagaagaagagtatcactcttgttgttcaagtttctctctttaataaaaaatccatctttattctttgtcttctttcctttttgctttccctaatctctatgttataaacacacagagagaaacaaagtcacagtctcgagtcaaaaacagagaatacgaaagaaaaatggaagcggagaagaaaatggttctaccgagaatcaaattcacagagcacaaaaccaacacgacaacaatcgtatcggagttaaccaacactcaccaaaccaggattcttcgtatctcagtcactgacccagacgctactgattcctccagtgacgacgaagaagaagaacatcaacgctttgtctctaaacgccgtcgtgttaagaagtttgtcaacgaagtctatctcgattccggtgctgttgttactggtagttgtggtcaaatggagtcgaagaagagacaaaagagagcggttaaatcggagtctactgtttctccggttgtttcagcgacgacgactacgacgggagagaagaagttccgaggagtgagacagcgtccatggggaaaatgggcggcggagataagagatccgttgaaacgtgtacggctctggttaggtacttacaacacggcggaagaagctgctatggtttacgataacgccgctattcagcttcgtggtcccgacgctctgactaatttctcagtcactccgacaacagcgacggagaagaaagccccaccaccgtctccggtgaagaagaagaagaagaaaaacaacaaaagcaaaaaatccgttactgcttcttcctccatcagcagaagcagcagcaacgattgtctctgctctccggtgtctgttctccgatctcctttcgccgtcgacgaattctccggcatttcttcatcaccagtcgcggccgttgtagtcaaggaagagccatccatgacaacggtatctgaaactttctctgatttctcggcgcccttgttctcagatgatgacgtgttcgatttccggagctcagtggttcccgactatctcggcggcgatttatttggggaagatctattcacggcggatatgtgtacggatatgaacttcggattcgatttcggatccggattatccagctggcacatggaggaccattttcaagatatcggggatctattcgggtcggatcctcttttagctgtttaataatattttaaataaataaatagttataccggccgttactaaacggaaccggagaaagttttgtataccggtgacataaaatctcggttatgttcgtaatctttttttctttgttatatataaaaatatgaatgaaactgaattaatgtaagttaatggtgataattattaacgttttaagttttgaaaaataattttcgtctgttaacgataatgggaggtcgagtttctttttgcttccacgtgctctgctctctttatctctttttaaaaattttggtcgactgaaaaattcctttatttgatataaaaattcgtttttatgttgttgttgttggtagaggcacgtgtgatctcacgtgatgagaacaattgaaaagcttttgcatctagtttttgttttcttaaggctaatcatatcattttcgaaaggctaataataatttattgttacacgattacaagctaataatccaaagtccaaaaactagtttcttgaaataaaaatagtgtgatatgccaggtagattgagactagatacgaagaaggagaatctaagttgatttgaaatatggcacatcataaaactatattttggcagtttatacaaaaattcagaagaaaatgagtaaaatataaaaatctcatgaggattaaatgaaagaagcagttggggtagttgattgtctagagcacttgaatctcactctgttttaacagtttctataatagtacgatgtaactatggttgtattgttatgcacgcataaatcaactttagttttatggttttatactaagccatattgtgtaaatctaatcgtcctgaataattagagtatgttcataattgttttttgtccttttattgtttcattgttatttaggaatagggatgttacgatgggtcaagctggtccatgccttggtttggttcgatctggttcttgattgattttggccagcggataccaagtgaaccatcaattgcaaaatgttactacctgtctatgtcaatatctctgttcaggctcgggccagcttgcttttgcatgattttggtccaccacaccatggtcttatttaagggttgatagagcttgtatgatcagtacctttaaggtgtgattctcgaagaattgttgagatgatttactttctttcatgcattgctgcttggtttgcttatttgtttttttcaattagttatctcaaaaatatctctaaaatttataaccttgtgagaagctaaggttattgtctcacgaagcaagcagtgttcgacctagatggatggtaatcgtttctatcttgtggctctattccaatggtttactatttttcctaaataccactttgttttcaatccgaaatttataccacgttacaaaaaaaactttcatagagacttagagagtgtgttgtttgataaacctttcgtgtattttttttttttttttaattattattttaaaactctacgtaaacaattttaatcgccatttctgagaaaactcaaaagcaataaccgatgtaattgataaaataaaaataaaaaataacattaaaaagattgaaaatacagaggagatgcagggaaaagagctgacgacacgtaggctagagccgcaactactcgagaaagagcattgtcgtgtcgctttcgttaaatactactgtactatctttttctctgcccgtaaggttggttcagaggctactacatttctcaggccttttttttttggttctatataaaacgtgaacttaatttcatgagaaattaaatatttccgacaatctcaaaaattacccatgcaacttgctgattataatattttacgaggaagaaaatagatatcgaaatgctttcaaacattaattacgtacacaattcaatgacgtacggctattataagaatctagatgcataactatatagtaatatgtagatacgaaaaaatgcgaagtatttaatactttgggcccctcttcccaaaatgttcatgtgaatttcgtgattattcatgcatactcatcaatagacaatatgtaatgtccattctataaaatactacattttaatcttcgagctatagaagtatttcaagaatcatcaagataaagagaacaattaagaactcaatcaaattaaggaaaaaaaataaacagtttgcagtgattcactaaattgataattcaaatcttgtgtgggttcaaacttcaaatattgggccggggggtattaaagaggtttgttgcatttatatttcgtttattcaaaaaacaaaaatagtaaacaatcacatgacttttccagtgccctttcctaaattcgtaaggcttggcttcaagatggtcatggcccatagatgtatgcatatacacaatcatacatatactatataatgtattggtgtcccctcatgcaaagattttgtttgtcacaaaattccagagctcttttacaagatttatgccaaaagataaatggggacctttcatgagagatcttctccatgattttctaattatagtactttataatatatcatgataaacaaatctttgtgacacattcaagtattcaacagtctgatacttggtagagaagtagaaaatttagaaggtaagaaagaaagaacatggtaaaagcaattctaaccattcacgtcatgagttatatgatctagctaacgttctctaactgtgtattaacgaccataactacgatgacgcgtctcagatatgaaaatggtacggctttaggatcccgtggtccatcgaatcttgaccgtccacttgggtgggggcgtaatacctgttgggccattggataagcttttgtggaatggtggaaatgaaaccaagtgtttcttagatcttaagagttattgccaaaaaccaatttgtgaaccggatcaaaccaggattctgttatatgtaccggtcggtcaacgactgtcttggccaaaacccaaaaggacatggtttcaaactttcaacggatgtttgacttcttactggtaaatcctttccgtatgcattatgccttattccgtatttattccgtattttagtttggtctatcatcagccattatatgtctttcacgtcctgatgacatattgatcttgactgagatttagcagagatgtacatacgatagttttgaaatgttttaagaatgaattctgcattaatttttcgttaagatacaaagttttacacaatacattatctaaacccatgattcaatatagaattagttttactcaaccgacattctaatataatcaaaaatttgatgtgtggtcggatagtgtacatatttacatggtcaagataagcatacaaaccgtacaaattagaggcattaacatatatagagaatgtggatagtaaaaatacatgtggaatagaaagtgagtgagacagtgtctcatgaaaagtggcagagacacattaataaatacattaaaagaaggaccaacaaagaaattaaatgatgtctaattcatcttcatatttcacgtaccatttctcgtgccattcccatgcacttaacatgtttgctctgcttctccctttcaattttactgaactaaccttccaactaccttttcggttatcttctccataatgtaacaatctaatttgagtgtgaatattgtaccatataggtgttataacgttactagttttgtgacgatggtcacggctttaataacatcataaatatccccgagattttgtgtgtgttcctctataagaattggtgatcatgtagcgagtactaatcagcttttgatcaaagttaatgttgttaatatgtgatggtttgtgtaatcaacgtttcaatattatgtacaattatttaaattattgtgtttcttctatactacatcgtcattcattaatttttttgacgatctatcatctaccaaccatccacgactataattgtatgtatatcaaatattgttctgatagtcaaaacattatgggctaattaagaagtttgaacaagagttaaagaaagcttaaaagggctttgatgaatgaactcagatgggctttatggcccattaaagattttgttcttttttgagtcgtcgcccccgagatcgtgggtgatccgtctcactggaaacatctttgtctctctgagaaacccctctttagggtttataccttcaatggagaaacagagtactcaaccaatttgcggccaagaggctctccaacttctcaattgcgtcgcggagtctcctttcgatcaagagaaatgcgtccgatttttgcaatctctcagagaatgcgttctatcaaaggttggttttttatcgctctaattactgatctacgagctcgtgattcattttttttttataagtcagttgaatttttaggacaaggtatctaaattttaaaattctatcatcgatcgatcaagatatatcgaatcgttattgtcacttatgctttatgacaattttggagctgctcttggtctctcatagaaaacttttgagaaattatcacatttttttctactactgagtaatgaatatgtaaatgccaagttattggtggagcatttggagctttacttgatacatctgtgttaataactctgtggttacacttaacagtttctgagtgattgtcatagacactaggttactctaagctaatacccttactctcgagaaaagtagaaacaatgcaatgatgattcttgagaaactacagattttcttgtggaagccattagagaatgagaaagctcactattagtctctttttataggtagcaatcaaagtaggaactggttttgttcccattcttggtcttgatcttgatgggttataacttttatgcgtaacatggatccttacagaatcacgtttaagtgcaaactagtgaaatctctctatttctcattgaagtttttggctttttgttttgaacaatgaatgttacagaaagtaaagaagttctcgataccgagtcaagatcacgactctgagggagcagcttcagctacaaagagaccttcataacgttctttgttccgattttcttttatcgtttgagttgtaatcatgtaattgattttaatgtcatgccttggattcataagctgggtcatgccttgtttcccctttgttgtcttgtatgttgaatattgcaaactctaaagagcatatttataagaagaaataaaagtttctacatttgactttccctcttattttggctaatctctcatcctcgatcgctaacttattcaaatcatctgttgcaaactacttctttactaccgtgttgtcgatttcattcgtacagattatctttttcgttgatcagattctcttattgctcatcatcttcagatattcattaaagaacacagaacatgttcaatcactaaactaattctttttcaacggtttatggaacaatgtgagagtagatttaagatggaatctgcttctcttactaccttattatgtgatactaaatccacttaacatactaactttcatatcttaatctccttactccaatagcaagaacaatgcagcggatattcatagtcatatacacctactagaaataaaagcaacaagaactactaacttaaaaagatttgaaatttcccattatcaccacttctgactctgtgcttcttctccatctcctaaattgatttcagatcttgatcaaagaatgaagtggtcatgatctgatgagttaatgagtcttccttttctttgtcttcggtttccatcatcgtcctcactagtcgacatatctgcatagagatttagtcagagaacatggtttgatagagtaagtggacacaccacatatcaaaaacactaaaatatccctctttgataactattcttcacattaggtctatttgcactacctgaatccacaccggtttgaacatcaacagacattatgtattcgatactcctttcgacagtctttagcttcttctccatttcaccaaacttgttctcccacttttcaatcacttccttcttctccaatgcttctttttgcttagtcaccagatcttcaacagtgaatccatgagttttctctagcaactcgagcgttttaattaggctctcatgctctatcaccagactctcatacttgtctttcaaaatcatgtgttcagcaaatgaaacattttcacacgatttgttgtacttgttcaccaattggtccaaacgactagacattgttgtctttaatcaattcaagattaacctgattaacaaaaaaaattggaaatgtgtccttaaaaagagaaactttaaaatctacaaaaccctaaaactcagatctttattgagcaaccaaaaacaaaactaaaatgttagagacagtccacaagattcggtctttctcaaacggattcacaccatttttgtcctaaacccaaaccggaaccaaaagaaacagagaaaaaaaggatttatttttcctgagaaaatcttactcggaaaagaaaaaagtcgatctttttctcagttacaaagaaaggagctcgggtcgatgatagagactacgcgacaaagatggaatcgtatcaatggaaccctagaaaacagagagcgggaaaaggcgagacgagtgtttagtaacgaagaagatgatactttatttcattttccttgttcaaaaataatatttaagttttaatctccaccactcatttagccaagtggcccaagcccatcttcaccagttgatacactcttcttgtctccttcaactttactttagtgattggttttagtgattaaccatattccagattttatatgcagagacttagggtccgaatggtaaccgctgtttttgttgtgcggggaaagcgttattacactgcggtacggttcaactgcggtacgtgcggaagaaatatatttgcagaattagtgcggtttgtacaaaataaacggtacaaaataatgtttgattggtgaaaaaaactacttgcagtgcggattataaattatatatatatatattaattaattatttttttgtgttaataaataaacaataacaaatatttataaactactaacacaaaaattgatcaaaatataaatttaattttataacaaacatatcgttacatgtgttgactaatttcatcataaaaatatttaaaaaatattatttattaatttgattttcccataacatatttgtaatattgtctcttatttgcgtcatatgttttttatttgttatctctgttacttctatgtcatctaaatcatgatcaaaatctctattatttttatttgtctctgttattacatttgcaaaatctgcatctgaaaagtttgaaattatgtaatctcattatagccattaccactttttttttaatacgaacattatattttgaaaaatcagaaagaatcctccatttttttttccaaactccaaaagttctctatataatagaacctaaagaaaagtatgatgatgtcgaaaaaagagagagaaaaaaaaagacaggttataataaagcgaaagaaaagtttagatatgtttatttgggtaaaaaattatatatataattataaaaatgcttctaataattaaaaaatacaataaaacatatgtgtaaaatttactgcggaattggttggaccgcatgattatggaagtttgttgttttcaaaagcggtctgtaagtttttagcttattttgaaaaacgcgaatagtgttttgatagaaaagtaaaaaacgtgtatatgtaataattaatggtgattggtaacaatagtgcggtttttcgaattaggtgttgaaatccgcaatttttgtgtcgccaatcacaaccttatatacaatacctttgcttgaagacctttccgtttgaagaatgctttgagggcaatactggagttaatccctctcttgttgaagcactctatgattgcagaagtagagtgcacttggatcaaaaaaggtacaaagtcaaaaaacatcattttgaggccaaaaaaaaatgaggaccttgtacttccctgtcctaagctataatcatctctatcttccaagaggaataaacttatcatcagattcaatgaatatcataaactagctagttatttcaatttttgtttagttgttactatatagaacaatctgaaagtagattaatgatgcaagctgcttctcttacaactttgtgttgggctaaatcacttattacacagttacactacaaactttcatatcttatcaaccctcctagtccatcagagagactcatagtcatctacttctactaacttccaaagattttgaaacttccagtttcaccaccacatctgacattgtgcttctccatctccacatcttgatcacaatatgaaggagtactctaaattcttatgtgatgagttacagtttcctacattgctttcactttgggttctttcatcgtcgtcactaatctctatcacatctgcaaatagaaacatgtttagtttatgtaatgctaacacatttagttagacacatatcaaaaaacacttaaaattaccctcttgtgattcaaacttgttcacattacgtttgtctgcaactcttgcaccacttggtcctgaactcataccattcatcacagtttcttcacaagactttaagtattcaagatccttatcaagcatctcttgcatcttcttcctttcaccaatctccttgtcaaacttttcaatctcttctttcccaaccaatgcttctcgctgcttcttcttcactaaatcctctaatgtgatttcgtgcttctctataagctcgagtgttttgattagggtttcatgttctttcaccagattctcgtgctctgtcaccaaactctcatatttctctttccaaatctcgtgttgagctagtggaacattatcggaaaatttgttattgctgttcttctccgattggttcccaagactagacattggtgttcaagttcaagcttaagcctgtaaataacacaaaatacacaaaaccacaaagattttctgagaaatcactcgcaaattagaaactttcacacagtctcactctacaaaaaccctaaaccccaaatctccactgagctaccaaaactaaaatgttcgcaaaaaatcgaaagattcagactttctcaaaagtattcctatcagtttctcccaaatgcaaactgaaaactaaagaaacagagaaaaggagttttcccgagaaaatcttactcggaaagtaaaattgctgatcttttctcgatcacagagaaataagctcggttagatgagagaaattgtgcagaaaaggtcgaatcgtaacaatggaacacagattaatgagccctagaaaacagagagcgggaaaagacgaaagcagagagtggaaacgttaacgaagaagatggatagttaactaaattaattatcattattcaaaaattaatatttattttagtcccaaatcattagcccagcggcccaagcccattatcaatcaaacaccaagtattgctgtctgaactctttttttgcctttccttgttttctactctttccatgttaattaattacacttctggtctcctaattaggtgatccttcatatcaatggatttgaatgtatttatatgagatgatattgatcataaatgtctgaaaatgtgcttcaagttttggaaaaagatgtataacaatatcgttaaaaaatttacaaatctgagtattttagtgtaattaaactaactaactaaggaaatccttttataaaatagtgtttgaaggaattgaaacaaacattatatcaccagtctggttaattgtgtgatataaacagattaatagattaatacgtctctattcattattttactgtatggttcttttttagaaatggtcgaatgatttagtaacatataataaagaaaagtccccagagctttggtcggtcgaataaacataacacacaaataccaaaaaggcaaaaacaactcactgaactgtttgcatatcttcatcttcttcttgagatgaagttgaagttgtcatcaatctccatgaatcataagaatgtgcttctcatcaagctcatctccgctattctgatatcttttttcgcgttccgtctcttcattctccactccagcgagttttctccaatctttgcgtcggtcaccggaaaattcgaagctcggtttctgccgccggagattatcgtaccggaaaatgaagatctgattcctcaaggtaagatcagttatttagaaagcaaaagtatttgacttctatgtgtattgtccactgtgtttgactgtttgtgactaaaccttgttttgtgagcacaattatgatttatgagatctaagggttttggatctacaagatttaaagctctgtttacgtttttttttagattgtggtttagagaatagaaaaaaggaaatgacaattcatggatcttgctcttctaatttaaagttattcttgtggtgacttgtatcatttgataagtgatgctaattagctgcaatgttcaaagactggtttctaataaattgatcttggactagtgttacaacattttgtatcaaagttgatctcacattgagacttaattttttttttgggtggttgttgtttcttgaatcagatattgaagtagagaagtgtgatcttttcgccggaaaatggatcccagattcagtaggaccaatctacacaaacaaatcatgcggatcactcattgacggtcaccaaaattgtatcaccaatggccggcctgacttagattttctctactggaaatggaaacctcatgactgtttgttaccacgttttgaccctagaagatttcttcaacttatgaggcataaatcttgggcatttattggtgactccatatctcgtaaccacgtcgaatcactgctttgtatgctctctacggtataacacttgcttgcttttaacatatctttgtttcgactttttttacttttcaagttcttgagaaactcatttttgtttggggtctctccagattgaagaaccggttgaagtataccatgacatggagtacaaatcaaaacgttggcatttccctttacataaccttactgtatccaacatatggtcgccatttcttgttcaagccgctattttcgaagattctaacggtgtctcgaccgcttctgttcagctacatcttgatagactcgatgagacatggaccagtctcatgcctagcttcgactatgcgatcatctcaaccggtaaatggtttcttaaatccgcaatttaccacgaaaatgcaaaactcgtcggttgccataactgtcaggaaaaacctcacatagaagagttaggattcgactatgcttataacgcatcgctgcataatgtcatggactttctagcagctgaagataacagtaaaggcacggttttctttcggacttcgactcccgatcatttccaaaacggggaatggcatagtggcgggacgtgtaagcaaacagagccggtgagcgatgaggagattgagattaaggatgtacataagatactaaaagatattgagattgatcagttcaagagggcggttagagagaagactaaccaggacggtgggaatctaaagcttttggatttcacccggatgttgctgacccgaccggacggtcatccgggtgagtaccgacagttcaggccgtttgataaagacaaaaatgcaaaggtacagaacgattgtttgcattggtgcttgcctggtccgtttgattacttgaatgatgttatattggagactatagtaaatggctgagaggcacacaaaatgtgattggtacatggccagtggaaaaccggttctatggaaataaatagactaatactgaacaaatttgtgtgaattggaaacatgtaaaattatgtaagaaaaattgagataatgtgatattgattcttgggagctagccggtgaaggaagcataaccggtttggtaattgagttaattttttccggttttgtaaaatcattatttatgtttttttctgtttacaccagattttgtccggttgaaatcggtttagatctcactgataaagtgataagagttaacatttcttaaagataaacaaaatccctcaaaaaaggaaattaaagaaatattcttccaactgttgaaaattcaaaaagattaacaatttacaaatatatcctcggacgccaaagaagtatcaaatccacgaaatatttttttgaatttcgaatttatcagaccgttgtgtttctttctatataaccccgaagatattttacggaggctccacctaaaattctcaatccctaaatttcgaaatctcactctctctcattttcgactttagaaatggcgaccaacgcagatccagctccgacgaagaaaccaaggaacagtagaaaggcgttgaagcagaagaatgagctcgtggagacgccaccatcgcctgtctccgtcaaggggaagtcagcgaagtctttcgagcaagatctgatggagatgcagacaatgttggagaagatgaagatcgagaaggataagacggaggagttacttaaggagaaggatgagattctgagaaagaaggaggaggagctagagaccagagacgctgagcaggagaagctcaaggtggagctgaagaagcttcagaagatgaaggaattcaaacctaacatggtataatctctagatctagcttttagttctcgatttggctgggttttgtgattatattggaatttattgattgatcatttcagattttggcttgatagtcagtttctagatctaggtgtttagattaggttggaatatatctggtttatgcttattccgaatgtgttattgatcatttgagattttgttttgatagttgatcaaagtttcgtcatagattcataggttagagattagaatctaagtcagagtcaggattggttctcgtttagtgtatgatgcgtttgttgttgacacagttgctaatatagtgatatgttcatttcaattgacaattccttgttatctgttgttgatgatgagaaaatatttactggtttctggatattgattcgagagtgttttgtgttttttgctcttcagacttttgcttgcggtcagtcatctctcacacaggctgagcaagaaaaggcgaataagaagaagaaaaaggattgtcctgagacaaagcgaccatcgtcctcatacgttttgtggtgtaaagatcaatggactgaagtcaagaaggaaaaccctgaggctgacttcaaggagacttcgaacattctgggggctaaatggaagtctcttagtgcagaagataagaagccttacgaggaaaggtaccaggttgagaaagaagcttacctccaggtcattgctaaggagaagcgcgagaaggaggccatgaagcttctggaggatgaccagaagcagagaactgcaatggaattgcttgatcagtatctcaactttgtccaggaagctgaacaggacaacaagaagaagaacaagtaaaaaccaaaagtcttagtgactatatcaatttgatcatcaatagtaaactaactagagctgtttatggtttgcaggaaggagaaggaccctctgaagccaaaacatcccgtatctgccttccttgtttatgcaaacgagaggagagctgctttacgcgaagaaaacaaaagcgtcgtggaggtaaatctaattacttaattcgttctccagatcagtttttgtcaaattgtgaagctaacttatggagtttaaatgtggttataggtcgcaaagatcactggagaggagtggaagaacttgtcagacaagaaaaaggcaccctacgagaaggtctgtttccatacaaatatgcttgcatttcactgccattaaagacttaagactgaatgattgaggtattcttgtttaaataggtggcaaagaagaacaaggagacatacctgcaagcaatggaggaatacaagaggacaaaggaagaagaagccctgagtcagaagaaagaagaagaggaactcttgaaactccacaaacaagaagctcttcaaatgcttaagaagaaggagaaaactgataatctgatcaaggtaataactctctctcactcacacttaactcaccaaggtctatttcaactcagagactcacaggatcataattatttgtctcttgcagaaggagaaggcgaccaagaagaagaagaacgaaaacgttgaccctaacaaaccaaagaagcctgcttcttcatactttctcttcaggtatgaacttacttcaagttataatccgaattggtctttatagaaagttcctaacttatcatgtttttacagcaaggacgaaaggaagaaattgacagaagaacgtcccgggacaaacaacgctactgttactgctctcatttcactgaaatggaaggtatgaaaaatcacaattactagcaacaaaacacattggcttgtaacaatttcctgttgttaatctatctgtgcgaatacgtctttgcaggaattgagtgaagaagagaagcaagtttacaacggaaaggccgcaaaactgatggaagcatacaaaaaggaagtggaagcttacaacaagaagtctgcggctactaccagtagctagataaatctctcttagtattgaaatcatgttcaagtcctgttgaacattccttattatgcatcgttagattactctaagtacttttatgttttaactctcgctgatcattacttactagttactatctatttctctgttacaaattttaattaataataaatcgactcgtgtaaaaacgcggggaaagttgtgtcaatctcgaccgttggattgaaccagtcaacaacgtcgaagatcggagaactctccacgtggccgaactcgccgttgatagttccgtaattgtaaaacggcggcgtatcagggaacgagaaaacgtctttaccatcatcaagcccatcggttcgaacggttaagttggatttaagactctcgagaatatcctttggcttttgggtaatggctggtttgactctggtgtcttgtcgcttctccggcgaggctaatggtggtgttcttgtgatcgcctgcgaacaagtgtgtgttcctctgtacgtcacttcgaaaaccgtagcatccccgtctgatctctggacttgtttcgttgcccaacagttttgtgtgctacgatgtgtgcatctgtaataactccttgggaatttggcgcctaaaatgtctttttgaccatattttctccagctaaagacatcatcttgaggtccttctaagcctctctctgggcttattctcactttttctgaccactttggtaacatctttctgcaaaaattacccaaatttcaaattagtttctagaaaaaatgagatttttaaattcaatttggtgaattgtgaaaaaagatatcaacaatttgttaccttttctttgaattgaaaatgtaatcttggcgatgatgactctcgctagaacctcctccatcggcaaactcttcacttctcggacttccgtttatcgatgccggagattctggaacactgccgggatttgccaccgggactacagtaaccggcgtcggaataagttgtacgctcggtgaggatgaccagtttagcagaagaagagatctctcgtaggaagaaactatctgcttcaccagaatctcgttagtctcagcaacagccgtcgccggtgatgaaaatgatgacgacggcgacggagcttctctaagtcgtgcctgaagctttttggccgcatcaaatccattgataagctcgcttagcaatgtcttttgctcccaacttaacatatctcttccttccatttttagtatatgattcccaaaatagattttttttttcctttaggtagtttactctaggaaattgatacaaactatgatgagaaagatgtataatgtgtgttttaagtataaatcaagaattggttatatagatggactgaaagaatgatatgatcagaaaaatataatgtgtgttgagtataattaagaatgggttatatagattgaagaatgatatgatgagaatgagagtgttataggattggtgataaaaatggatgagtgttggtttggtatataaaggcattggattttcagtgtttgaaaatttgaccaaatgaccaaaccataaataattattttatttctttttaaaagagagacaaaactttcaaattgaagaaaagtctttggtataaggaagtatagggccagagtgtaattgataagtggggtggtggtagtgaaagagtataaggtcaaaggctgaccaattcaacatttcaattttgttaatgtagttgtaaccaagtttatcatttatttaactatagtgggttaattatataattagacaacaaagggttatacaactgtctctttcaatgtacactttcaaaactacgactttgtacatgtgattaagattctctattattatatgtttttttctactgttaaagaatttccaatatatgttttttatttgattaagaatattttcaaaatatgttggttgatgctttactagtatgcattatgcaacaacctttctatggataatatttcattgctataactatgaattgtaatgatgtttaatatcattaataagggaaaggatattccacattctgttttaagtacaagtatcaaaacacatattggtaatttggtataatacaattcttattaacattcaatagattagcaataacataaaaattatgttgaatgaaatttactaagatttgattgttctagttttaaaatcatacacttctaaaaataagatataaaataaaaatctgatgaggattaattaatctgtacaaaatttcttcctaaaaacccctatatgtttttgttttgtgtcaatatatttaagcatacatttgttcaagatataatattgtattaacatgaaaaaatataaatttgtttggcaaagaaaataaataatagttgcagtctaacaatataactaaataatatttaaaatggtagttgcttatacatatatagtctgtgagtgattatgtgagctatgtcaagttgttaactgtttctaaataagaaatattaaactcgagaggggaaaataatacaaatgggtttaatttggacaaatatatatgatatgttccataagaatataatctacaaagttatgtgataatacaccaagagtatgacaaggtttttgctgaccaagtcaccatggaattatctcaaatagtcatataggtgtgtgaataaatatttatttatggttgagacaaatggccattaatttggacaaaatttatttatacataatgattgatatgttccaaagagaaaagtagaaaaaaccagtcactgtgtgatacgatatatacaatacaacaagagtatgataaggtctttgctgactaagtccaacatcaagctatctaaagtagtcagatcgatagatgcattccattccaacattcatttcttatgattaatcctttttaactttgtatgtcatcaaatattattcaattgtaatttggacctctcatacgtaagaaataacctttgtaataattgaaccgttatccaaaaagttacagcaaaaatctcatagctgaagttgacacacacgagtgtagtgtacaggaccaataaccactaaaaggtttatgaaccatatttaccgttttactaatgaaatggttacttttttaaatttgttttgggtcaaaactcactcatgggaatgggattaccaaaatcgttttcgatagatttgatttgcgcaaagtatagtgtagaaataatttgttttttgggtcgatattcataacatacatttatttatgtaattttacttcaacgtaggccttttacaaaaggaaaaaaaatcacttcaacgtagaaaaaacgtaattccaaaaaacagatttgttgattaataaaaagcaagaaaaatcaaaaagaaaatcaatattcaaaaggacaggattggaccgaagacatttcaaacctctctccgcgtggattttcccttttatcattcttttttgttttctagttttagtactccaaatgatattttaatttttataatggcgtcactctcttttgcgtcattcattcattgtattattattattatttggatctcattcatcattcatccttataaaatgaatcttggcactttgcaccctaaatttgtatttacacttcatagaatcagctgaaattatgtaatttgacatatttgcatccaaaacataactcttgaaatctttgaatcagctcacaagataatgacgtaagttgacatattatttctgcattgcttcattacaaaaccaagaagattttttttgtatgatctgtaaactttacggcattaagtatcgcatttatttctaattacgcaacagtattttgtgtgtgtgtgtcaacgctgcacagtatttttagtagaatgaaaaaaaaatataatttgctatgccaaatatcagtagccaattggactcgctaaaaacagcaataaattagtaaagtaggaaaatgccaaacaatttaaaaaaaactcatgtacggaaaaacattgctttcaatccctttgatatagtcaacacatattcgacattttcacacttaaaataaacttattatccttcaactttaactctttcctcactaattcaaattattgaggtacataaatagatatacgcattaaatagcctaactttagtttcttatctacaaaaccaatggagggaaaattataaataaataaattaattatcttatgttatcaaaaaaaaaaaaaagaatagatttcgtgttattttaacaaatatcatgttaatttatctaatctcatgttattccatatactgtaatatcaatgctatttatttagacaagtgataagacgtgctgtcctctgaataatttggcaatgttacatggccttcttttgtcaaattattactcgagcctttgtagtatcgagcccaactgtctttagagccggtatatgtccagtataccatcaatcttactgttataaatccaacttcttttttcccagaaacttgagcattcacaaaaaaagacttgcttattttgttaaactttcttcatttttcaaattacaattcattacataatttttttaaaacatacaaagtacaaacatatatataaatggaggaactgcaaactggagataaattatttcaaaaaaaaattgaaccaaagaggtaagaacttgctcagaagtttttagaatgtggaagaacacaaattagacccgccggtagttctcagctccgaacacggccaaggactaacctttagtgaagttccactgacatccgaacacttccacgtcttatacgaattcaagcttccatgtagattaatctcactcaaacatatacccgtaaatggtgagcccttaagaccttgaatagagccagcgtttcgaacgttaactccccaaacgttcttgatatgtattcccttaacaactggaagagcgttcgggttataattctcgtccggatgatctcccgtgtcgccggcgatcttgatcccatactttgcggtgtctacatagacgtctgatattttgatgtttttaatgtatcctccacgaccaatgtttgtcttgatgttgactccaactcccatattggagagagtgatatgttctgctataatgttcttgattcctcctgatgtttcgcttcctattgcgatacctgcgaacggggaagatcctgtgatgcggcggattgttatgtttgagcttggacggccataggcgattccgtactggtcccaaccgcttttgatggccactaggtcgtctcctgttgagatgtaggagtcttctatgcagacgttgtagctggaatctatcaacaaattcattttgttcagatgttaataaacagctttgattattatgcacacaaaaacatttccaagttcatatctagacatgtttgatcacagcaaccaatctagtagtctactgtggattggaaaaagagttaagagtaagatgaacctggatcgattccatcggtgttgggagaatcttgtggagctaagatcgtaacgtgatggatgacaacgttgctgccacggatcaaaacaagtaacaaagtcaataccataagaagaggaagatatattatatctacgtttgggagatctaaagggtattaactagtgttatatacctgcaatacacaggatgaatgttccagaaaggtgaattttggaaaataacattggagattatgatctccttagagtccttgaactcgattaagttcggtcttgtgtactttagcgttctactacgccacatgttccaccacacttctccttgaccgtctattgtcccattttgtcctgtgtacatagtgttgcaatttaatgtcaaaacagtgctgcaacaagaagaatatttcttgtaacaaaatatctattttgaactgtatcatctaagccatatagatatgactgaaatataagatggtcgaaactaaccagtgatgactacatcacgaagcccatcaccatgaataaagctcatataccgtccccctggtaactctctccctcttccataagacggcaaaggatcaatcaatggccaattccaggtatcctgaagtcaacacacaacaaaagccaaaaggtcacaaaacaattcacaagattcccactctgcattaatcacccaaatttcaacgaagtggccttgtcctcatttctgtctcaggacaaatgaaatggtcctgacttattaatgtttacaagctcaaaatcggtcataaggtgcacacacacacacacattgatatgcactacaatgacaagttttgtgttttttcttcactcacatgaagacaaaccaagcagaaaattaaatctgagtatttaacatagatggcagcatcctacttcattgatctgagatactcactaaaggattatgaaacccataactgtccagagtcccataaaacccataactatccacagtcccaactatagaaaacactctaaccaagatttaatctactttagtcacttagatattttctttaatatatcacatacactagtagagaatataataaccaaattttgacaaaaattggataacgcgaagacaaaatttgccagctatcttcgggtcagctattgaaacatagacataaaagcagtacaccacatgcatacaataacattttatccccgacggtcccatgatgctttggagcttggacctaccaataccaaattccatacccatagttattactacttatcaattattatacgtgcatggttccccaaatcttctttcttctttcaaaataaaaacttgatcaaaaagatgacattttgagaattcactccaattcagatccaatcaaataggcaaaaaaaaaaatgcaattctatttttagaatactatactttataaaaataataactatagtcaaaaaaatttgaaatgtaatcactcacagtatttgacagttaatcatcaaactcatttccagagagtagatatagaccactcaccaagaaagattagtaaccattaattcattaataacatttgactaatgagctaatttcaatttcaaatcagcaactaacgaattcgtcactcattactcatttcaaatcatctcataccaatccaatttcataattcaaaattcacagtgataaaccagaaaatttgaaattttacctgaacagctctaatcacagcacctttagctaagtaaagagtcatatggctagtgagattgaagctctccgtcaaatacactcccggaggtatatacaaaagcgtgcctcctctcctcttcagatgctgaatccgataaatcgccgccctaaacgccttagtattcaccgttcgaccatctccaacgcctccaaagtcggttatcgagatcttatcgtaccggtaccgtaacggaactataccggaacacgtcgcctccgaatcgcccaacgaagacgaagaaacgaagagacatgagaagaggaaaattgacacagagagtctccacattttcgatgaagagaggtttatttaggatgagagtaaaatctgcagaattggagctaagattagtatgatatagtcgacactcgacaacgttcaatagaagaaggcacgtgctgatacacgtgaatcaacgggccatataagctagaaacgtttgggctttagtggcccaataaggatgaacaactttttgttttttgtttttggcggatttttttaattctttgattttctattttatttagggtttttattcttattatataaaggttggatcggtttgtgaaatttggagctaagatcagagatttcagcgatttggagattggagatggagagtcctttggtgcgtctatgcttaaaggaagcttgtaagagcggagatgcggtggaacgatggcgacttcagcggcgtagtcttgagagtctgcctcctcaccttgctgatgctctcctccgtcgcctcctcaaaaagcggcttcttttcccttcgttactcgagtaaactcttcacttccttacatagttctgatcgtttctaatatgaatctgatttctgatctcgaaatgctgagctatatatatatatatatgcttcgatttgagatattgagtgatcgcttgggatcttagtttttaaatttgattagaattttttttttttctgtattcatgttgaaataattattcctgaagtgtttagctgtagaattgtgttggtcttggtacatcgttgcggaaaatgcaatgattgcatggacactgaactattgtatctgtatcacacaactaaacaagactcttttctgtgcagaggattcaaatattctgtagagaatatagatctccgaggcaaaagctcagttaacgcagaatggatggcttacattggaggcttcgttaatctaattactctaaatctttcagattgccagagaatcaacagttccaccctctggcctatcacaggtatgttgagtgatatactccgagttttggaatggaagtttaagagaaatttaagtgtttaatatgtgatattggattttcaggattaacaagtttgacagagttggacctttcaagatgtttcaaggttacggatgctggtatgaagcacctccaatctgttgtaaatctgaaaaagttgtggatttcacagacaggtgtcactgaagttggaatttctcttcttgcttcacttaaaaaattgtctcttttggatttgggcggcttacctgtaactgatcagaacttgatttctctccaggtattacctgtgctctttctttattgtagtcattagggttgttttaattgcatgatgtatgttattgaactgtgtagttcaatagttatcatctatctatctagttaaatttgttagagagctctgctaaaattgtaaagttctaggtactactactatgttgagtatagagtataatgtgcacagaaactatttagtcttcaggattctaaaattcaaatatcatttcctggttattaaacccattaatccctacaaatgaagttcaagtgtatgttcaatatagtttcttgcgtgaagatgtttgtatgcccgaattc

SEQ ID NO: 618 - DNA, 89826 bp, Arabidopsis thaliana
aagcttcagaagatgaaggaattcaaacctaacatggtataatctctagatctagcttttagttctcgatttggctgggttttgtgattatattggaatttattgattgatcatttcagattttggcttgatagtcagtttctagatctaggtgtttagattaggttggaatatatctggtttatgcttattccgaatgtgttattgatcatttgagattttgttttgatagttgatcaaagtttcgtcatagattcataggttagagattagaatctaagtcagagtcaggattggttctcgtttagtgtatgatgcgtttgttgttgacacagttgctaatatagtgatatgttcatttcaattgacaattccttgttatctgttgttgatgatgagaaaatatttactggtttctggatattgattcgagagtgttttgtgttttttgctcttcagacttttgcttgcggtcagtcatctctcacacaggctgagcaagaaaaggcgaataagaagaagaaaaaggattgtcctgagacaaagcgaccatcgtcctcatacgttttgtggtgtaaagatcaatggactgaagtcaagaaggaaaaccctgaggctgacttcaaggagacttcgaacattctgggggctaaatggaagtctcttagtgcagaagataagaagccttacgaggaaaggtaccaggttgagaaagaagcttacctccaggtcattgctaaggagaagcgcgagaaggaggccatgaagcttctggaggatgaccagaagcagagaactgcaatggaattgcttgatcagtatctcaactttgtccaggaagctgaacaggacaacaagaagaagaacaagtaaaaaccaaaagtcttagtgactatatcaatttgatcatcaatagtaaactaactagagctgtttatggtttgcaggaaggagaaggaccctctgaagccaaaacatcccgtatctgccttccttgtttatgcaaacgagaggagagctgctttacgcgaagaaaacaaaagcgtcgtggaggtaaatctaattacttaattcgttctccagatcagtttttgtcaaattgtgaagctaacttatggagtttaaatgtggttataggtcgcaaagatcactggagaggagtggaagaacttgtcagacaagaaaaaggcaccctacgagaaggtctgtttccatacaaatatgcttgcatttcactgccattaaagacttaagactgaatgattgaggtattcttgtttaaataggtggcaaagaagaacaaggagacatacctgcaagcaatggaggaatacaagaggacaaaggaagaagaagccctgagtcagaagaaagaagaagaggaactcttgaaactccacaaacaagaagctcttcaaatgcttaagaagaaggagaaaactgataatctgatcaaggtaataactctctctcactcacacttaactcaccaaggtctatttcaactcagagactcacaggatcataattatttgtctcttgcagaaggagaaggcgaccaagaagaagaagaacgaaaacgttgaccctaacaaaccaaagaagcctgcttcttcatactttctcttcaggtatgaacttacttcaagttataatccgaattggtctttatagaaagttcctaacttatcatgtttttacagcaaggacgaaaggaagaaattgacagaagaacgtcccgggacaaacaacgctactgttactgctctcatttcactgaaatggaaggtatgaaaaatcacaattactagcaacaaaacacattggcttgtaacaatttcctgttgttaatctatctgtgcgaatacgtctttgcaggaattgagtgaagaagagaagcaagtttacaacggaaaggccgcaaaactgatggaagcatacaaaaaggaagtggaagcttacaacaagaagtctgcggctactaccagtagctagataaatctctcttagtattgaaatcatgttcaagtcctgttgaacattccttattatgcatcgttagattactctaagtacttttatgttttaactctcgctgatcattacttactagttactatctatttctctgttacaaattttaattaataataaatcgactcgtgtaaaaacgcggggaaagttgtgtcaatctcgaccgttggattgaaccagtcaacaacgtcgaagatcggagaactctccacgtggccgaactcgccgttgatagttccgtaattgtaaaacggcggcgtatcagggaacgagaaaacgtctttaccatcatcaagcccatcggttcgaacggttaagttggatttaagactctcgagaatatcctttggcttttgggtaatggctggtttgactctggtgtcttgtcgcttctccggcgaggctaatggtggtgttcttgtgatcgcctgcgaacaagtgtgtgttcctctgtacgtcacttcgaaaaccgtagcatccccgtctgatctctggacttgtttcgttgcccaacagttttgtgtgctacgatgtgtgcatctgtaataactccttgggaatttggcgcctaaaatgtctttttgaccatattttctccagctaaagacatcatcttgaggtccttctaagcctctctctgggcttattctcactttttctgaccactttggtaacatctttctgcaaaaattacccaaatttcaaattagtttctagaaaaaatgagatttttaaattcaatttggtgaattgtgaaaaaagatatcaacaatttgttaccttttctttgaattgaaaatgtaatcttggcgatgatgactctcgctagaacctcctccatcggcaaactcttcacttctcggacttccgtttatcgatgccggagattctggaacactgccgggatttgccaccgggactacagtaaccggcgtcggaataagttgtacgctcggtgaggatgaccagtttagcagaagaagagatctctcgtaggaagaaactatctgcttcaccagaatctcgttagtctcagcaacagccgtcgccggtgatgaaaatgatgacgacggcgacggagcttctctaagtcgtgcctgaagctttttggccgcatcaaatccattgataagctcgcttagcaatgtcttttgctcccaacttaacatatctcttccttccatttttagtatatgattcccaaaatagattttttttttcctttaggtagtttactctaggaaattgatacaaactatgatgagaaagatgtataatgtgtgttttaagtataaatcaagaattggttatatagatggactgaaagaatgatatgatcagaaaaatataatgtgtgttgagtataattaagaatgggttatatagattgaagaatgatatgatgagaatgagagtgttataggattggtgataaaaatggatgagtgttggtttggtatataaaggcattggattttcagtgtttgaaaatttgaccaaatgaccaaaccataaataattattttatttctttttaaaagagagacaaaactttcaaattgaagaaaagtctttggtataaggaagtatagggccagagtgtaattgataagtggggtggtggtagtgaaagagtataaggtcaaaggctgaccaattcaacatttcaattttgttaatgtagttgtaaccaagtttatcatttatttaactatagtgggttaattatataattagacaacaaagggttatacaactgtctctttcaatgtacactttcaaaactacgactttgtacatgtgattaagattctctattattatatgtttttttctactgttaaagaatttccaatatatgttttttatttgattaagaatattttcaaaatatgttggttgatgctttactagtatgcattatgcaacaacctttctatggataatatttcattgctataactatgaattgtaatgatgtttaatatcattaataagggaaaggatattccacattctgttttaagtacaagtatcaaaacacatattggtaatttggtataatacaattcttattaacattcaatagattagcaataacataaaaattatgttgaatgaaatttactaagatttgattgttctagttttaaaatcatacacttctaaaaataagatataaaataaaaatctgatgaggattaattaatctgtacaaaatttcttcctaaaaacccctatatgtttttgttttgtgtcaatatatttaagcatacatttgttcaagatataatattgtattaacatgaaaaaatataaatttgtttggcaaagaaaataaataatagttgcagtctaacaatataactaaataatatttaaaatggtagttgcttatacatatatagtctgtgagtgattatgtgagctatgtcaagttgttaactgtttctaaataagaaatattaaactcgagaggggaaaataatacaaatgggtttaatttggacaaatatatatgatatgttccataagaatataatctacaaagttatgtgataatacaccaagagtatgacaaggtttttgctgaccaagtcaccatggaattatctcaaatagtcatataggtgtgtgaataaatatttatttatggttgagacaaatggccattaatttggacaaaatttatttatacataatgattgatatgttccaaagagaaaagtagaaaaaaccagtcactgtgtgatacgatatatacaatacaacaagagtatgataaggtctttgctgactaagtccaacatcaagctatctaaagtagtcagatcgatagatgcattccattccaacattcatttcttatgattaatcctttttaactttgtatgtcatcaaatattattcaattgtaatttggacctctcatacgtaagaaataacctttgtaataattgaaccgttatccaaaaagttacagcaaaaatctcatagctgaagttgacacacacgagtgtagtgtacaggaccaataaccactaaaaggtttatgaaccatatttaccgttttactaatgaaatggttacttttttaaatttgttttgggtcaaaactcactcatgggaatgggattaccaaaatcgttttcgatagatttgatttgcgcaaagtatagtgtagaaataatttgttttttgggtcgatattcataacatacatttatttatgtaattttacttcaacgtaggccttttacaaaaggaaaaaaaatcacttcaacgtagaaaaaacgtaattccaaaaaacagatttgttgattaataaaaagcaagaaaaatcaaaaagaaaatcaatattcaaaaggacaggattggaccgaagacatttcaaacctctctccgcgtggattttcccttttatcattcttttttgttttctagttttagtactccaaatgatattttaatttttataatggcgtcactctcttttgcgtcattcattcattgtattattattattatttggatctcattcatcattcatccttataaaatgaatcttggcactttgcaccctaaatttgtatttacacttcatagaatcagctgaaattatgtaatttgacatatttgcatccaaaacataactcttgaaatctttgaatcagctcacaagataatgacgtaagttgacatattatttctgcattgcttcattacaaaaccaagaagattttttttgtatgatctgtaaactttacggcattaagtatcgcatttatttctaattacgcaacagtattttgtgtgtgtgtgtcaacgctgcacagtatttttagtagaatgaaaaaaaaatataatttgctatgccaaatatcagtagccaattggactcgctaaaaacagcaataaattagtaaagtaggaaaatgccaaacaatttaaaaaaaactcatgtacggaaaaacattgctttcaatccctttgatatagtcaacacatattcgacattttcacacttaaaataaacttattatccttcaactttaactctttcctcactaattcaaattattgaggtacataaatagatatacgcattaaatagcctaactttagtttcttatctacaaaaccaatggagggaaaattataaataaataaattaattatcttatgttatcaaaaaaaaaaaaaagaatagatttcgtgttattttaacaaatatcatgttaatttatctaatctcatgttattccatatactgtaatatcaatgctatttatttagacaagtgataagacgtgctgtcctctgaataatttggcaatgttacatggccttcttttgtcaaattattactcgagcctttgtagtatcgagcccaactgtctttagagccggtatatgtccagtataccatcaatcttactgttataaatccaacttcttttttcccagaaacttgagcattcacaaaaaaagacttgcttattttgttaaactttcttcatttttcaaattacaattcattacataatttttttaaaacatacaaagtacaaacatatatataaatggaggaactgcaaactggagataaattatttcaaaaaaaaattgaaccaaagaggtaagaacttgctcagaagtttttagaatgtggaagaacacaaattagacccgccggtagttctcagctccgaacacggccaaggactaacctttagtgaagttccactgacatccgaacacttccacgtcttatacgaattcaagcttccatgtagattaatctcactcaaacatatacccgtaaatggtgagcccttaagaccttgaatagagccagcgtttcgaacgttaactccccaaacgttcttgatatgtattcccttaacaactggaagagcgttcgggttataattctcgtccggatgatctcccgtgtcgccggcgatcttgatcccatactttgcggtgtctacatagacgtctgatattttgatgtttttaatgtatcctccacgaccaatgtttgtcttgatgttgactccaactcccatattggagagagtgatatgttctgctataatgttcttgattcctcctgatgtttcgcttcctattgcgatacctgcgaacggggaagatcctgtgatgcggcggattgttatgtttgagcttggacggccataggcgattccgtactggtcccaaccgcttttgatggccactaggtcgtctcctgttgagatgtaggagtcttctatgcagacgttgtagctggaatctatcaacaaattcattttgttcagatgttaataaacagctttgattattatgcacacaaaaacatttccaagttcatatctagacatgtttgatcacagcaaccaatctagtagtctactgtggattggaaaaagagttaagagtaagatgaacctggatcgattccatcggtgttgggagaatcttgtggagctaagatcgtaacgtgatggatgacaacgttgctgccacggatcaaaacaagtaacaaagtcaataccataagaagaggaagatatattatatctacgtttgggagatctaaagggtattaactagtgttatatacctgcaatacacaggatgaatgttccagaaaggtgaattttggaaaataacattggagattatgatctccttagagtccttgaactcgattaagttcggtcttgtgtactttagcgttctactacgccacatgttccaccacacttctccttgaccgtctattgtcccattttgtcctgtgtacatagtgttgcaatttaatgtcaaaacagtgctgcaacaagaagaatatttcttgtaacaaaatatctattttgaactgtatcatctaagccatatagatatgactgaaatataagatggtcgaaactaaccagtgatgactacatcacgaagcccatcaccatgaataaagctcatataccgtccccctggtaactctctccctcttccataagacggcaaaggatcaatcaatggccaattccaggtatcctgaagtcaacacacaacaaaagccaaaaggtcacaaaacaattcacaagattcccactctgcattaatcacccaaatttcaacgaagtggccttgtcctcatttctgtctcaggacaaatgaaatggtcctgacttattaatgtttacaagctcaaaatcggtcataaggtgcacacacacacacacattgatatgcactacaatgacaagttttgtgttttttcttcactcacatgaagacaaaccaagcagaaaattaaatctgagtatttaacatagatggcagcatcctacttcattgatctgagatactcactaaaggattatgaaacccataactgtccagagtcccataaaacccataactatccacagtcccaactatagaaaacactctaaccaagatttaatctactttagtcacttagatattttctttaatatatcacatacactagtagagaatataataaccaaattttgacaaaaattggataacgcgaagacaaaatttgccagctatcttcgggtcagctattgaaacatagacataaaagcagtacaccacatgcatacaataacattttatccccgacggtcccatgatgctttggagcttggacctaccaataccaaattccatacccatagttattactacttatcaattattatacgtgcatggttccccaaatcttctttcttctttcaaaataaaaacttgatcaaaaagatgacattttgagaattcactccaattcagatccaatcaaataggcaaaaaaaaaaatgcaattctatttttagaatactatactttataaaaataataactatagtcaaaaaaatttgaaatgtaatcactcacagtatttgacagttaatcatcaaactcatttccagagagtagatatagaccactcaccaagaaagattagtaaccattaattcattaataacatttgactaatgagctaatttcaatttcaaatcagcaactaacgaattcgtcactcattactcatttcaaatcatctcataccaatccaatttcataattcaaaattcacagtgataaaccagaaaatttgaaattttacctgaacagctctaatcacagcacctttagctaagtaaagagtcatatggctagtgagattgaagctctccgtcaaatacactcccggaggtatatacaaaagcgtgcctcctctcctcttcagatgctgaatccgataaatcgccgccctaaacgccttagtattcaccgttcgaccatctccaacgcctccaaagtcggttatcgagatcttatcgtaccggtaccgtaacggaactataccggaacacgtcgcctccgaatcgcccaacgaagacgaagaaacgaagagacatgagaagaggaaaattgacacagagagtctccacattttcgatgaagagaggtttatttaggatgagagtaaaatctgcagaattggagctaagattagtatgatatagtcgacactcgacaacgttcaatagaagaaggcacgtgctgatacacgtgaatcaacgggccatataagctagaaacgtttgggctttagtggcccaataaggatgaacaactttttgttttttgtttttggcggatttttttaattctttgattttctattttatttagggtttttattcttattatataaaggttggatcggtttgtgaaatttggagctaagatcagagatttcagcgatttggagattggagatggagagtcctttggtgcgtctatgcttaaaggaagcttgtaagagcggagatgcggtggaacgatggcgacttcagcggcgtagtcttgagagtctgcctcctcaccttgctgatgctctcctccgtcgcctcctcaaaaagcggcttcttttcccttcgttactcgagtaaactcttcacttccttacatagttctgatcgtttctaatatgaatctgatttctgatctcgaaatgctgagctatatatatatatatatgcttcgatttgagatattgagtgatcgcttgggatcttagtttttaaatttgattagaattttttttttttctgtattcatgttgaaataattattcctgaagtgtttagctgtagaattgtgttggtcttggtacatcgttgcggaaaatgcaatgattgcatggacactgaactattgtatctgtatcacacaactaaacaagactcttttctgtgcagaggattcaaatattctgtagagaatatagatctccgaggcaaaagctcagttaacgcagaatggatggcttacattggaggcttcgttaatctaattactctaaatctttcagattgccagagaatcaacagttccaccctctggcctatcacaggtatgttgagtgatatactccgagttttggaatggaagtttaagagaaatttaagtgtttaatatgtgatattggattttcaggattaacaagtttgacagagttggacctttcaagatgtttcaaggttacggatgctggtatgaagcacctccaatctgttgtaaatctgaaaaagttgtggatttcacagacaggtgtcactgaagttggaatttctcttcttgcttcacttaaaaaattgtctcttttggatttgggcggcttacctgtaactgatcagaacttgatttctctccaggtattacctgtgctctttctttattgtagtcattagggttgttttaattgcatgatgtatgttattgaactgtgtagttcaatagttatcatctatctatctagttaaatttgttagagagctctgctaaaattgtaaagttctaggtactactactatgttgagtatagagtataatgtgcacagaaactatttagtcttcaggattctaaaattcaaatatcatttcctggttattaaacccattaatccctacaaatgaagttcaagtgtatgttcaatatagtttcttgcgtgaagatgtttgtatgcccgaattcacttattaaaaacatgcctatttttattttatttttgtcactgaaaaacatgcctatttgtaataacatttaatatgtagacgatcaatctttttttagtttttctgaccgccattttctttattgctgctcaggcactgacaaagctagagtaccttgacatctggggaagcaacgtaaccaaccaaggagctgtcagtattctcaaattttctaacttgagcttcctaaacctctcgtggacaagcatcacacagactccaaacattccgcaccttgaatgcttacacatgaacacgtgcaccattgtctccgaaccaaaaactcatagctcattagcttccttgaaaaagctagttttatcgggagctaatttcagtgccgagacagagtccttgtcctttaccaacaaaagctgtataacctacttagacgtttccaagacttccctcaaaaacttcagcttcttagaaactatgtttaacctagaacatcttgatctgagctccacagctttcggggatgattctgttgggtttgtagcatgtgttggtgagaatctaaagaatcttaatgtctcggatacacaaatcactccttctggggtcgggaatcttgctggacatgtgccacaacttgagacattatctatgtcccagacatttgtcgacgatctttccatcttgcttatcagcaccacgatgccttgcattaaagcccttgacttgggcatgaacagcaccctaggtatgtatgagccttctaagatctaacgagtgattattaaccctatcataaccctacgactctatttttttcaggattctactatctaatatctccacaagaagaaaaagagaagtcactagcagcactacaatctctaacttcccttgaaaccctgagtctagaacatccgtacctgggtgacaaagctctttccggtctaagtagccttactggattaacacatttgtccctaacaagcacatccctcacagattccacactccaccatctctcctctcttccaaacctagtcagtctcggagtccgagatggagttttgaccagcaatggtcttgagaagtttagaccacctaacaggctaagaacactcgacctccaaggttgttggcttttaaccaaagatgatattgctggtctctgcaaaaggtaccctcacatcaaggtgaggcatgagcatgctgactcttcttctctcgaccagaatcaacttcttcctcggtcatctactccacagagttttggaaaggtagcaaggaggaacaaccagaggccggagagttctgttgctgttcccaggagttttttaggtacgcccttttctcactaacgtgctttattataacaattcttgataaggaagaagaagggctcaaagtttaaatgtgtgatatgtgggtacagatcagagggtgaagtacaatagggaagagttggttgctctacaaaattcgcctttatcacaattgctgccatgggaagaacttgtcagtgtaccggaacttcttgctgattccgtgatttgaagcaaatggggtgaacaagttggattttagtaccacctgaatgaattagtagagatcttagcatgtcttgttgacagatttggcctcattttcttttcctcaaaattgtatgacgtctgaaatagacacagtacacggtatgttttagcagaaaatattgtattctttgcagtgttatcggatattatttcccttttcaaacatgtgacctgactaaatttacgaagaatattaataaatagtttccgaaaaacatatactgagacagcgccatgtattttaaaattttattaaaaagaaaagttagatagcattctttttttttttttttggcaaagagatagcattcaagtatagaacataaaagtaaatttccaaaaaaagatagaaaagaaaaacagtgtagcagctctggactgatctgatgctatgaaatattcaaatattgtacacagatgagagaagagcctattaacaaagtcttcgtcatgcaaaatgagagacccaaggaccgagagtgaggaggaatctaccctctggaagcaaattttgcatttatggtcttgtacatttcgtcgatcacactctggcagatgacgaagagaccatgttaattaatacttaatgtcagtagatttctaaatgtttcaatacgcaaaagtgtttgtattacctggtagtatttcagcaactgaggccttttctttttgaaggtcggcgtaagaagatctcgttccatgtcaaatggcactgggtcaagatgaatcgccttgatgatctcgaaccctttcatctgcaaagtccaacacaataaattcaaatgagataaagacaacaaagaaccatgaatccatattggaaaactcaaatgatatagagacaatgaataacctttttctctttggccattttaacaagttctccgagaatgaattcctttgccttttcattttgacagagagcgtcatagtcaccactcacaccgttttctgcagcccagcgttcaaggatatgctggtttgggttggcgatagctattaggaaggactcaaagctgttaccgtacacccacacctaataaatttgaatggaaatattgtgattgtgattatcagtagatgagaatatttaccaaacctatgagagagaaaactacaaatcggttacttacggaatcaacagcttgtacttcaccgtatatgttttctatgttctccaccgcaacatactctccttgtgagagtttaaagatattcttcttcctgtcaattatcttcatgcttccatctggttgccactcaccaacatcacctgagagtataagaagcagagtgtgagaactgaaaagaactcaccggactacaaaaaccaatattctaactaattgtatacaagttcagagaaagaaatacctgtgtgcagccatccatcaatgagaacctctttcgtgagatcttcacgtttgtagtaaccagagaaaagggtctttccccgaatgcagatttcaccacgtgcagtactcgcaagagcatcatattccatctcggggacggattcaaggcgtatatcaacgtttggcactggtggaccaactgtgccgagcatacctagttcatctggcagcgagacaaaagttccagcacagctttcagtaagacctgtaaatgatacaacaacaaacggacaactaatcacattctctgttagtgagggatcatatactacatcactctggatggcaaagatgcatgacgaggctcaattaaaaacactagtacacgcagaaaatactccaactgtttcacacattctaggtgatttatgagagatagtgactttatcgaaactggctcatttatgtagtttcatttggatctgaagaactcaatatattgaatgggtaccgtatccttggagaacatgacagcatgccaccactcttagaaatgactctacgtgactagcaagaggagcagctccagatagaataatcctcacattgcctccgagtccttgtttaacctaagtggtaaagcaaaagaaataattgctataaaatttcaaaacgaagagtgataggctcttctgatgttgtgtagtatagaattttattgaagaactttgccaccttgctgaacacaagtttgtcaaaaagtggagaggcctccacatgagactgtcccttcttcatataaccaaatttactgagaacgttttgagtgtgttagatcatatagcttaaaggttagtgacatagataagcaaagagaagtttgacttactaggaaaatgcagaatcaaatatgaacttttttaagaatccaccatcagaaagcttcttctgaagacctgtttaatataataggtcaacctaatgagacacgggtaacttgtccaagtgaataaaccatgtatatcaatgatacgaaatcgaattgataattaggaatataaataatgggaaaatgtaacaatcaccaaagaagaaagaatgaaagcttatcataagaatattctagtagaattgagaatatttttcacatttggtatatcccatcatcagctagtaatagtttcatgaaggtgtgtaacgtggtacaaatgtaaaacctcagattcagttatttggaaaaaacagatgatacgagaacataattcaatatagagggcgaattgaaaagtacttgctctacttgggcatatgatatttcaaacatcttacctgagtatactctatccaggacacgaggtacagcacaaaaaatagttggtttaagctcagcaaggtcttcgatcaacaattttacatcctgaggagacaacccggagagaattataagtgaggaattcaaaactggtttaaataaaaaggttcaaactctactgacccctcgccagaagccaattgcagcaccatgttgaatgaaacactcctcgataactcggtcaaagatgtgggcaagaggaagataagaaagatacacatctttcacagtcagctattgatttgcacagcaaaaaaaacgattaagaccagagtcaggaacatgggaatcttaaagattgcagcttctttgtgaatcctaaaaaatgcatgaaagcaagaaggaaactcacagcctcgttagcacttttcagtagacggatcactccagcgattagagtcacaatgctttcgttagatatcatcactccctttgggtcaccagtggttccactcgtatacataatcgtgcaaatgtcgcttttctttttgattgggagatcatattgctttccttcaccctgggagaaatattcgcaatggaaagtataaacatgataagcatagttataagaccactggaaagaaatatcacagaatcagtatatttcaggacgagcaaatgtcaagtctcataccagcttcaaaaattcatcccaagcatatataaccaacccaaaagtttcagcttcttctttttgttcacgtgagacacccccgaagctcacaacagctgtaattataatcacgtacaattgatcataagcacactatgttaacggcctaacaggcctaacacaagaaaaaatcactcacttttcatgtactctgtcgagtttgggcatgtcttgaacaactgataatcaaaattcaaaagcaagtggtaagaagaggttacaaaaatgtaaaatttagcaacggtaatcaatgcatgaaagtgataaatatatatttcacacaaaatatatattcttactgtacctcagagatcttcttctcttccacaaagacaattgaaacctctgaatgggaaatgatgaattccacagcatcagcacctataaaattgacacgcaacaaaaatgacaaataagctagctaaaagatttgtagaagctcactggaaatctattggcgaatttatccttctagagtatattgggaaatactaaaaaaggcatacctagtgtatcatataacggtacacaatagagtccatgtgcattacaagcctacatcaaaagtgcactgtcagtcctctaacaaaacacaatcaatgacataatcatgattcagccgcaaaattacctccatgctgataatccactcaggagaatttgcaccatagataccacattttgcttcctaatatcccacatatcaggaaacacaagattaagcaagggaataatcacattgcgacaaaaaaaggaaataatgagactgaatatagatatctgaaaggaaaaagatggatcttacgtccttaactccaacacttctgagagaatttccaagtttcatgacaatgtcgtagacttcttggtatgtttgccagacatacttacccggctaagaacaatcaaaataacaagtgaattttataataacatgaaacgaaaatcacaaaatcaaaatcaataacaaacagtaacaacacctttccatctacaatctcgcggcgtcccagcattggattgtttggatacttctcaacagacatgctgcaataaacaataacagtagaaaaatgtaagtcaacaaccacaaaatatcaccaaaccacacacaaagcaaaacaaaaaatgtcaaccaaattcatgcaactgttaattaatcacatgccactcaaaacgatgttattatagacaaatggcaaaatcattaaccaacaaattatatttctatcgattagagcaacttaggtagatcttgcgatccgaaaaacttaaacaaacatgaatcaaatccagataaacactagacgaaattaaactatacgattcttactacttgagaatccataaagagcaaaaaacgcaagtcagaacaaattccatgatcagtcaacagatcaaggatcaaaatctcagcaagaatcggaaacgaggctcatgcaacacaaactccgatcggttaaacgagaaatctcaccggaaaacatcccaacaactatccattccttcgatcgggtcgggaaatccgtccttggcaaagatactccggtacactggaccaactgatggtcttccatcgctaccttctttgccttcttcaacttggaagatgtatttcttctgctgcgacatgatctctctctctctctctctacttcgttctcgttctcttctctctctatctgtagaacgagaaacttctgacgcgttttctcagatcggagaagaagttaatagagactttcaactacgactgcgattggttgctactcactgaccataaacctgaaaaagtcaaagtcatattcaacctcttattgggccgtatacgtatcatcatattaggcccaataaagtcatattatccaaattgaaatttatattagccaatatttagattttataattaagatgtcaagaaacaaaacaaaaagtgtgtgattttgatttaaataactttagattttatcaatattttatcccccaatttaattttttttttagaggttatcaattaatctacgataattaaaaatatgcttattactctattagtatgtgtgtttgtggatagatttgactagttgcacacagatatgatatttgttaaacattagttatcaaaacaaaaaaataaatataaattttcaattcataaaaaaccatataagcaagaatttgagattttgatatccgtttaatctcgatacaaattaatattaacatgtacattatcaagtaacaatacttatcttgtgcttatgcttagttgctgatagtggagggaaaagggtaatagaattggagggttaatggcgggaaaatgtcgataaagtcccttcctttatataacatacataaattttctcgcatttaagaattttaacatccgctagatccttctttcttccaaacccttaagctccaccttcgttttccccaatttctctctctctctgccttcgtttatctatgtcttgaaaagtgaaaagctttagggcttttacaagtctgagaactccatcaataacctggtaatggtccgattgacatgtttgatgttttgcgaataatctagggtttcattttttttaaggaatttagggaatatctcgtttgagtctttcgaatagcttttattttacccaatttcatgtttttagtagtgaattcaggtgggaatttgtgaagaataattgcgacaatggcatctggtgttttcgaggatgaagctgaaggaactataacgatcaatgaatatatcgaaaggcttgacgcagaagagctggtaatgttctctttctcctcttgatcagttttaaagcttatgtatgtttctgatccttacgaaagtttaatactcttccacattttcactccttggttggtgataaatcgtttagatttaagtgtaaacaaacgtcttgaaattggattctgaccttaaattgactaccttttctgaagctagtggagtgtgttggattgttattgtacagtctctgaggttttggctagctagtaatgatagtgtgtgtctcttaattagtttctattaatttcagtagtgtgtatctgtttctgtaatcctatgttatttgggtttaggggtttaatattcattaactgcttttgtgattcttgatgttaaggcagcggatttggtgttgggtggagatgaaggagatgagtgtactttcccaaagggttacatgaaaaggcaagcaattttctcatgcattacatgtacaccagaggggaatgctggaatttgcactgcttgttgcttatcttgtcatgatggccatgaggtaaatatggttgatatatagccaggttatgtattttgaaatctgatttcatagtgttaattggtttcctaatggttgaacattgttctggttatgaagcttttggagctgtggactaagagaaattttcgatgtgattgcgggaactcaaagtttggaactttggcttgtaagcttctcccgagcaaagatatagaaaactctgaaaattcttacaaccataatttcaaaggcttgtactgcacttgcgaccgaccttaccctgacccaaatgtggaagaacaagtagagatgattcagtgttgtctctgtgaggattggtttcatgaggagcatctcggtctcacaccttcagacagtgttggtagccaggtttgtggccagtgcttaatcttgttgtttacgattgattttttttgttgttggcgcttagtgcaatttgttatgtgatgttaacagattccaagggatgaggaaagtgagccgatctatgaagatttcatttgtcaaaactgctccccagcatgttcgtttctgacactttatcctgagaacttgtgggttgttgctaaagtagattccactggttctgctaatgcttgttcagagacaattgagttagacaaaaaccacatggattctgaacccggccagccagagaacggtactgatgctgagaaatctgttgtaggaaaatgttctgagacgatcagtgactcagaacctggccagcctgagaacggcactgaagccgagaaatctgttgtgcaaaaatgttctgagaagatcgatgaatctgaagccggccagcctgagaacagtactgaagccgagaaattcgttgtgcggaaatgttctgagaagatcgatggctctgaaaatgttcctgcagctggttgtgttattaggactgatctaaactcgtgtcctgagtttgagaagaaacctttgtttttgaccaaaaactggaggaacatcctatgcagatgcgaaaagtgccttgagatgtataagcagagaaaggtaagctatctacttgatgcagaggacacaattgttgaatacgagaagaaggcgaaggaaaaaagaacagagaaactggagaaacaagaaggtgaagcacttgatcttctgaataatctagaccacgtatccaaagttgagctccttcacggaatcaaagacttccaagacggactccagggtttaatggtatatattgtcaccatctatgaaagaaatttgattacaattctcaggaaccacttcatttaaaaagacttgattcgttgttggttttgtaggagtctgctgggccatcaaaggcgataacttctgcagatatcgagcaaatgttttcaaaactgaaaaacaaacgtaaaaggatggagtgagaggagttataaaggtagtaagtctttctttcgacatttcatgttaactttttttagatatatgttgtttcgttggtttgaaatgaagaatgaggaggtttctttcctcttcctctgctcttgtctgtctttagtttcctaagtaatgcaaccaactttttactttagtgcatgaagtttgtagcttatgaaacagtcgactactatatataataagctactagttctagaactactatttacttttatctttccaactatttttatatgaatttagtaaatactcttatcttcataatgtgtcttggactcggaaatactttgagcatgctaaaaggagagctttttatcgtcttttattataaccaacgatgccccattgtcaaaacaactcattaacagagagagagccaaaaaggtaaggaacagagcaacaattacacatcggtaatgtcttgcgacatactaaggaagtcgaagatcatcaattacacatttcgcaatctcatgtgctcttttgttggatgtaggagattgttaatataccgctttgtaactccggaagctcctttaagaagctctatggagcatgctaaaagaagagctactacaaactacacacgcaaagtaaaaaactattataaattgggccttctaaagtactaagaattaggttttgggcttcggaaaaccaaattcagtttacatgtgaggtcatcatgttttttgttatgacaaaaattaattaaatagtattgtaggcctgaccaaaaaaaaaaaaaaagtttgccagaaatcacttaaccgaatattaattctaggtcagttattacttattagtgtttttttgttgtcgacatgagttattgttgtttttaagaaaatatagatcgaagttggaagctcgtgagtgttgggcccttagagtaacgacagcccccgtgacaccaccacgtacttgtgttgtccttttgtaaatttccacgaagtttcgtttcgataagaagaatttgataacgatccaattattgtattacgcgtagtgcttaatgataggatcatctgatatgatcgcgcttcttaatgacatttacgtctacatgtaaaatatcatgaattatttttgtgttcttatgttattattataagaactaatgcaataattgtggtaacacatcgcgatcacgcttatgcaaacgatataaccatatgacacaacggttttaactgtatttgagcaccgatctacgagtgttttaaatttcttcagatggctttagtttagtggttttgaaatgttatatattttaaatcgaccttgtactaatatggtttttggtccgtgaaatcaggagagaatatttcaaaagaaatgggtttgacattgtttgaaacagatcataatatgaatgattggattctattaaatgatatgcattcttgagggaaacgaatatgaatgtatctacgaccacaagctattaacatgtaacacttatttaatgagtagatgggttttatattaaagtatactatttgtgattattgattctaacgacgattataaaaaaaataaagaagacaggttgggtggttggtataaatgtgagttgccaggttttaacacggttttggtttggtttaaagacactaactaacgggagagaacatgaacttgtgttcttatgtcttctattctaataatttatagtattgaaaaaaacgaaataaaatagccactaggaggattaaaagtacaatgagtatggaattagctaaatgcttattcaatatacagtacgttttggttatgttgattgaaattgaaatttagatgcgtacatatcagagtttttcaagtctgaccccactcaaattggttaatcttatcaacttggaggagtcacacaatgatatctacatggcgttttacaaatatctctatgtcttccgtttacgttcctcgtttagctaatgttttggtggaagagagctcttgtagctccagaacgttgtttgtttttgaattaaagctaatagaaatcaaatcattgtttgaccaaaaacacatgcatgcatgcaggaacaattcacattggattttgattgaacttctaaagttttggctagtatgaacttcgattaattgataaccaatttgttcgaatagaaatggaaagccctttcgcatttaaactgttccatccaaactatttcaatgttatacacgtcaaaaagaaaaatatatacaacgtaaaatttcctacaacaccttgcacaaacaattgaaatagacttaaataatttcatagtccccactaatataatcttgcaacttcattgcaaatttgcatctatgtcagcttaattagttgggctatcgccgttaatgttgttaataatactgtgttctctcgctatcaccattagtttatgacatctatgactatataattaattagcatattgcagtggatgtttttagatttttcggttaaaatttcagtttcttaacaaatattgcagtggagttagtacttagtaatatgtactctttcttttcttgaaattgcgtagagtttaatttcatttcattcttatatggttcagttcatcatctacactaaaaaattgaaaatcaagtaatctagatgaaaattttcagttcatattgatggtctgttaaactaaattgaaataagcatcttcataactgaataacaaacatttaggttggtcaaatttatattcaatacaaataactatgatatagtacgtacatttttaaatataaatccaacagatcagcatccttactatgagtcatacatctatcattaaacagaaatgctcaacattatatataaactcaacatcacacattgattcatacaactcaagcttccatcaacttgacccacaccgaaagaaaaagagaagaagagagactttttttcttgggcattcccaagttttcttttttcttcctcttaacactttttttgtgggtatttccctaaaaagaaaactttatttttgttcttagtaaatctgcttttaaattttataaaaatgggaaactgtttgatgggaggaaacaacgttgagaaaatggttaaagaagaagaagtaatgaagaaagaatacaagagaaaagatcgtaaagtaaagatagttttgagaagagatgagttagagaaactcattctttttcagctaaatgccaatggtaacgtcgacggcaagggagaaacaactttggcttcttttggtgactttctaagggagttagaggcggagagatctgcgggagaagcggctgcaaaggcggctgaggaagaggaggagtctcgtcggagatgtcgtaagtggaggccctcgttggaaagaatcactgaatggcctgaagaaacactttcgtaatctttttctttaatcctttctttttcgttttagagatcttgaagtcttttatttttcttatgaaaatgggattttttgtgggggagtttgcccttttgctgatttttttccctttttttaccgagggatattttttcatctgagattttatctcagtgtgtttgagatcagcaaaaggcttatttaccccagagaaaatcctcagaaaaaacgaaattatgtattcattttcgtctttcatgtaaggttcaatttgtcatcataaataaatattagtagtttagtataaacttgttaagtcttcatatatcacaatcgatctaaatttttcaccaatgtgcatttcgtacgttgatacatacccacaacgaacaacgcataactgttataaaattaatttatacggccagcaaaaatgatcatcaaagtctactatctacccgtaatcaatgaccaagctgatttgtcctgtctcgttggacatatagaaaaagagagtagatgatcaaattgattttaatcactatttacattttctttaacagaatagtattatatgaatacaataataacaaaacttgtaaaaactcagatcttaaagaccagtaaaaggttgatacattagctttaattaactccacaattttgttttctaaaaaataacctaactccctaaattgagtaaagaaacgacataattaacaaagacttcacaattcaaagtgaatcagtaatcattcgcttttacgaatttgtgcaatcaacttctctctaccataccttggaattggattatactcgtgtcatggtttgttaattctatgctttgtttctgactttcctttttttggccttggaatatactaatgtcaaaattttgaaacattactatttatgagacgacaacaaaaaaaattccacaaaatcatgttacttctattaatctgttacaaaatatatatacaaacgtaaatttatatagtttctactctaaaactacaaaatttgatagaaaaactcaagattaacttattccagctgggataaccagcagccatttccttgtcgctcattattacaaccaaccatcaccatagcgacttgaagctgatgaacagggacgtgtgcgatctggtccataagatgctccaactttaaaacgctgtcgtttttgcatttcgacaacaaccgttgagcttcatgctttgtcatcttgatcttaaccctcacgacctcttccttcccttcaaccattttcaaactctctttttcttccagaggattctcctttggtttgagttcgtgatcatcatcaaaactcaccgtcttctttggctcgaagatcttattattctctaactgaaacctcacaaccttacgtggcttagccagaggctttttattctgttcatcttcttcctcttcgccttcttcaaacctcagcgatttgtcaatcctcttggctctctgcaagcaccgagactttttggtcgattctactgaaacctcctttgattcgttcagaggcaacgttatgtctaagtcgtctctgtagataggttttgcttctagaacgttgtcgtacctttcttgaagcctgttgaagcatttagctagagaatccatcattttctttttttttcttcttcttcaacaaatagggagagaaaggttttgtgttatcttgaaagtttttctctatataataaattttcgtggggcagagaattatataggcgaccaactttaccattattcggacacgtagtgaagtgtgctttggggtaagaagatgacgtcactttgccgtgggatactagaatagtagaatttaattattcaagtttgctttgctttactatgcaaaaagtgtaagaaccatctattacgttaatatcttataagcataatcaaataatacaaaacaattgacaagtccattaatttacagtcgatgttgatttacgggaaggttatattgaattgaagataactggttaaattgtaagagatctgaaggtaaaaattagagataatcagtttttaccaacgatcgtataagtatctgcgtatgtgaatgtaaccatagtctattgatgaatttaaggtaaaccaaggaaaagtgattctattgcatcattaatcagtcaataagctttaccatgactttaaagttttctctaatgttgctcttctggaaatgacattaagtaaatcggtcatctttatccaatttttaattattatctagcggaataatcaactacaagacgttttcatatatttttttacaaaaagaaaaccaactttccactgaaaaaaattggtgccgtgccactggcggcatatgacatggtcaattacttcattttgaactggtctaactaaataattgaataatatttacaaaaccaagataaaaaacaaatacgaaaacaagtgtatatttgtcacagataacagattctttatgtaatttggcgtaaagtccgttcgtccaaaaccaacctattcacaatgtacaattaggtcaagtcgagttttaaacgaggaaaattgacagtattttgtataagcgcttcttgatatgagaaagaaagccttgcacagcagtaaggctgcataacaaacacgatcttggtcattactcaaaatcggaagatgaattgaattaagaaactcatacacacccaaaacaagtatgtatctaagtatcttccattactagaaagttcaaatcctctattattgttttctcaatttttaaaaaggaacagttactagtatagggagatgatttcgtacgtggatattcaacaaatgacgttacacttgattatgaagataccaagtttgtggaaccatacttgtttttttaatcgttgtcatttatgatgataaaataacaaagaaatcacatttagatttttgtttttgtttttgaaaggtacaatatcaagagaacatggaaagttgtataaattcaggcgaatccagcaatatatcaaaacgtctatggactcatttttgaaagtaacttatctcatatttatagtcgtcttctacattagagtttcaagtaaaggtgcttatgcaatggcaaacctatctccacccgttcgagtatatttctctcttaccaccagaggtttttgcatctcctttaagagttttctaacgagtttttttttatgtgtaataactgtagacttgcgttctgagagttggaatcaagtgttgcaaaggctgccagacaaaagcaaagagaaagttgctaaatgtctctggtaatagatccactagtgaaatattgttaaagctatagtgttgttataaatattctagctaatattattttcgaaacaggggtgagtacagttgagtataacgcagaacaagggctcttgacagtcacaggtgatgccaacccaacaacattgcttcataagcttacgaaatggggcaaaaaggcagaactagtctcttttcttggagacaactactcttcccatgttcctagaaccccggaacaaaaccaaaacaagacaatggagaagaaaaagaagaagccaacaaagtgttgtcttctaatgtgttttggaaataagagaagcaagaacacaaagattgagcctatggcgataccaaactggcaatatcgaggagtaggaaatgaaaatggcaatgccaggcctttcattaacgcggcaatgtcacctccaatggtgtatcctcctccacaagcagtgcctggcttcacaacacccataccataccctcctcctagtttttttccaggaagaccaccaccaccatacactggtgctggtatgttccagtcagctccaccacaatccccaccatattttccagttcccaaccctaggctgcattacccgcaccactgatacagttctttcagacgatacattcattgcctgtttcttctcttagctatgactcaaatgctgagtaataataagatggtaaattcttttcaacatgtaaggtatatgaagaaatgcaaatgaatgatttccacaataaggcagactagaaaacacatatagacaattaacttgataaacttttttttcggccggactcatgttttaaatgataccaaaaataaacatatcttgttgggaaattagtaaatattttatcaatttattaggattttttatagaaacgtatatattatttagtgtagacaatagagagaaacaaagaagtggttaatacttttattgagataacgcgttgaaagcttaccaaattttggtggattacgaccaaccacccaaaaagatttttacgcttgactaagtcctggttctctcttagtctctaccctttgctatcaaacattcagtctgaatctgagattaacataattatggcaattaatggcactcaaacaaaaaacacgattgagtcaaaaacaaaaaagaaattcctagtttgatttttatttatggttttgacttgagagggattttttttgtcccaacagagaaacgaacattgtgaggcttttaaatgggtcatatagacttatctgggcctaaccacaaaaaatggcccacttttggagaaactttgaaaataaacccgaaggttcgggaaaatacagagagagaaaatttccagtcgccgtcgtcaacattctccttttggtacacagacgagaacgaaagagcgaaaagaagatgaacgtagttcacggtttgaagaggattcctcgcatcaaattccctcagagacatattaatccttcaggttttcgattatccatgaaactctctacacagaatctatgttattttttccacaattttgctcggctttttctcgcttgattcgaattttttttgtgtacggtttcattttcatgaatcagatatgagattgtattcatttggctgtgaatttttgctttccgatctatttcgctctgattgatttgcatttacatagttagattcaaaggatacacagatttgtttagccattgaatcgaatcgtgtttgttatcaaatctcgaatcattatagagaagctcttatgttttttagcttttggtttgggtaatcatctgtttgttatgcgatttactttctggcattgcagcttcagagggaaagagtcaggtggcaaatgaagctgatacattgttcttctccaatttgaacaacatccaaaagactactggcgggaaggcatcatcgcagccaaagcgcacgccagtttcaaacgaagaaatggaagccattttggtatgtaacttcattttgacatgtataacaacacttagatgaacatgtatctaacagtataatgtgtgaccaactactaagttataattatgtgaccaattacaagttgagagaacccttttcatgatttaataatattgttctgtttctaacttccttatccttttctgaattttttttacagttgggaggctgcatctgatcatttcaacatgatctgttgacaagaatggtggatcacttctcatctttaccatttacagaatatactcgatagtcaagaagaaactgatatggttgatgtttacaacaaccaatgataacaataaaactactccattgcagtttttaacttctatactgattcatcattgattgagtgcatttgaatctctattattaagtgctttatgattgaaattcatcgtttattcttttttttatatcacatgatgaagctcttttagaaccagtcagaaatattgtagcctaaaacgcaaaggtacgttacatatacattcacaggaacttacatacagagaagagaagatcacttatggtgctgcctcttccttttgcatctgttcgataagaggctcgagaatacaagactttggattcttacccggtggacctttttctcttcgttcaagctcttcaagcctgaaagtaatgagacggtcccagtttcctccttcgaacaagacaccagcttttccatcagtgatcctctgcacaattccacaatacatgtgatacggactgttctggttcttgactatagcaatcatccccggcatgagaaggggtagcttgggcgctttcggcttcttatctgtagcaaccgcggatgcatcgcttccttgttttgcaggtggtggtggtggaggaggtggtggatttttttcgataaacgtttttaaacccttttcgccaccgggaaatcctcctgtgagacccatcatctctttctcgaaaccatcttcaggtactttaaaagacaagttactgtcatcgctctctctctctgtctcgttgttctcagcctttgatgtctcttgctcgtcttcaatgttcctctggagctccttctcaatacctttctctccgttgcataatcctcttcctcccatcacttcccatagattgaatttacccatggcctttacttgatacagttttgactgctgttttggaggcgggaaaaccgaccggtttacagttgaaaattgatgtgtttggcctagaaattttgatcgatgaatcggagttctaatggtcgggatagtgatcgaagaagtcgccataactatttttgcctgcagagtagagtagaggtgactaagggagatatgaagaagatggaagaggaaggaagaagcgtgtgattgattcgcttgttataatgaccacatatcatgatttcagttagatgagttctatctatttccaaattaccagtggacctgaaccggttaatgcgtaaccggtgtttggaataatgatttaggagaaagagtaggaacatttgggctttgtcataagtttaacctggaccaagtttgaatattcttaagagatatgggcctagattaaaaacaatggtaatgtaattaaacatattgctaaatgctaataatgtggatttgtttgtttattaagaaaaaagcagcaagaagaagataaatcatttgggtcaacgacattaataattggaatcccatactcccaaatcataattagacatacacttttgtcttaggctgtcctttacactcatcggcatcaccaaatacttagttggcaactttgatcaattaatgtattaagcatgaatgaaaacaacttttacattgattcgataaattcattatattgtagataagattagtcaaaagtttacaaacattcgttaacaaattacaaaacttgtaatatctgcagcaatgcccatgtgggtagagctggctgacgcaacctaaccgggggataaaagcgtctttttggtaccaaatttaaagtttctttatgagtaaaattcccaaacccaacatcttcttcctgctgaagcagtaagcactcaaccaaaaaaccaattgcgtaaacactttcccttgaatacagagatcacattcgatcaggtaaaaacaaggtctcgatcttctcttcagtcaattttttcaaattattcgaggttcccgtcattcgattccgacttccgagcttctatttctgctcaatgtttttgtattttgttagggtttccagaaaattcgattctgttgtttttaatttgagctaataaaatctagaatgggaaaaagaaagagttcattttcgtcctctttctttttgtagaagctgaactttgtttttcttttacagcgagctgatttctcacaagggatatcaaaatttctggtgaagtgggattgtaaaattcggcgttgaaagatatataaagaggtatgtttgatcctcagtgaggaataaggatttttagtagttatatatctctccaagtgatgatacatacatacttgtggattagatctatgataagaataagcataagatagagactgagagacaagtcatttagggagattaaataatgttcatggaatgctaaagttcatataggagtttgtctcatatcagaatctagattagatcatgctcagatgacatctcttgaatggacaaaaaagtttttaactatgtgattttttcgacttcttttggggaatcaatgtactacaagctgagagttttagagtagtttcatctctggctaagctttgattcattttctagtggaaggttctggagtcgtttcaattcatggatgatggtactcctaagaagctaaacatattacctgatcactttagtgctcctagtcccacagcagaatcttctcagcacgatactccatcatcttcgcagccaaaggacgatagttctctgaggtaaattgttagcgaataaatatgctaagaagggaaattctgagctgaaatgaattgttttttcgggtggttttgtttagagtaggccttatagccagtcacggactcgcagaaacctgaaaagagcagcaactatgttgaatttgttcactcttcgccgtctgccttgggtttcagatggtcaagagaaggttccattctctcacacctttcttctttgtttttgattcacctcattgaagtttcagggttttctcctgaatcctgatcactctctcattggcaggtcgagctatcagcagcggagttagaatcacttagatcagaactttctgatatggaagaaagagaagcttacctcaaagcccagtaagtcatatactcaaatttgttccattctcagattaaaagcgcatatctcaatttcttcttgctgaactgctacataggttggaacatgtggatgaagtcttgcgctctgcccgtttatctggttatttgtttatcagaagtgtagggccttactctgaattacttatcattattgatccactaggatgttttacaaatttgccttatttttttgtttgactttagcgttgggcagctcttccgggtgaaccaccaccaatagatgatacagaagtagacgactggcttcctcggtttgtcgtccttcaaggcccttgtcttttcttctatttattgtcaacaggtgagttaaggttcagcttttacaatcctgtttcaaatttgtattcttcttgtaatgtctcttgaaattctctattgcagacttgagccctcaagattcgacattgctagcagatattgttgaaattggttcggtaccaagctacacgagagaattcgatgaaacccattattgcttttacatattaacccgtcaaggtctaagatttgagtgctcaagcacctctaaaacacaggtgaaccaaatacatatacatctttacacacagattgttgttgagagatcccacagcatttgaacgcaatgatttcgcggttttgtatggttttaggttgattcgtggttgtcggttttgcgccttgattgcaagtctgaaccagaagaaaggttatcaaatggatcagtcgaagctccagaataaattgaagagcggtcactgctctggatagttttcatttatatgtatataatgcttctttttagatgtagtagaattcacgtcaatgaaaggttcttttactgaactggtggttacaatatttttggtttacttcttttagctgctaaagacattggaatatattcgtttcttgaataggcaataattctagttggaaaacaaaagtgattagaaaggcaataaatcctgagcctttaagtccttgtctgatccgacccgatcaaaacatgttggtataaaatcttccaataggttcacatttttgaggtccctgtttgcacatcactcttctcagtcctcacgcatcgtatcagagaaaatgagctcccaaatctgcagatctgcttctagagcagccaggtctcttctttcttcagccaagaatgctcgtttcttctccggtacgtaaattttctctctgatcctcttttttcctgaaaatgtgataaacgtcatgggatgatacatctagatagacgtcaaatattttatgaatctacctgtggttttcttcgttttctagattctcgattgtattgaatcagtgatctgttgtatcgtttccaatctaaaatatttgatcgaagcttttacttgatcctacgtgtgttcccatcaagaaaataaattgtttgtttcttgtgagagaatacttcttgctaacacattttatgtgaaactattggatacacaaatttagactctcatattccggtttttgtctcatcgttgctttgcctacataagacttcttattgattttcccattaatataaagaggatgtttaagatctgttggttttattattcacatatgaacagaagtcacaaaccgtgtttcgtttacattttgctgatacgttgattattatatgttttcagaaggccgagccattggtgcagcaagtgtggtgcatgcgactggaaaagtccctcagtatgcatccaactttggaaaatcgggttctggcttcgtctctaatagctggatcaccggactccttgctcttcctgctgcaggttttacatgcataatgtttcctataaatctgtgatttactgttttatgaatatattctacaggacacattcaaatcttcacttttgtaacacagttagtgtaaattaagcctttcaacgttttgactccaaaatgatgtctaatatcagttatacgtgcaagacttatagctgatgagcttttttgtttatctatattcatgttttactttgatgtgatgattaacagagccttattatattcgccttgctttcttttttatcatttctgttatagccttcatgctccaagatcaggaagcacttgctgcagaggtaactgatcaccaaaccaaacacacatatctctatatctttctcttgtgttatccctggtttctctgtttaattggatttctctgttcgaatcagatggaacgcactttcatcgctatcaaacctgatggagtgcagcgaggactggtttgttacttgttattctcttgtaatttcatgtcttctttattcaaatgctcaaaactcttaaatctttaaactccctccagatatcagaaatcattacacggttcgaacgcaaaggatacaagcttgttggcattaaagtcatggttccttcaaagggtttcgcgcagaagcattaccatgatctaaaggagagacctttcttcaacggcttgtgtaacttccttagctcaggccctgttgttgccatggtaaagaagcaactctcacataaaaccgacttgttttagctctaatgatccaataagacattgtttttaggtatgggaaggtgaaggagtgattagatacggacgtaaactgattggagccactgatcctcagaaatcagaacctggaactatccgaggcgatctcgctgttgttgttggaaggtaccattctatttttatgacatatgtatatatgattgcttgtctgttttctcggagattatagttttgcttttgttttttgggaaattgcaggaacattatacatggaagcgatggaccagagacagctaaagacgagatcagcttgtggtttaagcctgaagaactcgtttcttacactagtaacgctgagaagtggatctacggccagaactgaactattccctctttctcccttattttcaaccgttagatcagacataaataattacttcttttgttttttcttttacccaaacactgaaaacgtaccgggaataacaaatttactgcatttgttatcaagtttgttctaatagacccaatgaaattaggccacgtgtgcgatcatgtaaccggtttaccgtaatgtggacttgaaatccgattagcaagcgtaatgttgttttaatttctcgttggaatccgccgactccattataaaatctcagagaactagttcagctgcgagttgactcgttcatcggcttcttcagaacgatactttagcttcgacctctctctccgatcatcttcttcgtcgctttccctaatcgttttctcttgcaaggttcttacttcataattcgtaagagtttcctcctttcttgacgagtcctgatataggttttgattcgtgttcaattgaattgttagggtttagtgcttctcagggattcggggaacatatacttaattgttttcatttcatgcttggattaaatttctttatcttccctggattcgattcttcctttatcttctatcttttgactctcttgactaatttctcactattgtaacggagttttgtttgatttgtgtcaaatttttaaagaacagtgtataatttcttacatatcgtataaaagtttgtgtttttttcggtaaaagaatttgctttgtttgtgcagatggagactggaacaccacttatagcggagaccattgccctcactgaaaagaaagtcgccatggctttaggtatttttaatgttcatgttcctcatagcttctatgtatccgcttgtttggttgctcatgataatatttatactttcttgttttagatgatattatcaagttggcaaagagaaagaccaatgtgaataagggcaagaaaccaaggagagaaaaggtataaacccttcataaaggtctcttggcttacatgcctcttgtctttgccagacgttaatgtcattgaactggtcgttggcatttatatataatttagtttttttctgtgcagaacaaaaaccaaaactttaatggtgctgcgagaaataatacctctaatgtgcgccatcatatgaactcactttctgctgttagacaggttagctttgcagtgtttctcagttgatctgttgtctatcattacgatcctttttttattttcttttgtttggatttctttttgtaacttatctcttacttttcagggtgctgttggtaagagaaggtctaggttccaaggaattcaatttcctgtaacaacaaacattgctcgtaaagcttctactgctgctccactcgatttccgcggtagagcttttaatggtggaaggatgactagtgccaatcagtcaaggtctagaatgctggataactctctgacctgtttgttaatctgaagtccttatagtatcttcgattgtgtctgattcaagaagcttcttttctaagctcctggtcactagatgactgcatagctatacagatttatgtagttgagtttatgatgatgcttgaaggagtcagttcatattttgggattggagatttgggtagaagaaaacaattcagaacgttaaggttgagcataaactttgctgatgagtggctagggtgtttttctcaagactgggttggcctttgatatgaccttgggtggttatggctaggttgagcataaactttgcttttggttgaagttggtgtttttagttattgtcagagtaacaagtcaagcaatctgatactgtgcttggcctttgattttacctcagtggattcatgaaactcatttgcattcattcagtctcctaggtgttatgtttcatcttcttgctacatcctgaagattatagcttcctctctgaggttgtgacactgtcttggtaaatacctgttactgggaaaagagtcagactcaggatcttcgtcaatatacattaattgttacttcgttgtacttcgggtcatctctcgagctactctcttagtcattgataagttgctttgtcggaacaaatgccatcttttggtctgttgaccaggagatctgtcaagagcatgcactttttctgtctagtttaattggaatttggagttgtgtcagtgtcttggcgcttttaacactgggaagtgaagtgttgcatccttataatgccatccttctttgttacttggataactggatttcgcttagatccttctatgtatgaagaggttcagcttttgttgctaacaactcgataacagatcattttatctgttgatgccagtaccgtctgtacgtcttttctcggttcctcagcacttcttctttgtttttttgtgcaggcttattgctccaccagttcaaaatatatctgtacaggctagagtcaacgcaaaggtaacttactcatgattatctgttaggttgcattagactagcttcttagtatctctcccttggacgagtattcgttttgatatgtttatgggggaccataagatgtgcattttagccttctgctgttctgcatccgtagctatatctgcctgttgatggtagggagtatctgaaaggtttatgaattgaatgtggttgtaaatctttatgggtttgtaaatcccagaccatggaatgtgataggggcttgatctggtaaatgcttggtgtgataactgaatcgaatatcactatatccaataactttatactgaatgtttggagggctaataacaattgatcttcttaatctgcagaggcatgaggtagatcagaaagtagaacacagaggagggaagaggaagacactggactctcgctttgcaagcatgaaagagcagagaatgacgattaacaactatggtgttacagtgcaagttccaagattaccaccatgggttagagccagaagattttcccaatgagaaaccacaaagcttttacgggttgttccagtttagaatttggcttttgggtttagaatcttgttaagcaaacactaagcaatgcaattcttttgtaaacatattgacttttagtatcatgaaagaattttttttgagtcttggttcattatatagtcgcatttccacatttctgtcaattacatgtttgcctctaagtgagtacgcgtcgtcaagaagaaagcctatcagccaagtatgtcttaactcttaaggaatgcttcctgtataatctagacaaatagagttgtaacatttaaatcttcaaaattgggggtgtagctcatatggtagagcgctcgcttcgcatgcgagaggcacggggttcgattccccgcacctccaattttgttttttgttatttctgtatcttccgttccttgtatatgtggcctcagttaattcaggcgaaagaaactcgcaactttctctgtttcctccattccactttttcgaagatgtaactaatttacttaaggaaaacaataaattatgatctttagtaaatatggcctattccaaaaactgaaccaaacaaaatatttatgtttgattttgagttaattacacattaaatttttaatcacacacccagaagcagctaaaagacttcgacctaactccatcatataattatcttttgaatttatcttgaagaccatatataattatggcccaaagactccaaactgactctttgtttttagtgtgacctaatcaatatcactttcatatgttgtccaaaaaaactatacgacatacaactcgttctcatattttacagtgtacacttaacactttggtcacacgtattacgtaccgacatatttatatgcatagcttgagtatggagactgcgtcaaaaacaataaattaactatatttaaagaaacttggcaatcatctagtataaaaatagtcgattttttttctcttgtcaatccacgttaattaatctatgctttattatcaagtgaattaaagaatttgacgtaaaactggtgtattcaatggattaacattgaagcttattcacaaagtggtcggctattgatttactccttagacttgctctaattttctttcttaagctttttaattttggtacgtcacttagtttgacaagcggagctgtttaagtgaaccacaatatattaattctctaaacgggttattgtacaatatattaaatcaaaggaagttacgatgaccaaattaactttcataagaaaggaaaacaaatattaatttggagtttcaagcaatattacatctatatacctttctattggtttcttataatgttcacgagaaatgtaggaaaactataaagtataaactgaaaacagagaaaaagttgataaaagaagaaaataaatatcacacatttcttggctcatcactcaagtcacggaaagtctttggagaagtgtagctaccatttttgttcattttattttggatagaaatttaacacacacttaatgatatggtttgaggaaatagcttatattaacttacctttccatgtatctatttatattttgcttaataataatgtaaacgcaataacatatattaaaacaaaggaaataaaatcttaatatatacctaaagttacacacaatcttagaatgctagcatactcaaatctcgtgaccccgaattttctggaaaaatcaattctacttcttctacctaaacagtttaggcttacaaatccatccaaatttatccattcgctttgttaaatcttaattgagcctaataaaataacatttgttaccaaaaaaagaagatcaactatataaatacacttccattaacaaaaacgtcaaagggtaattaagacaattcacaacattccggtatattcgcaaccaaaccaaatcctgccacgtagcaattatttcctcttcatttttctctctgtctccctcgaagaaacgtagaaatcagaaagtaaatcatacagtcaaaaccgcttcttctataaaaccctttttagctcaatcccaaaacgcaataaaaaacaaaacgctctccagaatttcgaaacttctaagatattttgttttctctcttaacgatggcgaagagtgttttggttaccggcggcgctggctatatcggaagtcatactgttcttcaactgcttgaaggtggttactccgccgtcgttgttgacaattacgacaattcctctgctgcttcgcttcagcgcgtgaagaaactcgccggcgaaaacggaaaccgcctctccttccaccaggttctgttttcgttctctctctccgcggaaatgaaaaattctcggtgctgatttggtttaggaaacgtgtgcttgaagaatttcgtatcatcgttttcatatggttctggttaatatttgtgtacactatgtggctaagttttctttgtgtgtacacataatcatgaattaagtattgatgatgccatgtgaaagagtaatttaatatttagccttagtgctataattaaatattgacaaggttgatctgtctgtgtgtgaaattgggatgttcttggggagggctaatcagaattttatcattttattaaacacagaacaataaagttatagtctgccattgcagaaatcagaatctatgtagtcattttagtttctgaaatctttgtttttgtacctgcaggtggatctccgagacaggcctgcgcttgagaagatattctcagaaacaaagtaaaaaaagcttttcttttttatgattaggctgttgatataattgaggggtcgaagtttaatggaaacgtggaattatgataggtttgatgcagtgatacactttgctggacttaaagcagtaggtgagagtgtggagaagcctttgctctattataataataacattgttggcactgttactcttttggaggttatggctcaatacggctgcaaaaatgtaatttttttccttcctctctctttttctaattgccaccacatgcattccctttttgagtttgtcttgtttgatctcattattggcttttactactctgttttccagcttgtattttcatcatcagctactgtctatggctggcctaaggaggttccttgcactgaggagtcaccaatttctgccactaacccatatggccgtacaaaggtagcacctttagcctgagtattgacccaagcccaccttgtgatagtggtgatgaatgataataatcaggaaatgaatctgactgagattatttgcttgtgctgtgtaagctttttatcgaagagatttgccgggatgtacatcgttctgactcggaatggaagatcatattgcttagatacttcaaccctgttggtgcacatcctagtggttacattggtgaagatcctcttggagttcccaacaatctcatgccttatgtccaacaagttgcagttggccggagacctcaccttactgtctttggaaccgactacaagacaaaggatggtacaggggtatgtgacttatgatgtcttatagacaacaaaccatttgacagatttacattacaatcttaaattgtgatatattatggagtatgggagataatacaacgaattgtgaattatattaacagatattattcatctttgttgtgtttctttcaggttagagattacattcatgtcatggatttagcagatggacacatagctgctctgcgtaagctagatgatctcaaaatcagtaaggattatcttaaaactctttgatgtttctactctcatcattattcgccattggtcaggcttaatacttgttatggtcaggttgtgaggtatacaatcttggaacgggtaatggaacatcggtcctagaaatggtcgctgcctttgaaaaagcatccggaaaggtaaaccttagttgatttgttttactagctcaatactcttaccaagtgagccagttatttgcctttcgatacccatattttgagaactgattttgaactttatgatttattaccaattagaaaatccctttggtgatggctggacgacgtcctggagacgctgaagttgtttacgcctcaacggaaaaagcagagcgcgaactaaattggaagtaagctcatttcattttgttaacataatagcaataagtatatgaatgacaaacataaaatcaatgcatcaacatttcgatgtaattgtttggtatttaggcagttttttgttttgtttggtatggtgtcaatgcagggctaagaatgggatagaggagatgtgtagggatctatggaattgggcaagcaataacccctacggctacaattcctcctccaatggctcctcttcataattctccttttttaatttttattttgccttttttgcttacttatattcatataaacaaacacataaaaaaaaagaagagaaaggctgacaagtacccaaactttagaagaaattgaggaaaattcttgtactatcaatttatcatagaaactatatttattaaatcgttagttttcaatcgttgggagttttttttcttgcatttgtgtgtatttgttctatttttctgatatttatgtctgtaaatgtgactcattcattattgatcgacacaaaaatacaaatatctataacaaatcacgcacataactcaaaaccaaaagcaaacacacaaccataattgtattccgagctcatcaaacatctgagtcgatctgtaatacacggcatacgcaactaattggactaagccaagtactgtgcataacacaaaggaaacctgaagaacaaagaaatcaaatttcaatactgaaaaatcaaaattaggtaaatttaatgtaagtgaactaacaatttaaaagaacagaagacttacaaacatgatacgatcaaccggcagtaaagagatgacggtccaaacggttgcgtttgcaaacattgcaaaccctaccaagaacgacatatgttcgacgctcttagttcttacaactttcacttgcgtttatcattatttcgttgttaattttttttcgtattagtaatgcgaggatatttattaatctttgatattcataaactaaacttaccaatacagacaccggagaaaacgcaacagacgtccacaataacaaatcaccgaagacccaaagattcgatgaaacctaaagccaacgtggcaaatgtagttacagataccacctcgagtaccaaaatgataatcactaatcgctgcgtagagtgcttgcaaaatctaatatatgcggccaaatagatccccatgatcaagactccaatcccattagtgatgagggtaggagtcccaataaaaaaaaagacttacaaacataattggatccacatgtagtagatagacgatggtccaaacgattgcgtttgcaatgtttacatatttagcttgtttttgttccacatcataaaagtaattaaagaaatttttattaattaaagaacaagttctctcgaagatcacgaaggagagaagaaagtgcaatctttatagaaatatgaaaagattagatgatagtaaattataaagatatagatacatgcataacataagcaaaatatatacataacataagcaaaacataagcatattttgtttatgcgcatatcacattatatagactttgtttagcaatgtaaacatcataaaattgattcattatgtagagtaaataagaagaagacggagaaagcggtaaaaaaagatagataagaaaacataagtatatgtcttaaataagaaataataaatataggttatggtaggccttggcaaaaaaaccgtacctgaaaactcgaaccgaaaccgattcgaaaaaccggtttggggcgggtacgtatattagctatttaccctattgggttttagattgttgtacccgtggatataggataatagccgacccaaacccgatacccgaaagggtatcaacttatccgaaattacatatacttattcatagatttatacatataaaaatttattttatatttaatatttgaaccaaatacatttatatccaaatatccaataataattactaaaaactaaatgtacctatatttaaatacttaatactaaatattttatatatgcaaaatattcgtaaatgttttggatatttggacaaaatttcggttattcgggtaaaattcagatatttgggtaaaattttcgactatttgggtataatttcgggtatttgggtaaaattatcgactatttgggtacaaatttcgggtatttggtacaatttcgggtatttgggtaaatttttgggtatttggatataaaatacatgaatccgaaggatacccgtttttttcgagtatttaacggttctaaaattctatacccgaaccaacccaaacccgattagaaccgaaccaccgaagttttctatttactctattggattctagaacagtatacccgtacccgatcgggtattacccgaaccgacccgcatacccgaatacccggccctacgttatggctataagtgtatttactatacagaaaacgttaatccaaacaaagaatatggaaagcatgcatatctatgtagactaatgttaaggctattacaattggcaaccgaaaatttcgtgttaagttgtaatttagtatacgtacaaaatctaaaagtacaatagctttgtattaatatttgcaattttctaacttgatggattcagaaaagaacccaagaggtttcacttcacatacatgtatttttgaaaaataaccatgtcacttttacaattgttttttaatattaacaacggacggctacgatggaaccatcactcgaggaaatcgcgatcctacaattacatttagccgcgattcggtgagtaaacaaaccgagaacccgaacccgacccgccatctccagcttcgactctatttccactgttgacccggaccgatccgaattttgaaattgggcggcggagatttgagaactagaggccgccgcgagaggaaacgactgaacggagaaagtagctaacatacgcttggttcgacccgattcgatctcaccagcaggtacgaaggtataaccgatccggtttccatagtaaaagagctggattacattgttgtagtgtgagaaagctgcgcggttagggtttctaacggcggagaattgagaaaaggtgaaactaacggagctattagcgacggagaatgaaggaaccttgacgctagtgacggagatctcaggatctctcggtctaaagactgtgagataaacagtaagtgcggcgatgattaagaagactatgaagagcgtggcgacggcgcatgaagcgaggtttgaacaagacttcgacatttctcggtggagatgtttggtagcgatgatttaagtgttcactagttgggataaagagtttatttttggttaaagggaaagcaaaacgacgtgtaaaagcaaaaggatgttttgtttggacatagtgataacgttacaacggagtttggacttaagtgtgtgtgatgcagcgaaggtggccgactagagctaaataaattattttagtgaacaaacaatgtacccggaacagaaaccgggtttcgaagtcgggtcgaattgttgtaatttagagctaacagaacaaaaacctcctgagattgaataaacctccgattgctctattttcttatccagaacgaagagagattcaaatttcgcaatgcgattctagtgaagcttctttttcttctgtacatggttatcgtcgtaaaatggcgtctatagacaatgttttctcactcggtactcggttctcaatcccagaaaaccccaagagatcgatattgaaacacgcgactacatcgagtttctccgcgagaactcaaactcgatggagagctccaattctgcgtcggtcgtttacagttttgtgcgaattgaaaactgggtcatctagctccggcgagacgaacaattcccctgctgctgacgatttcgtaactagggttttgaaggagaatcctagccaagtggaacctcgttaccgagttggtgataagctgtataatctgaaggagagagaagatttaagcaaaggcaccaatgcggcgacgggtgcgtttgaatttatcaaaaggaagtttgattcgaagaagaaaacagagacagacaaaagcgaagagtctgtttatttgagtgatattttgagggagtacaaaggaaagctttatgttccggagcaagtttttgggccagagttatctgaagaagaggagtttgagaaaaatgtgaaagatttaccaaagatgagtttggaagattttagaaaagctatggagaatgataaagttaagctgcttacatcgaaggaagtttctggtgtttcttatacgagtggctatagaggttttattgttgatcttaaggagattcctggagtcaagagcttacagagaaccaaatggtgaattactaggattaagaagaagaataaaagttttaattttgatgtatggagaatattggtatgattttcttattgatctgtttcttgataggtcaatgaagcttgaagttggagaagctcaagctcttctgaaagaatacacgggtccgcagtacgaaattgaaaggcacatgacggtgatcacgcttttgttcatttagatcttatctactagattatataatctaatgtcctcaatatttttgtattgtgttggttaggaatttttcataacctattcactaggttgacaaacagatctattttgttctgttattgactgagtttatatgtttgcagtcttgggttggaaaagtggcggacttcccaaaccctgttgcgtcttctatttcaagtagagtgatggttgagctgggaatggtgacagcagttattgctgcagccgcagttgttgttggaggattcttagcctcagctgtttttgcagtcactagtttcgcctttgtcactacagtatatgttgtttggcctatagcaaagccattcctcaaactttttgttggcgtcttccttggtgttcttgaaaaatcatgggattacattgttgatgttctcgccgatgggggcatcttctcaaggatttctgatttctatacatttggtggtgtagcatcaagtctggagatgctcaaaccaatcctacttgttgtcatgactatggttcttcttgttcgtttcacactgtcacggagaccaaagaactttaggaaatgggtataatactttaatcactcaacacttttttgcagaatctattgatatcgcttgcgccctcaatcacttcaaatgtttttgcaggatttatggcaagggattgctttttctcagtctaaagcagaagctcgtgttgatgtaagtttctaaccattactcctatatgcatgtttcttcagttctaatacttttttggttgagttttttatgacttcaatgattatatttcagggttcaaccggtgttaaattcgctgatgttgcagggattgatgaagcagttgatgaacttcaagaggtatcgcttgaccaaatttctcgtgcaattactttagtatgcttgcgccagttcttccctgagtatggatctcttgttttattatgtgcattcttggttagcttagcctctaaaacccttaccattagggcttcactgctaccccatcaagtataaagttgcatgacattatttcgttgaatcttggaagctcgagagaaaccgggatctgaagcttactaacctcttagtctcattacgattatctcattttcttgatagcttgtaaagtacttgaagaatcccgacctgtttgataaaatgggaattaaacctccccatggagttcttctggagggtccccctggttgtggcaaggtatgtgtaaccatctatgctaatgccaatcgaaaagatttattgttaagtattgaatagtatttttgtagcagcattatactttagaatactaagaaatactatagataatcaaacatgcagtggtgcctgttgagatcaattctgctgaggttgatggttgtatttcagagtatgctgagtgtttggcaatatcatcactactccttcaacttaaacctgaaatttgtcttaaaaaagttttgaatgtttagttgctattaacaagttatgattgattcctattctcgattgagatcttataaaatctcaatgttttatacaattgtcaatgatcagtttacctcttattgtagtcgattagctttatctacaaggatcttttgacaacccagttgctagcaatatagagcctaacctaacctgatttgctttcgtagacactcgttgcaaaagccattgcgggggaagctggtgtaccgttctaccaaatggcaggatctgaattcgtcgaagttcttgttggagttgggtcagctcgtatcagagatctgtttaaaagagctaaggtgattggacatatgtgtatttatacatttctgtgcagagatgttaaatagtatttgatgatgtctatgtccttgtgcaggtaaacaagccatccgttattttcatcgatgaaattgatgccttagcaactcggtatacaatattttcgtcccttgtatctagattttgatatactaccttccttgcataatttttcaacttgagacggagtttaactgatatcgctctttatattttggtattcgttagacgtcaagggattttcaaggaaaactcagaccagttgtacaatgcggccacacaagaaagagaaaccacattgaaccagctactcatcgagcttgatggttttgacacaggcaaaggtgtgattttcttgggtgccaccaatcgcagagatttgttagaccctgctcttctacgtccaggtcgatttgatcgaaaggtttgtgattaacaaaatctagacactaaatcttctgttctcaaatttttgatagcagttattcgaattaataaacaaccaaacgacaatcgcaagccatttgaatttatcttgcattaattttgtagacttaagagtaccggatagaccgttaaaaataatcttcttatcagataagagtccgtccccctaatgcgaaagggagattggatattctgaagattcatgccagcaaagtcaagatgtcggattctgttgacttatcatcttatgcaagtaacttaccaggtataaaatctacaattgatgttgcaaagaatatttgttatgctcatggtgtaccttttcccatagacaacttatgtgtttgaacgtattggcctgtataaaactttgattaaagtaattgtttatatcaattacaggatggtccggagcaaaactggcacagttggttcaagaggctgctcttgtagctgtcaggaaaacgcataactcgattcttcaatcagacatggacgacgctgtggaccgactcactgttggtccgacacgtattggtttagaattgggacatcaaggtcagtgtcgtagagccacaactgaagtcggagtggcaatcacttcacatcttttattgcggtatgagaatgcaaagattgagcggtgcgatcgcgtttctatcattcctcgtggtcagacactgtctcaagttgtgtttcatcggcttgatgatgagtcctacatgtttggtcgtcttccacaactgcttcatcgtcttcaggtgcttctttttctctattaaaaaaactcttcactcatttctctaatattcgatgttacgagtttattatacttctaaaatttctatttcaggtcttgctcggaggaagagctgcagaagaagtgatctacggttcagatacttcaaaggcatcagtcgattatctctctgacgcctcatggctagctcgtaaaatcttaaccatgtgagaggcccaattttgcatattttcacattcccctttaaagtaaaagcttcttcttactcaagacttatatatatttggatttcagatggaacctggagaacccaatggtgatacatggcgaaccaccaccatggagaaagagacctcagttcgtgggaccacgcttagactttgaaggatctctctatgacgactatgacctcgtcgagccgccagttaacttcaacatggatgatgaagtcgcacatagaagcgaagaactcattagccagatgtataacaaaacagtttctctcctcaggcaaaaccaaaccgctctcctcaaaaccgttaaggtaatttcaaacatttaaccgcaattgcgttttcgtttgatttgttcatacttttattttcccatgtgtaggttctattgaaccagaaagagataagtggagaagcaatagacttcatacttgaccattaccctcctcagactccgttaaattctctcttacaagagcaaaatccgggaagtcttccttttgtccctgaacatctccggcgtgaatccggcgactttgtccttgttaatcactctaccgacgtcaatgctcaagtatgattccggcgtcccagagacatcaaatcactaagcttaggtttattcattgtccgtcattgtaacttcgactcaatctctgaagtttcggacagttaaatttacagaaataaagaaaaaaacttgggtcaaagacacttctttgatttgctaacaatagattagacaaacttaagtataaatttagaaacaaaaaaagttttaattccgaggaaatcgacggacaaaaagtttggttctttgtttcaaaccacacaagacagcaacaacacgagtcatgcactctctttcttaccttttttcttcttcttcatccgtcttcttttgctcttgttcctcgtgccctcttctcggtttctacagatacaggtcatagtcatacaaccaacgatctctcttgactctctccatctgtgcatgtcacacacgagtatagatctcttctctgctttatagatatggcgaggcgcggaagctgttcgacgatatgcctgaatgaaaaattgcaaaggtttcgaattgtcagaatctccgacaaggctgataattttaattccagaagcggcagcttcttcgagcgttctatctctctcgttctcttactctggtgcttcctcttcctcgtctactccaagcttggccaaagccatgatgattatggtaatgcaggtaagtgttcttccttgtttgagagagattccgttatcatttcaaatgttaattaaggaaacaaatttagggtcttttaacttggggggtatattccagagattgctatattgtgttcctctgaagaaatcaatttattttgtagatagaattgggaattacactgatggatcagtctcaaagacactgaattccacgagttctgtcttccctcaggccactgagaaagaaaacaacttttgtctcctgagaaaaggccagttacaagatgtgtatgagcatgttcttgtgaacaacgctttgttgatctgcaaagttgtgttgccagaacgaagaataagcaagaaaactctggaagctcgtgatcctagatatgtcaatcttgaagacaagagtctcaaagttaatggctcatcacagcttgtgaataatgggactcgttataggttagaaccagatggaaatgggtataactacgcttctgctatgaagggtgctaaagttgtggatcacaacaaggaagcaaaaggagctagcaatgtgcttggcaaagatcatgataagtatctaagaaatccctgttcagtgtcagataagtatgttgtgattgagctcgccgaggagacactggttgatacggtgagaattgcaaattttgagcattactcttcgaatcccaaagagtttagcttgtcagggagtctgagtttccctagtgatatgtggacacctgctgggagttttgcggctgcaaacgttaagcagatccagtcattccggctcccggaacctaaatggttgagatatctgaaacttaatttagttagtcactatgggtctgagttttactgtactctgagtgttgtggaggtatttggcattgatgctcttgagcaaatgcttgaagatctgtttgttccatcagagactcctcccagtaaaccagctatggtggaactaaaaactgcagatgaaaaacaagatggggaaataaaaagcaataggacagatcagattggcaaagaaactgaagctcagaagaagaaagatgatgttgtgaagacgattaatatcataggagacaaaaagtatgaagtcaaggagaagcataacgttttgaaagtgatgatgcagaaagtgaaattgattgagatgaatttatcgcttcttgaggattctgtaaagaaaatgaatgacaaacaaccagaggttagcttggagatgaagaaaaccctagtacttgtggagaaaagcaaagctgacatcagagagatcacagaatggaaagggaaaatggtaaattcaataatttcttatgattaagtctttgtccgttgaagaaactaccaatgaatttgatattctttgagcaggaaaaggaacttagagacctagagctatggaaaactcttgtagcttcccgtgtagaatcattggctagaggaaactctgcattgaggtcagtactcttttttattcctaaatagagaaaacagaggatttgaaatctcaagcggagagctatcccatgacttgaaacgtattcttagttgaccccatatttcttcttgtttcttgatatcagattggatgtagagaagattgtgaaagaacaagctaatctagagagtaaagagctgggagttctattgataagcctctttttcgtggtcttagcaacgattcggttagtctcaacacgactctgggcatttctggggatgtctattacggataaagctcgatcactatggccggatagtggctgggtcatgatactgctaagcagcagcatcatgattttcattcatttactctcttagatagcagagttaggcttaggtttttttttttataacagtgccttgctattaaagtttgtaaccctaggattaggagtagaaagaactttcattgataatattggacccaaactatcagtgacaactgattttctttagtgtttgatgttccaacttccataggtgtaaatgtaatctgcccggtgcttagaaaaccaaataaattgaaaaccaaaaataactaaaccgaaccgaaactgaattaaacgaatttcttcccaatttccaagagagacaacggttttgttttttagggttaaattttaaggaaccacaaaacaaaacaatccccttgatcctttgccctctttctcactattctcgactccaccaaaaaaagggtttaggaaatggtggtgtcgaagttcggtaatgataacgcggcgggaatgtcgatgatcgagcaattgtttccggaggttacatgctacgcgctcagatacttagattactcaagtctctgccagttatcaatgacgagttcctccatgagaaagacagcgaatgacgatgtcctctggagagccctttatttccaagtaattttggactctctttaaccattctgtcttgttgttgttgtagctttatggaataatgtgcttcttagggtttgaagaaatgagatttattcttgcactctcaggtttcttagaattcattgatattgccttaagactggtcttgctgatccaattgttttccttcatttcattctctacaacaaaggaatttacagaggaaacaaatggtggaactccggttaatgggtggaaggcgttctttgcagttactaaacaagtcatgactgtgaatgataaattctttagcatcctcgattcgaggtcacttcccagaatgactagtttatggctcaactctgactatgtcaagtgcttcaacggctctggtgaactcttcaccgggtacttacttacctaccctttactataatctttgtctttttatttttctagaaatgtggctccttccaatgtttagagcgttttaaacatcgtattgatttatcacttgtattgcttcgtttttaggtttgacgcagtgatgcaaagatgggacttctgtttcgacaactgggagatagggtttccaacgtatgtcattgaatcgaggacacggattctgagcagcgtggcttgggtctccacgatcgcgctccatcacataggtcaattcaacatcaccaatgtctttgagcttcataatggacgatggctcatggtgcaccaccactcctccatcatccccacaaacggtgtggagaattaataagaagttgttttcatccatagtgtgtatggtcttgaatcaatctcgccctagaggaaacaaaaaaatgaacaacaaaactgcgtattcggaattggttagaatattgatagtaattttctagctatattttcatcttaggacaaggttatgtttctaatacataagtcgaattgcttgtgcgacgagtttcaacaacttggctagccaaatgttttttcctatccaacaatacaaaataaaactgttaaacaatgaataataatagtgaaaaacaaaagttgttgactcatgtaatggcgtttctgtaactgcaccagattcgggatgatggtattccacgatttgggaacctccgaatctgacggacttaagaagagtactcaaatatcctacggctaggggaatctcacagagtaagtcaatgaaagtcaacatcgatcatttggaggaaacgtgaggaacaaagatcccacttatcccggaatatttgttttttagccggtccaataatctatcctactaaaaccattattattagttcactaataatataataattacaacatcagtgaccaataacatttccatgtctaaactttatttatccggctgcttgaattaataaaaaaatatgtggtccctttcttttcaatttacaatacattttataagttaataatttaattaattttttttgtatttaagtattttttaaaaattaatatatttgattagaaaaaaagaatatgataaagtgtccctctcatattcggattgtttttattgctttaacactcagaattatattttcccgtggaaaatgtcctaaattgaaacccaaacggataggcttctactatttctatcattttcaaaacttttatatttctgttttaagattttcaaaacacttgaccaacagcaatgaaaaatctggtagctgatcatctgataagttatttttaactagtgctgggataatattccataatttagaataaaatcctcaatataattactcttaagtcttaacactttcataagtgattatagactctttcttcagtttttttgttattcaaaaacctcaatattccttcttaatcaaatcagtattaaaacttgaaaccatgaaccatcaatgcctgctaatgtatatcgttgttagttcacgtacgttcaggacatcaacttctcctatgatgataatgtatgtttctgtctaacccctcctctacactttagtatttatccattgttagatgttgttaccttttcatgaatttaatattattttattaatttcttctctgaataactgtttcttttaaatgcatgagaagctggaaaaaaacctcaaagtggtaaaactgaaactgacccttttcgtaggattgaaaagttattctactttgtgttatttttgaaaaataaacaattatatacatatatatatatataatttatatgaaaaataagtaatatgttatccatctcataggagttatgaatctggactaaattgcgattagagtgtataccatagtttattaaatatttccactcgttaataaatgaattgtgtgacgaccaaaaaaataatgaattgtgtataggatatataggccatgaaacattcaaatggttggtctccacatgggtgcgcaaactctatctttgtccagccaatcatagtactatatatcttttgctattttctctctttattcttttttttttttttgtaaaattagtacgtattaaattttaagatcttcattcaaaaattgttttccatgttcagttaacgtgtccagaaaaacaatggagttaaatctagatatagttagagtgttgttgttcacacgtatagatacttatttaattattgtttataggtcttattcatgttttattttacgcatcttagaatcctcatttactaaattactaaacatttcacggcaagatgacttgttcaactacattatcagtatcatatactactattaagtaccattttaattatttaataatttccaaatgtgacccttgactcttaagagggggttaagggactctttgattagaaatataagttaaataaacacacacacgagcatatacatagtataaagtatagtccattatgttaacagacaggtgtcaagcaataaagctatttatacaaaactctatttccatccatttcaataatgagcagtgtaaagataatcattcacacaaatccttacattgattggaagtttctctcctttttgtaccattttatgatttataatagaactctaaaagccaagttataaatgtttaaaccctaattatctttcccactatcgacctctgtgggttttatgtgtagatgtacgtaaaagcctacttatcattccttttccgtagccacttataggacatttataacccatttcttagatttcgaactatacaaagattttccgagatttttgaatgataataataataacaaaactcgttgctaaataatgtggtttgaagtaaatttttggatatataagaagataaatcacgaaaaaactcgtggacatgttggcaacagaaacgcatttggagaaactcgcaacgtctcgtatttatttgaaacacacgttccacaaaaacattaccattaactcttgtatcatatatatacatatatattgtcctctctgtgtgtataaaacatgtgtatatatatatatatatatatattaattatagcttgtgatatatacctagcttaaatcaaagccaggatttgatagtatagacctaaaaaatgttgtttactgatcactaatcctcgatatgtaaaatagtaaattcaagaatcaagaatatcgaacacatgacctaacaaactaaagcaaatttaagatgaaagtttttttctgaacatatcatattttttttttttaaatgaacatattcattgcttctagatttttgctgtcaaatatgagtaactttctgtgacgtatgtttttatacagaggtgaaaacagggaatacgccatcaagaagcagggaatcagtaacctactattttaatagaagattcattaccttgttaatcacgaaattaccttcttgctcatgaatcaccaagtcaatgtcaatgtttttagagaaaaaaacacacatacataatcatcaagtcaatgttcttgcaatagttatacctttagtttcccccaaaaaaatattagccaattaaatcaaacaagaaagaagatattacttaaaaatctctacaaaacacatgactacatgagcgagtgaattcgataagggcttgaagaagtggtatgccgattgactattgggttaaaaatagatgaacaattgagattcttagaattagtaccactaaattgactaaaaatcagtaaatgattgaactcatttgagaccaaacatgtgggagatatatatgggaatgaatgctttctaagtggacacgaaaattctatattacagttgagattcgtttgaacaagctctggggaatatacgggggacaagataccaatttattactaaaataaatacgattaaaatagtctaaattgagaaagagaagatccggagatggtggtggtgggttttaaggcatcttgcttatttatatccttaaagggaacagaaattgtcaaaaatacgtcatacgtgacgttttctgtcataattagtaatatactaaacataattaattagaactaaacgataaagtaattagttaattggtatataaatatatggactatggagtataggctttttcatctttatattttgcttattatttattaaaaagtttggcattattcattgccaaatgactacagcaaatatacgattttgatgcagaaatttaaatttattgatcatctaaagatcgcacttagtttactatacgaaaatccatgcactacactactagtgatggtacaaatgtttaggaaataaaattattatgttaaattttgtattgaaataaatatttgggagttataatcttatcatataaaaaaactaaaataaataactaacccaacatatatgtatatctacattataaggatttgaatttatatggtaaacataactatactaacaaaaattattatattacatatcttggttaaattagtaaaatagatttatttagtgtttttcgtttgtcgcttgtcatactttttgagttccttcaatttgagtatcataagatttttaggaaacttaatcttgatgttataagtgatattaatcgcttatttataacatctacttatttatccatcatcgatcattttttaacggttcaaaagatttcacgtatattaatgttcaaaattctaaaaaaaaaacatttaatcaaaacatttttttctaagtatttaagtaatttttccggataatatttgtttggcaacgatcaacatatatcatgactcaaataaattttgatgtttctaattagtaaaatgtggagttggaaaaaagttcttgcaaaaggtgaaaagaacaaaaatcagagatggaaacacttcccacatgcttatgttagtcccaccatttagtggtagaaatgtaatttatccaaagaaggaggtcaaagctgcttcgtctctaatccaagtctagccagtattgttgcctgcataagagcaaacggtaaaagtgacggactcttaacgatgacgggtgttactgtttaatgtctcttgatcgacttttgttaccgtaacgacaacggcacgcgccctcacgctccgtaccagccttaaaagccaacacatttatgatttatccagtaactaatactaattccttcatccactaacgcaattgcatttaattgtttagtacgtatagaaaaaaagtaaaaagctatttataattataacttacaaagtctctttcaattagtacagtgtaaaacaaccaattattttctatattatacagtataaaggtgtttatcatagacccattatttatttgtttttgactaaaatatcaaagtgtattaaaacataaaccaaataaatttgaaattaaagttttttttttttttgtaaaattaaaactgatttttggtttaaatagagaagcaaagctacgcttttttttttgctagctctttttttatttaatcaaacaaaaattgaggaaaacaattattgttgtgctaagcatttctatcatatatttttttataaacaatacatttaatttcaaaataactttctactttcttcaaatcaagctatttcctagaaatttggtactgtctggataacaacatgtcttagaaagtatagtaaggaatttacaattggttatacaattaatgtatagcgtattattatatacgaaaaggtgtccaattttagacatacatataaaatcaatttattaaaaataaaagtattgaaaaaagagagagtgaaacggagataaaagcaaacggaggtgttaacttaaagacgggagagaagcgagtgagagattctttcttgtaacggcgttgtttgacgattatagtgacgaagagagacaaaaaaaaagagtttagtcttctttgtttgggagacgaagacgatagaagctggttttacgggagagaaattagagaggttacagttacagagcaggaaggattgcgttgcgttacgattcagatctctctcgatcgttacttacatgcattagagaacaagaaaacgtggagacggaatccaagggaccttcttcttcaatttaattcctcactttattacgcacccttcttttattttcgactgtttcagcttccggttcttcatcggagagagatagagagactgtgtgttttggtgtgactgatagaagatttaatcagctgatggcaaatcgcggaggtgagaaattgaccggagttttgtttttttcttcaattttccggcgacattaccggcgaaattaaccggtgtacattgtgtggtgaaacaggtgaatatctgtacgatgagttatggaaattatgcgcgggacctcttgttgatgttcctcaagctcaagaaagagtttattattttcctcaaggtcacatggaacaagtaagcagcttctcttttagatcggtgaaattttgagaaagattttttttaatgaaacatttctatttttggtggttcagctcgaagcgtcaacgcaacaagtcgacttaaatacgatgaagcctctttttgttcttcctcctaagattctctgcaatgttatgaacgttagtcttcaggtatactttccacatttagcaaaaccgaatttatctgatgatgtgtcgtccattagttaaagcaatatatatagatggatattgtagaaaatctatgaagaagctggaaatgattagactaaatatgagtggaagttctggatcttgtttgatttcttcatttctgttcttgtcaggcggagaaagatacggatgaggtctatgctcagattactttgatccctgttggaactgtgagtgacacaattagatcacttgattgtttttgttgttgcaacttccttaaattcaatgtttagtggatctctaaatgtaaactgtaggaagttgatgaacctatgagtcctgatccctctcctcctgagttgcaaaggccgaaagttcactctttcagcaaggttttgacagcgtctgatacaagcacccatggtggcttttctgttctaaggaaacatgccacggaatgtcttcctccgctggtattaggacacgcttactatttgtgctttgtttcccaccaaaatggcctttgatatgaatttcttatgttcttatcctttaggatatgactcagcaaaccccgacccaggagttagtagccgaagatgtgcacggttatcagtggaaattcaagcatatttttagaggtggtgaatccatttcttgttaactcagatcaaactttatgtatccatgataattgtataaaatgaatgataattcattaaacaggccaaccacggaggcatctattgacgacagggtggagcacctttgttacatcaaagagattggttgctggggacacctttgtattcctgaggtattatacttcacgctgctaccttgttttgtttcttttgatggtccattggtagattttgaacttccaagctatattatattttccagaggggagaacggagagttgcgagttggagtcagacgtgctaatcttcaacagagcagtatgccttcatccgttatatcaagtcatagtatgcatctgggagtgcttgctactgcacgccatgctactcaaacgaaaactatgttcattgtatactataaaccaaggtagacagttattactctatgggaatatctgaggtgagttttttcgacattctgcttatcgaattactctcggtttgagcaggacaagccaattcatcattagcttgaacaaatatctagaagccatgagcaataagttctctgtagggatgagatttaagatgcgttttgagggagaggattcccctgaaagaaggtagtctgaattttttctttgttatgtatcctgcactttgtccccaaagctattctcacacatctatttctttacaaagatattctggcacggttattggtgtgaaagactgctcccctcactggaaagactcaaaatggcgatgcttagaagtaaaattccttccacttttacatgttttttaaagtgtttattaagtgtgaaaactcaatcagtttgctacatgtttgtgtaggttcattgggatgagcctgcatcgatttcaagacccaataaggtttcaccatgggaaattgaaccgtttgtaaattcagaaaacgttcccaaatcagttatgctgaagaacaaaaggccccgtcaagttagtgaagtatctgcacttggtgaggcacaatctaaccgccactgatttgctagtacatagcttaagtttccttgctaaatctcacatgctgtgtttagatgtaggcataacagcttcaaacctttggagctctgttttgacgcaaccccatgagtttgcacaatcgtgcatcacctcacagtggagttctcctcagcaatgtcatcgtgatgcaaatgaggatgctaagaaatctgactggctaaataactcttactctgtgtcaaatgtagcaaaagactcaacactgaacgaccaaatggtttccccagtcgagcagaagaagcctgagacaaccgctaattatagattatttggaattgatctgatgagttcctccctagcggttcctgaggagaaaactgcacccatgcgaccaatcaacatatccaaaccgactatggacagccactcagacccaaaatcagagatttcaaaagtatcagaagagaaaaagcaggaacctgcggagggatcaccaaaagaggtccaaagcaagcaaagcagttctacaagaagccgtaccaaggtatatatatgcctacatggctaccgtgaagtgtatatacattgtgtaatctgtgagttgcaaaacagatacacattatgtataatgtttgcgggactgaacaggatcctgaattctttatcgctgaacaggtgcagatgcaaggcgtacctgtgggcagggctgtggatttaaatgcgctaaaggggtacaacgagctcatagatgacattgagaagctgtttgacataaaaggggaactgcggagtcgcaatcaatgggaaatagtgttcacagacgatgagggagatatgatgcttgtcggtgatgacccatggccgtaagtaacttactctttatctcttagtcaatagaatcactacacaaaactcatatctgttgacttaatttggtggtgcagtgagttctgcaacatggtgaagagaatattcatatggtcgaaagaggaagtgaagaaaatgacgcctgggaaccaactccggatgctgttaagggaagttgaaacaacactaacaacaacttccaaaacagataatcattccaactaatttttattctattctctatcagtcttcgtctccttcttatttgctttgtctttcggaattatcttgtttgtgtctgtgttttgttgcgcatggcttaaacaagaaactacatcccctgaggcaaaaaaaatggctcgtttttttggagcctcttatggagaaagggggtttatggggagagggttttctacttttaaaataggcttttggaagtttctttttcttctaggaacttgtgtgtaagagaaacaaatatgtaacgaacagaaagaaaaaaaaaaaaaaaaaaaaaaaaagagaatgagatttgtgaataacttgatgaaggacttttgggactctgggattataagagattaaagagggattatacctcatggctctcgtgttttctgattctttttcgtagttgtgttttctttgattttgtttttcatctaagttttaatgtatatataaaatttcaaacatggctttcttgtatttgtcaaatccccaaaggtacatatattatcaatatttaaaatgttaaataaacaaaactctagacctaaaactatttcaggttttcccactaaccttaacaatgattcaagattattgatgttttgtctgtgaggacatgtatgtggccgctcttgccaccatattcacaaacgtaattgtatgaagtatggaccaccttttcgctactacttctggatccccttatgtttgtaaagtgtatcattcccttatatcactattcactcacatgcattaaaatatcgaatgctgcaaaggaaaaaagagttatttttctctttagatatcatttgggttatgcatattacttggattagtccaatatgtcgtgtacaaccattctcgctgcaaaacaactacaatatgtcaacatagtataacacatgctgatctggtgagattataaattgtgaagtttgtctttataatatgtacatatagtatttctttgattatgacaagtgtgtagaaaatgttaggatattattctaaatcccacatacgaaagattagataatgattatccaacatataagttcaatctaattttaattagtgtatcatttggggaaaaaaaatcgtgcatatctggttgcttggtccaaatatctatattttctgacggtccaatatttatatacgtaccacataaatacacctatacgaatctctttactaatacgtcgataccgttcatagttaatgacgttatttactgccgagataatgaagtgatgatgtaggttatttattgccgagatttgtgaaggcagtggatctcacaatccctatcttttcctcttcttttttttctttttttctttccatatatagagaagtttaaatttaattgtaccattaaaagctcaccaaataccaacttatacatacagtcagtatctatatcaggaatttatatgtatgtgtgtataccgaataatagtaaactcattttactaataaataactttgttttattatatatttgataaacaacttgttataaattattttaatatgttaaatttgaacttattaaattttaagtaatattctagtgacggaagtatacattgtatttaaattgcatagatgtaattacttattttaaaaacttatagcactattcagtgatttacttttccaacctaaaatcgaggtgtagaatgtctactctggaaaaaaaaatcgcctataaaatatcaatatcaatggtgagttttgttctatgtaccaagtttctctaaaacaatttgtctttctattaaaaataaagagtaccacgatggagcctcacagaaaacactcggtcggcgacacaaccctccacacgtgtcatccttgccggcgcaccattccatatagaatctacgccgtatttcacacgtgtggcatcatagccctcatgtatcaccatgtacactcacttctcacagcaaacacaactctaatcacgtctctccttctcctctccgatattgttctcgccttcatgtgggcaaccacaacttccctccggtataaaccggttcgccggaccgagtaccctgagaaatatgcagctgaaccggaggacttcccgaaactggacgtgtttatatgcacggctgatccgtacaaggagcctccgatgatggtggtcaacactgccttatcggtgatggcttacgagtatccgtccgataagatctcagtctacgtatcggacgatggaggttcgtcgttgactttgtttgctcttatggaggcagctaagttctctaagcattggttgcctttttgcaagaagaataatgttcaagatcggtctcctgaagtttatttctcatcaaagttacgttctcggagtgatgaagctgaaaatatcaaggtgcgtattattctactaatcacttataattaggaatgtttttttttttatcgaatgttaaaattgtcattcattttggttacgttgaatagtggggaataacatgtttaataaaaaaatttggacaaaaaaacatttatatttttcgtggaaggagtaattaataatgacaaataaaaaataaaatgagtacaaaactacaaacagaaaaaataattatttgctaaatcaatggggagcgattgttgtgttgaagaagtcacttcagaaccttatcgtatctcttttcgacgatagtggcaatcttgttcttttatgacctaatactttggaagactgtgactcgtcgtagtgacctacaacaatttctcccaaaaatatatacgactataggagtattagtaatctaaatgatagaagtttttctttgtttgaattttcagttatccatgattgcgcataagtaaagtaaacttgaattggatatttcctgcccaccattactgtaagcatttccttgatatatcatcaattatgaattaaatattaaacagtaattttaaagttgaacctctaaaacaaaatggaaagacttgttcagaaaaaaaaaagatattttatggcaaaactggttgacatatccatagaaaatggagagactgaccaaatattgtcaatttcaataaaatatctctatgataaaaaggacaaattggtcgtctaaaaaaatagtaaaagtaaaaagtgtatgagaactcaatagtacactaaaatttagtaatacttctatgttattattacatgtagtaaacaaagttgtcacaagtagtaagatattttcaaccagtgttataaataaatcgtaataaactatacaagagagctgtcaaaaaaaaaaaactatacaagagaaaaataaataaattgtgtggtgtataattgtttcaccgtgtaacagatgatgtacgaagacatgaagagtagagtagaacatgtggtggagagtggaaaagttgagactgcatttatcacatgcgatcaatttcgtggggtattcgatttgtggaccgacaaattcactcgtcatgaccatcccacaattattcaggtaatttaaagaaaaaaaaagttcaaatattgttttctcactactatatatcataagaaaattgcattttgaatatatttactagacaattataccttgccatatgttaattcttttgtcttgacaaaatctcaactaacatttatttaaggacaggtgctacaaaatagtgagaatgatatggacgataccaaaaaatatataatgccaaacctaatctacgtttcaagagagaagagtaaagtttcatcacatcatttcaaagccggtgctcttaataccttggtatcaactaaaaaacctatctataattagtttttggtttcgtttaattttagttaattccgtattttctttttattatagctacgagtgtctggagtgatgacgaattcaccgatcattctaacactagactgtgatatgtattccaacgatccagcaacaccagttcgtgccctgtgctatttaacagaccctaaaatcaaaactggtttagggtttgtgcagtttcctcaaacatttcaaggaataagcaagaacgatatatatgcatgcgcgtataagcgtctctttgagatcaatatgattgggtttgatggtttaatgggcccgaatcatgtgggaactggttgtttcttcaatcgacgaggtttttatggagctccatctaatttaattttgcctgagatagatgaacttaagcccaatcgtattgtagataagcctatcaatgctcaagatgttttagcattggctcaccgtgtagcaggatgtatctacgagcttaacaccaattggggatcaaaggtaagatataaccaaccctagctcgtacctttatctagtattgatttccatttgttatattttttcatgaaaactatatctaaaggaaaatggacctaactaatatatataagtgacatacacaaatccactaacgatagggtttttttttggtaaaacactaacgataggttatcgatagaaaatccataaaagttaatatggtaccagtgatatagaagtgacatgatctagatccgctcatttttaattgattttgagttgaaagtttatgaacctcaaaaccaaacaagtttcattctaggttaacttattagaattagtttttttttgttcgttccatgtaagtgaactaagaacaattagtttctctaatcttagataattatagctaatttttagaaacaaacttgatttcttgattgatacgaaacatagaaaatatcttctttcataattgatagtctaaagtaagatcattggttgtaaatcataatatatttgtttcctagtttgttataccgtataacttcattttatcattcaaaactatgcagattggattcagatatgggtctttagtagaagactactacacagggtataggctccattgtgaaggatggagatcagttttttgcagacccaaaagagcagcattttgcggagattccccaaaaagtctaattgatgtagtgagccaacaaaagagatgggccattgggcttcttgaagttgccatctcaaggtatagccccattacctatggtgtcaaatcaatgggtctagtaacgggagtaggctattgtcaatacgcatgttgggccttttggtcacttcctcttatcgtctatggattcttgccccaacttgctctcctttatcaatctagcgtctttcccaagtcatcagatccatggttttggctttacatcgttttgttcctcggtgcatatgggcaagatctactcgactttgtattagaaggaggaacttatggcggatggtggaacgatcaaagaatgtggtcgataagaggattctcttcacacctatttggcttcatagagttcactcttaaaaccctaaacctctccacgcatggattcaacgtcacaagcaaagccaacgatgacgaagaacaaagcaagaggtatgagaaagagatttttgagttcggcccctcttcgtccatgttcttgcccttgactacggttgccatcgttaacctccttgcttttgtctgggggctttatggtcttttcgcttggggagaaggactcgtccttgagctgatgctggcgagtttcgcggtggtgaactgcttgccgatctatgaggctatggtgttgaggatagacgatggaaaattaccaaaaagggtttgtttcgtagctggaatcctcacatttgtgctgattgtgtcaggttacgtcttcctcaagtaactggacccattatggttggttctgtcgtttcagttaaactaatattacatctgtattgtggtaattaggagagaataatgtgatgaatccatttctcacctcattttagaacatacatttcggtatattgcgtctgtattgtagtaattaggagagaataatgtgttgaatccatttctcacctcattttagaacatacatttcggtttattgtataagcttaaattagtaattgaaaacgacatacactatctattgatattttcactgattaatacgactgtattttttatatttcttaatggatgttttgagcacaatttagtaaatatgggccgtagagatatgctacttcgtcaaaatgttaaaacgtctttgagatattttgagatataatagacgataagacaacatttatcttgcttacttcgatctattgtatttatttgtatttataattgaagtttcaccgtacaaatactttatatttatcttaggtttataacaaattaattattccctaaagttttaaaataaaatatttccctagcgagctagtgggatattaattatcatactcaaagtagtcgattatagaaactaaatgattaaaattttacgtagtctggctctgtttttatctcaaatttctttgcaaataaaaacacaataaatcatatttacttgggagaaacttctatcacatattaatatttatcaagaaaacttcaatcatatttttcgtaaagtgttacttacctttatacaaatattccgtgtattcctcggtttacgattctttatgtctgattgtgtggaaaagtacaatcgatatttttgcaagaagttaagaagttggcacttggcagatgcgtgacgtgaatgaatcgtcaaggcagtgactctccaagccccagtcttcatccatttgacattttcgcatctttttcaagctagagaattttaacttaagttctccattgaaaatttcaaactatataaataaaactccacatatctcactaaaatctaacacgtgacaaaaatttaattacttaagtgtagtatatgttagtaattttctcaactcgcgagcaaacttcagttaacttgattttgataaaataaataacacatcaattatctgaattctttttaaaagaaacaaatatttcatagaattagtttttttttcattttagaattctaattgaatattacagaataaaaacttttacttactaccacacaataatagactttaaagttagttattgtaagtagaatgtattattttgaagttaaaatcgtgtatttatcgtgatgtaaaaatttaccgttctttcttataaactagtcaggctattctggtgttgaactacttcacttcacacgtgtcttttggagaagtagtttcattaataaacacttatctttaattttggcttcaacttttcaaaggcacataatgatcacactgtactgtatcatcttatctcataaatgagaaactcgaccataagaactgtctatagtgtgtatattcagaaaagttatcaatagttcaatactaagaaaccggcctatatatatatatttgtggtcactaatttctccaaaaaccagttgccttccgtaaaaagatggaacctcagagaaaacactcgacagccctccacacgtgtcatccctgccggcgaaccattccatacagaatctacgccgtatttcacacgtgtggcatcatagctctcatgtatcaccatgtacactcaattgtcaacgcaaacaacactctaataacatgtcttcttctcctctccgatattgttctcgccttcatgtgggcaaccacaacttccctccggttaaacccgattcatcggaccgagtaccctgaaaaatatgctgctaaaccggaggactttccaaagctggacgtttttatatgcacggctgatccgtacaaggagcctccgatgatggtggttaacaccgctttatcggtgatggcttacgagtatccgtctcataagatctcagtgtacgtatcggacgatggaggatcttccttgactttgtttgctcttatggaggctgccaagttctctaagcattggttgcccttttgcaagaataacaatgttcaagatcgctctcctgaagtttatttttcttcaaagtcacattcttcgagtgatgaagctgaaaatcttaaggtatgtatgtattagtttctttgttcctaactaatccaaattttagaaaaaacattgtttcaaaaagatacatttttaaagttttctatgcgttctaaattagttatggatgataaattatagatttcaacaaaaataatcaaatattcttggtttagatttatagaaagttgaatcacaaaaaactaagcattggttatcaaaattttaaatgttttttttaatatgtgggaaaaagtttaaaattagactagttatgatttaggaacatagggagtatttatcaactagtcacttttttctttctatttctaagtaaatatcatataaagaaaatggtttggatttatatgttgattaccatcaactaatcacgtataattaggtttaatacataggtcaacagaaatttacacataacagattaatagtcactgttgtcctttaaagccttacgacgttcttgtcgacaatcttaatggcgtttttgtcctttacgaccccaaaagtttgtgggagactgtgacatatacccatgatatttcctattcatttattgcagtacaatcatgacactttaatgatttcttctcctaaacgataggagtatgtattagttttcttaatgacagcagagaagtctttatttgttagaaagtttgaaacacccatgagaaaaagatatttaattgtgtggtggaacagatgatgtacgaagacatgaagagtagagtcgaacatgtggtcgagagcggaaaagttgagactgcgtttatcgcatgcgatcaatttagttgtgtgttcgatctgtggacagataaattcactcgtcatgaccatcctaccattattatggtatgtaactattttgtaatgcatggtaaaagtttcgtcacaaattaatgtttctaaaaactcgtttttatctattaatttgtggtgaaggtgctacaacataacgaaacagagatgatgccaaaccttatatatgtttcaagagaaaagagtaaagtttcaccacatcatttcaaagccggtgctcttaatactttggtatcaactaatccatatctcggttaaactgtcatttctatatttgtaatatttcgttaaccacaacatgtattttctttgtagttacgtgtatctgccgtgatgacaaactcaccaatcattctaacactagattgtgacatgtactcaaacaatcctacaacaccacttcatgctctgtgctatttgtcagaccctaaaatcaattttgatttaggatttgtgcaatttcctcaaaaatttcaaggagtaaacaaaaatgatatttatgcatccgagctcaaacgcccatttgacatcaacacggttgggtttgatggacttatgggaccagttcatatgggaactgggtgtttcttcaatcgacgggcgttttatgggcctccgactactttgattttgcctgagatagaaacatttgggccaaatcggattgccgataagcccattaaagcccaagatattttggcgttggcacacgatgtagcaggatgtaactacgagtgcaacaccaattggggatccaaggtaagattaaaatgaactttagctttcttttatgtatgttgattttttggttatgtttacagattttgtttcttttacatcaactagtcttctcaaaatccatatttataaacatattaacaaaatttttgtgtaattaacataaacacaaaacacacataaaaatgaaaaaaatgaaaaaaaagtatgtttgcattcacatgtaaaacaatcgactctccaatcttgatttctgtgacattgttttgttattacttactagccatttgtcaaactttacagataggtttcagatatgggtcattagtagaagactacttcacaggatttatgctccattgtgaaggatggagatcaattttttgcagcccgacaaaagctgcattttatggagactccccaaaatgcctaacggatgtaataggccaacaaatccgatggtccgttggacttcttgaagtagctttttcaagatacaatccacttacctatggaatcaagccattgagcctattaatgagcttaggttattgccactatgcattttggccattttggtgtattcctctcgttgtctatggaattttaccccaagttgccctcatacatggagttagcgtctttcccaaggcatcggatccatggttttggctttacattatcttgtttctcggtgggtacgcgcaagatctatcagactttttattagaaggaggaacttatcggaaatggtggaacgatcaaagaatgtggatggtgagaggactctcttctttcttctttggttttacagagttcactctcaaaaccctaaacctctccactcaaggatataatgtcacgagtaaatccaacgacgataatgaacaaatgaagcggtatgagcaagagatcttcgattttgggccctcttcgtccatgttcttgcccattactacggtcgccatcatgaatctgctagcttttatgcgtggcctatatggtattttcacttggggagaaggacccgtccttgaactgatgctagcgagtttcgcggtggtgaattgcttaccgatctatgaagccatggtgttgaggatcgatgacggaaaattaccaaaaaggatttgtttcttagctgggctcctcagttttgttcttaccgggtcaggctacttcttcctcaagtaacttcaccattaggccattgtaaaaaaaaaaaaaacacttcaccatgagggttaattttcaacaagaatgatatgaattaatgcatcttgctcaagctgaagcaagagagaataatgtaatgaatccttcttaatatttacttttttatctacaattagcgcgcgcacacactatataacctatttgaatcttggttatgattggtcacttcttggattcatatatttttgctataaaagtatacacaaacgtagtatacattatacattttatccatatatacgaatgtcttaatcatacaatcgtgtggaagtaatggtggttcatattactatatcgctttaagtaaataaatctcgttttcaatgtaattggaacatattgctatgtgttagattacgacattatgaggtaactatttgggtactattttaatattttttcatctcctctctcgccgacgccaagatatgtgaagactgaagacagttgctctcacaacccctatcatcagccacgtgtttttttctcctttttattcaacattttctccttttaatttctcaacaaataccatcttttagaaagaaaaaaacaagtcaatatatatttttattatttatatgtatgtgtttaaattaatttgctttcacacaattttactaatataactgacttttaatacaaaaatggtttaggtatttaaaacaaatttcagtaatagtctagtgaaagaactaaaccgtaagcttaaattaaccattcattttgtgaaactgttgaaaattgaaatcctaaaattgtctgggagaacatatcgactctttttgacaactaaactataaatatcatcaatctagtagaggtaagtttaccagtcttctccaaaacaatttgtaaaaatagagtaactaaaacgatggagactcatagaaagaactcggtcgtcggcaacatcctccacacgtgtcatccttgccggcgcaccattccatatagaatctacgccatatttcacacgtgtggcatcatagctctcatgtatcaccatgtacactcacttgtcacagcaaacaacactcttataacatgtcttcttctcctctccgatattgttctcgccttcatgtgggcaaccacaacttccctccgcttaaacccggttcatcggaccgagtgcccggagaaatatgcagctaaaccggaggactttccaaagctggacgtgtttatatgcacggctgatccgtacaaggagcctccaatgatggttgttaacaccgctttatcggtgatggcttacgagtatccgtcagataagatctcggtgtatgtatcggacgatggaggatcgtcgttgactttctttgctcttattgaagctgctaagttctctaagcagtggttgcccttttgcaagaagaataatgttcaagatcggtctcctgaagtttatttctcttcagagtcacattctcgaagtgatgaagctgaaaaccttaaggtatgtattacttagcagcgattgttctttttttttaactaattaggttttgtatgttcgtttttccttttttctttttttaatctcgtcaaatgcacatacgtaagtcaacacaactaaataaaatgagtcttaccgtactaattaaatttaggaaactcccttaagactgttcactggtatttaagttctttcctttagtagtctttcgtcgagggtaaattgtaattcatgatataacatcctttttctaacagaataaattaatgaaggaaaaaaaaaagttggacggagggactatagagggagacagggagtactttatatttataatgacaaataaaaataaaatgtgtagaaatagacaaaactgaatagggtaaaaccctgagaatgcaaattctaaaagatatttacaatacaatttcaaaaaatttagtatatttataaatacctcaataattgtggggtggttacgagtcatgacgagtgaacattgttgtgcttcatataattacgttcttgtcgacaattatggtgatgatgtgatatgtcctttatgactccaagatattgatattgcctaatcatttgttagtggttaaacatccatgacattttatcctaaacgagaggattattagctgtcttaatgatagtataagtcagtaactagtaattaacactatttgtttgaattttaaaaaatccattagacaaacatattaaaatgtgaggtggaacagatgatgtacgaagacatgaagagtagagtagaacatgtggtggagagtggaaaagttgaaactgcgtttatcacatgcgaccaatttcgtggggtattcgatttgtggaccgacaaattcagtcgtcatgaccatcccacaattattcaggtatttataaatatgaataaaaacatgaaattgcattttaaatatctttttcgaagaatatgcataaaattaagaacaatatagtttgcaacatgtggttctttaatttgttatttctatgtaccaaaatctcgattatttgacgataggtgttgcaaaatagcgagacagatatggacaataccagaaaatatataatgccaaacctaatctatgtttcaagagagaagagtaaagtttcaccacatcatttcaaagctggtgctcttaatactttggtatcaactaaacctaatatttacattagttcgattaactagcctattagtagttttggataacgtgttttcttttcattgtagctacgagtatcaggggtgatgacaaattcaccgatcattctaacactagactgtgatatgtattcgaacgacccggcaacactggttcgtgctttgtgctatttaacagatcctgaaatcaaatccggtttaggatatgtgcagtttcctcagaaatttctaggaataagcaaaaatgatatatatgcttgtgaaaacaaacgcctcttcattattaatatggttgggtttgatggtctaatgggtccaactcatgtgggaactggttgtttctttaatcgacgagctttctatggacctccatatatgttgattttaccggagataaatgaactaaagccttatcggattgcggataagtctatcaaagcccaagatgttttgtcattagcacacaatgtagcaggatgtatctatgagtacaataccaattggggatccaaggtaaggaataaaaaaatcaactctcataattaccgcatctagtattgattttcatctgttatgattttaacatatcttccgtttgttatacacttatactatatgcagattggattcagatatgggtcattagtagaagactactacacagggtttatgctccattgtgaaggatggagatcagtattttgcaacccaaaaaaagctgcattttatggagattccccaaagtgcctagttgatcttgtgggtcaacaaatccgttgggcagttgggcttttcgaaatgtccttttcaaagtatagcccaattacctatggaatcaagtcactggaccttttaatgggtttaggttattgcaactctccgtttaagccattttggtcaattcctctgaccgtctatggacttttaccacagcttgcactcatttctggagttagtgtcttccccaaggcatctgatccgtggttttggctttacatcattttattctttggggcttatgcccaagatctatcagactttttattggaaggaggaacttatcggaaatggtggaacgatcaaagaatgttgatgataaaaggactctcttcattcttctttggttttatagagttcattctcaaaaccctaaacctctccacacctaagttcaacgtcaccagtaaagccaatgatgatgacgaacagaggaagcggtacgagcaagaaatctttgatttcggaacctcttcgtccatgttcttgcccttgaccacggttgccatagtgaatctgcttgcttttgtctgggggctttatggtattctcttctgcggaggagaactctaccttgagctgatgctggtgagcttcgcggtggtgaattgcttaccgatctacggggctatggtgttgaggaaagatgatggaaaattatcaaaaagaacttgtttcttagctgggaacctccacgttggttcttattgtgtcaagttacttcgtcctcaagtaacttcaccccttaggttaattcacaacaataatacgtctggctggttcaagcggaagaaacacaatatgaatgaatctgtgtaaccaatatatataatgtgatggattacattttgatatcttgtatcagcaaaattaagatttacatcttgtatcgatctattcactaacaaaacttgtgtatttgcttatttccttcgggggtttgaatcaaaccggtgacgtttgaggagaatctggatggtcgttgtcgtcatcaacagaggttttggtggaggagatggagacagaggatcgacaaagaggacaagtgttgtgagaataaagccaaaggtgaatacaatcgagatgaaatatgtgtttacataaaggcatttccaccaactcttcctttaactcgaattctcccaaacagacgcaacatctgcaccaattttcattatcataccaaatcaatcaaactttcaatccaccataacaaacaaaaaccaatggtcatagtaccataaggacttgaaaaagtataatattcacatttaggatatgaaattctagcagaattctagagtttttcgagataggtattttactatctagaatgaggacaaaaaatccagtaaataaaaggtataagttgtctaaaatcttggttttggtcttatctggaatttacactttccgtctttgcttttaatattccctagctctaagcaacggcctaaaaatacttgagcaaagagcatctcaattcgtatatttcaagaggataattctcacatatctcaattggtatactgttaacataattccttaaaagcccaaggtcatgaaaactcacagatgaattggaagtaaaggatttgataaattcattttgaaaatcaagacactgaaaatattttaaaaggttttggtaaaagtgagattttgaataaagatggatttttgtggggcttttaaaacagtaattctattcagacatttcacaagtttaaagcaggacaaaaagaaacaggagtaacttacagagaatctcttgttcctagttcttcattgaacaaaacaacatgaagcttgtctttgagctctactttcacatctaacaaacaaacctgcaaaagataaaacacaatcaatctcaacactactcttcattcaactttatagaacagtaccgtatagaaaacaggaccatatacatttcttgatgtgaatgattcagtatttttgcatacatatctacaaagacattttgtccaaaaaaaaaaaaatctacaaagacaatgagacacttactgaggggagatgcgaagaagtctggtggctcgaagaaacaggaagaatcattggagaaggagaggagagagaagaggctcttctcttgaggtaaaagagatagaacaagaggaagagaatgatggagaataagataggaatggaaaagatgaaggcttggtagagtttaagttgaattgcttgtgggtataggtgtggtgtgattggtgattgaggatcaaccataactttaaaaatcaatcccaacaaaaaaaattgaaattaaaggaaacacccaaatgagaactgagggttttgatgggagctaaggaggcacaagagaaggtatatatatagatatcatgtgtatgtgtacatctaccaaaagcaggtgtgctgcaaccatattggatttggacagagattctataatgatataaaatatctataactttctttttagtaaaataaaagtaacttttacactattgaaatgcatgtttatataccaaattgcaagtgatttcacttgcaagttgcaaccagttgtaaccattttattttgtagataagagatttaactctacagatgcaaaagttcaacatatatcctaagtacgaattagatcacatgtcccatgtgatgtgaatacatggttatgtacaaaatcagtaaggggaagtggtgtttaaagagccttttgggtatataaaatatgaaggtatatattccttatggctcttataatataatggaaaggtaagaagtgagtaagcaggtgatgagattccactaaacaagatgaatagaaactttataatgcttaaggattagattcaagtgtctcaatcctcatttatatgggacctctataattattataacccatcatttcatttcctgactcaggttggttttcgattatttgacactagctaagcatcaatcataggcttcttctttgcctacccttccccagaaaataattgaaacagaaacaaatgtaaaagttttttctttggcaactaggtttctacaccaaattctagaatgttttggttatcaagtttaagcaagcagtaaaaatcgatcaccaaattcaaccaatagaccaaaggcactacaatacaaccactgttactatgtacattttctataagcattcatttctttttctttttctttgcattcatttctatattcttctattacttttgaaagtggtgattacttaaataacgatatacctagggcctcttcatttggattaggacaagattctcaactcaaatctaagactttattttaataagattcgaaacaagtcaataacctaccaatacttgttaattaccgagattatatgattttaacttaagcaagtattatcctgctaattttccacaattcatcgaaaagaagatttcctagtgaaccactcaacacaaacaaaaatgaacagtcaaccagtaacatcatttctcaaatctgttaactttggggaaaatagtgtttatacgttttgaacaatagttttccactaccagcaaaagcagataagttttttttgacatcttttaatagactgacacataaacttaccaagatgattgtgcctaggaccccccaaataaatatcttgatttaggatttgatttgtgacccacattgatcagttttttccctttaccctttagtgatagacagctttttatattttcacgtttgtttatcaacaacttggcccttttagtatggcacatgtatatgtatcttgctcattctgttgaagtcttctatcgaattagcgaagacttcacatatcattttcaatttaaaaacatctacgcacacagagactaagataagcctaccatgaacattatcacaaaaaatatatataatctcaatatgttccattaactacataataaatatttatgtatatatctatcactggtggtaatggtggatcctgaggggtgacctccctcgctcatagtgggaatgatgaaaaagatatcactaacttagattctaaatagatgagtttagggattataaaactatatgataaagctttgctaaaatacaaaatataaagacccctgaacttttcaaatcgttttaaagatcttggtaggagcagacacagatgaacttttcaaggttacagttatgttgttcttacggttactggctaaagggctgtaatctcctattttgtctacactacattttcttactagcctctcaaagagaaagaaacttttctctctactacacattggattaaatccaatataacacatattacttcatatgtaatcataactacatatatttcatcctaattcattcatacgttcacagaattttctctggattggtacaccaaaatatagacctgctatgaattttcaagcaattcaaagaaatgcctagtcactaaatctttaacttcgattgataagcatcaagcaatgattttgaaaggctaaagtcacagaaagaatcaggtaaaaagggagaatttacctttttaggtgaaaatgtgatgttgatgtttgcttaaattccatagtcaaaacttggagggtgttgcagatgtgtctttgagccatcatttgtgccagtaaaagagctttctttgtgccagcaaaagagctttcacgcaccagaaattgttggggataagcaaagtgaaaggttggtagaggccaaagacacgtcactacagaacaataagtatatgaaaagctgatctctagaacctgtaaagaacctatgatacctttatcatgagtcgagcaaacataagccagtcgatatgagttatgtacgttatctatgtggacccaattttcgtaaaattgataaactcatttttagatgtaagttataaccaaacgagatacaacttttgatcaggagatcagacaataactcaatggtgtacagttgtatatcagccttaaaacaaattgtactttgattctattaagcttttcaatctacaccaatataattccgtactcacctctttgatgaaacagagtccatttagtggcttttactggtatcagattctgatggtgcttttgttgaggacagtgcatctgcggcttattatcagaacatgttctctgccatgctcagtctctggagaatgaaaagtattactgcaaagagaagagaaagaagtcatgtctgttctagagaggtttcctgaattaatagcatgacgaaagctgagacataaaaagaacaaaaatttacagtcaattaaaggcgtagtgttatattccacacacttttcttaacataaatgtatatatcgatgcatgttcagtgacatgtagattattgttacttactaaaagtaacagttaaaaaaatgtgaaccagtcccacagaatgctagaagaaactactgcagctctgtcgtatatgtatgaggttaaaatattctggattagctgaatactttcagccagaagtgaaaatatactgcattttgctagtcacgatctccaatgataactgtagaaacataccaaaaaaagggataagaaagcatgcgcacaacaagataagcatcaaaccttttgttgttggatttactgtgtctggactggactggacttaatgctccgtacttatgcaattgcctctttttgaacactgaaatcataaaaggaaacacataacaaacttgaagtgctcgcatgttcaactttacatagccaaaacaaaagctagtcaagaattcatcataagaagtttttgaatagaagagataaaagagttacagttcacaaaactaatggcatcaccagctaaattcaactaacgtctaatcgttttctgaaactttctgccacaaatttattcaccaaattatactctcttcagctagaaacagaagtgaaaatcagtaaaatagtcgattccaatacaaaaattctcccctgagaaaaaagaaatttactctgaaacttggaaacatatctctagtctacacaaaaactagccattaatcaaaagattgtgcagaaaactgagcctattcatttcagaatctctttgaagtccaaaatccatatcaaaagttccattataagcttaaatctgattcgatactagtcaaactcacttggaaaccaaaatcaaactatgaatcggtttaacaatttacctcaccattcgaaaaccagaacgaagcccaaagtcagcagtacgagattaatgcgagtagtacgagactattcagtattcaacgtaattaatcatttacacatcattcgaaatcccatcacgatttccaagtgaagaacgagattgagctctaaatagacgaatgttttatcagaaatttctactggatatctatacgcaaacgaatgtttacaataaatggaagcaaaacctttctgctggagatctgcaactctccagagaactatcgtcgtagacctttcttttctgcttcatctcttcttctccggcctttttgaattttcgataatgctattttgaatttcgataatgggccgccaaacttgaaattgcactctaggctttttttctactgcgtgagtgtgtgtcccaacactcccggaaaaaaaaaaaaaactttctaattttgacggtaaaaactactaaaaatattcccaatattttatatacctttttttaatatttagcttgttgttgttcataggtttttgaagttgtacatttcactgatgtggctaagatttcagttttgactgaatattttggaattgtaatttgtatatcatgaattggttgaacattaaccattatagtaagaagatgcaatcatgttggaggtttttatttaatttgttgttacgggatatgttttgatttaacatttcacatttgagaaaaagtctttcagtcatagttatcaaagtattaattcttctagtgttaattagataatgtcttttgaggaaggttatatcgataacttcaaatcgtcgatatctcaattcgctttcttcacgtaatttggtattaccaaatatacaagttgaccccgttatcttggaattgtaggctacgttgacattcttttagatttatcatttttttatctctgtgttttttcttttgtcaactaattattcaatagttacatatttttataattactattattagtttactttcttaatttgttcatgttcattaacaggcagccgaatttgaacaagttcctcttgcgtctgatgaatactaatacaaattcttgcggtgtgatcgctagctcctattggacattttccacatgaatcattgtttttttttattttgtttttttgtcacagaatcattgttttttttactttggaaatgtgatgtctgttgttttttttcttaacaggacaattgctatttatatttcgaatgtgattttcttcattcagcttttagtagtaagattcgtttaaaggatttaataatatataatgctctttgacgtcgtcaaaaccactgaataaagtgattttactggcgacaaaagacaaactatttcattgtatctttgttattttatatagccgaccatccataatgattactcttaaaatgttaattcttatgtcagtgactatactgcttgtcgttttgttttaatacaacaagggctaaaaaaattagaatctacgttttagtcgtattggtttgtctccgtatgttccataacataatttatgactgttactggggatacaattaactagagacaccgacataccgttaaaagctcggagagattcttaacacacaaaaataagtttttttcttaacacacaaaaatattcaagtggattgtatatatcatggcaatagataactaaagctgaaaagagttgaaggtttcagatgattcatatataaggaagagttagaacgttaatggcttttacgccggataatgagaagctcgagtaaagtttttgaaaaaacgttagaatagtgattgacaaattgttgaatactataatattgaagttgatctttaggaattacgtcaatttagaaactggtcggtagcaaattaaaatgtgttgtattgttgtatacgtttggttacgtgagacttgtataaatttacttaattgatataactaaaaaaaaggacttggtgtggtcaaatacgtgagttaattgatgttgcgttgggttctttacacctaaagtttagccagcaaaatctgtttaaattttttaaaaaacttattaatttgtaagtaatctgtttcatggcagaacgatcatacatatatatatatacggaaatcttgaaagaaatcgagacgataattccagatcatgtgatgatggtctgatggatctcatataacttcccgaccactacttctgtattgatgtataaacgccaaagagaatggtgagggtgacatttcttgtctaaaataatttaattgaaatatttaaactcgaaattaaaagatgacatattctacaactaaaagtaaatgaggttgtgggttttctttacatttttaatcattttttatggttgaattttatgattatcataatcataatacacaaactatcgaaagtggaacccgtatcacgatttttttgcctttattttattcgttgcctattaaaattaaaaggaagactaatgatactatcgcctgttccatttagatcctacacttcatgcttttttatatttctccttttggacatctaacatgtttataattactatagcctttaacgaaattttaagaaataaagccagcctataaatgaaatacaaaacggatcatatttgaggaagaccaatgtacatatgtgttgttatttgaacaaaaatttgtttctaatttttttcgaaattaatcttaaaagaacaaatgattcttatcagactttcaacaatattgatcatagtcgaaactcaaaatttcaagccaaattagaatcttaaaacctaacaatgaaaatatatgatccctcgtttacaaaaaaataaaaaataaaaataaaatatatagatatgatccctagtccttatttccgtaccaattatgatattgagagatagttttgggataaccattttcgtttactcgagataaattcactcatcagtttaaaataaaccaaaaccattaccacataagattcttatcccaatttaactattatatttctgctaattaattgattacatgttgtgaagtataaattgggccaactatagaggaatggtgtttgtttatgttttattttggctgctagtgtggttttcttaacttgttagcaatcattttactttttgaaaaaattgttagaaaactattaatgtgaatagttatttactcaataaatcttattgttaaccactgagaatttaaagcatttaaacatctgattattttaattctatgttaattccaggcattaaattttaagcgtaatttatagaagaagaaaaaaaatctagttacattccatctaagataggggtacaaatccatacaagagtctatcttctgtaattcttagcaagttgaacatttcttaatttttattttattttatttttggtcaaacgttttctttaatacaagtggcaaagatattctataacagttataatcatttatagttagggattttttaatcattttgtagtatttgtttttctcttttttcctaacaaagtttttggaacttttgatcatctctcgattgaaagcgaacatataaataatttttactactgcaaatttttaaaaagttaatattcgactttataaaagagatgagagtcaacaaaacaaaaagcaactaattttggacgtacgaaatgctttgtaaatacattgatatcacttatgtttataatatcactcatcccaagtgttggtcaacatttctttgataaaaattaaactattcaatagaacgaaaaccacaaaaaaattataaagaattattgataacaactcttcatgttaatcttatatatttttttaaaaatatttgtttttaggttttaatacaaacaacatgattctagtttattaaactaattaacgcaacttgatggattataaaaatatagcttaactaatccatcaaattaacaagtgaatcgcactataattctaaaagaatcaggtaggtccaggatttgtcttttctccacttctcaatttcccattaataatcccgaaaaggcattacgtaataattaatattttacgctgtagtattattttatgataaacatttccaaattttccaacacttaatcataatttaaggattaaaggaaatttgattggtgcattcccaccacgagtttgcttaacgtgtcgttaaatgcagccgtcggacttgacaatgcaaaaatgctacataatctaaataattaactctcgcaataagattcactaataataacatttttaacgacgatatataattttacaataagaaaaaaaatatgaatctaatatttatttaatattaatttactccattatctgaataatctagaatatgtcaaatatccttttattattttgtagctgtcgaaactatggtgaataaaatctcgaggaatatattagaaaacaaaaaagatctagaggaataataatattttaaatatttggggcacagttgtattgtgaagcagagaatcggttctcaatatattatccgaaaatgtcttaattttaaattttgttttttgtttgattctgcgatattggaatcacacactctgccaatttgacctttctctctcgcttctctttctctatccaatcggaaagagatcaaccaacgatagaggagaagaagaacttgcatacgcaaaaaaactttcccgggaaaattccagaaactgctttggaaaaatgtgcgagcccgatgataattccgctagaaacggcgtcactactcaaccttcgaggtcaagggagcttctaatggatgttgacgacttagatcttgacggttcatggccactagatcaaatcccttacttatcctcatcgaatcgcatgatttctccgatttttgtctcctcttcctctgagcagccttgctcgcctctctgggctttctccgacggtggaggaaatggttttcaccacgcaacctccggtggcgatgatgagaagatcagctctgtctccggtgttccttctttccgtctcgccgagtatcctctcttcctcccttgttagtctcgccgaccttttaagcctttttttttttagttttatcggaattgcgatacatattgatcgtatattggatttttgaatttcgttatgctaatggaatggtttaagctt

SEQ ID NO: 619 - DNA, 77567 bp, Arabidopsis thaliana
ctttctaattttgacggtaaaaactactaaaaatattcccaatattttatatacctttttttaatatttagcttgttgttgttcataggtttttgaagttgtacatttcactgatgtggctaagatttcagttttgactgaatattttggaattgtaatttgtatatcatgaattggttgaacattaaccattatagtaagaagatgcaatcatgttggaggtttttatttaatttgttgttacgggatatgttttgatttaacatttcacatttgagaaaaagtctttcagtcatagttatcaaagtattaattcttctagtgttaattagataatgtcttttgaggaaggttatatcgataacttcaaatcgtcgatatctcaattcgctttcttcacgtaatttggtattaccaaatatacaagttgaccccgttatcttggaattgtaggctacgttgacattcttttagatttatcatttttttatctctgtgttttttcttttgtcaactaattattcaatagttacatatttttataattactattattagtttactttcttaatttgttcatgttcattaacaggcagccgaatttgaacaagttcctcttgcgtctgatgaatactaatacaaattcttgcggtgtgatcgctagctcctattggacattttccacatgaatcattgtttttttttattttgtttttttgtcacagaatcattgttttttttactttggaaatgtgatgtctgttgttttttttcttaacaggacaattgctatttatatttcgaatgtgattttcttcattcagcttttagtagtaagattcgtttaaaggatttaataatatataatgctctttgacgtcgtcaaaaccactgaataaagtgattttactggcgacaaaagacaaactatttcattgtatctttgttattttatatagccgaccatccataatgattactcttaaaatgttaattcttatgtcagtgactatactgcttgtcgttttgttttaatacaacaagggctaaaaaaattagaatctacgttttagtcgtattggtttgtctccgtatgttccataacataatttatgactgttactggggatacaattaactagagacaccgacataccgttaaaagctcggagagattcttaacacacaaaaataagtttttttcttaacacacaaaaatattcaagtggattgtatatatcatggcaatagataactaaagctgaaaagagttgaaggtttcagatgattcatatataaggaagagttagaacgttaatggcttttacgccggataatgagaagctcgagtaaagtttttgaaaaaacgttagaatagtgattgacaaattgttgaatactataatattgaagttgatctttaggaattacgtcaatttagaaactggtcggtagcaaattaaaatgtgttgtattgttgtatacgtttggttacgtgagacttgtataaatttacttaattgatataactaaaaaaaaggacttggtgtggtcaaatacgtgagttaattgatgttgcgttgggttctttacacctaaagtttagccagcaaaatctgtttaaattttttaaaaaacttattaatttgtaagtaatctgtttcatggcagaacgatcatacatatatatatatacggaaatcttgaaagaaatcgagacgataattccagatcatgtgatgatggtctgatggatctcatataacttcccgaccactacttctgtattgatgtataaacgccaaagagaatggtgagggtgacatttcttgtctaaaataatttaattgaaatatttaaactcgaaattaaaagatgacatattctacaactaaaagtaaatgaggttgtgggttttctttacatttttaatcattttttatggttgaattttatgattatcataatcataatacacaaactatcgaaagtggaacccgtatcacgatttttttgcctttattttattcgttgcctattaaaattaaaaggaagactaatgatactatcgcctgttccatttagatcctacacttcatgcttttttatatttctccttttggacatctaacatgtttataattactatagcctttaacgaaattttaagaaataaagccagcctataaatgaaatacaaaacggatcatatttgaggaagaccaatgtacatatgtgttgttatttgaacaaaaatttgtttctaatttttttcgaaattaatcttaaaagaacaaatgattcttatcagactttcaacaatattgatcatagtcgaaactcaaaatttcaagccaaattagaatcttaaaacctaacaatgaaaatatatgatccctcgtttacaaaaaaataaaaaataaaaataaaatatatagatatgatccctagtccttatttccgtaccaattatgatattgagagatagttttgggataaccattttcgtttactcgagataaattcactcatcagtttaaaataaaccaaaaccattaccacataagattcttatcccaatttaactattatatttctgctaattaattgattacatgttgtgaagtataaattgggccaactatagaggaatggtgtttgtttatgttttattttggctgctagtgtggttttcttaacttgttagcaatcattttactttttgaaaaaattgttagaaaactattaatgtgaatagttatttactcaataaatcttattgttaaccactgagaatttaaagcatttaaacatctgattattttaattctatgttaattccaggcattaaattttaagcgtaatttatagaagaagaaaaaaaatctagttacattccatctaagataggggtacaaatccatacaagagtctatcttctgtaattcttagcaagttgaacatttcttaatttttattttattttatttttggtcaaacgttttctttaatacaagtggcaaagatattctataacagttataatcatttatagttagggattttttaatcattttgtagtatttgtttttctcttttttcctaacaaagtttttggaacttttgatcatctctcgattgaaagcgaacatataaataatttttactactgcaaatttttaaaaagttaatattcgactttataaaagagatgagagtcaacaaaacaaaaagcaactaattttggacgtacgaaatgctttgtaaatacattgatatcacttatgtttataatatcactcatcccaagtgttggtcaacatttctttgataaaaattaaactattcaatagaacgaaaaccacaaaaaaattataaagaattattgataacaactcttcatgttaatcttatatatttttttaaaaatatttgtttttaggttttaatacaaacaacatgattctagtttattaaactaattaacgcaacttgatggattataaaaatatagcttaactaatccatcaaattaacaagtgaatcgcactataattctaaaagaatcaggtaggtccaggatttgtcttttctccacttctcaatttcccattaataatcccgaaaaggcattacgtaataattaatattttacgctgtagtattattttatgataaacatttccaaattttccaacacttaatcataatttaaggattaaaggaaatttgattggtgcattcccaccacgagtttgcttaacgtgtcgttaaatgcagccgtcggacttgacaatgcaaaaatgctacataatctaaataattaactctcgcaataagattcactaataataacatttttaacgacgatatataattttacaataagaaaaaaaatatgaatctaatatttatttaatattaatttactccattatctgaataatctagaatatgtcaaatatccttttattattttgtagctgtcgaaactatggtgaataaaatctcgaggaatatattagaaaacaaaaaagatctagaggaataataatattttaaatatttggggcacagttgtattgtgaagcagagaatcggttctcaatatattatccgaaaatgtcttaattttaaattttgttttttgtttgattctgcgatattggaatcacacactctgccaatttgacctttctctctcgcttctctttctctatccaatcggaaagagatcaaccaacgatagaggagaagaagaacttgcatacgcaaaaaaactttcccgggaaaattccagaaactgctttggaaaaatgtgcgagcccgatgataattccgctagaaacggcgtcactactcaaccttcgaggtcaagggagcttctaatggatgttgacgacttagatcttgacggttcatggccactagatcaaatcccttacttatcctcatcgaatcgcatgatttctccgatttttgtctcctcttcctctgagcagccttgctcgcctctctgggctttctccgacggtggaggaaatggttttcaccacgcaacctccggtggcgatgatgagaagatcagctctgtctccggtgttccttctttccgtctcgccgagtatcctctcttcctcccttgttagtctcgccgaccttttaagcctttttttttttagttttatcggaattgcgatacatattgatcgtatattggatttttgaatttcgttatgctaatggaatggtttaagcttggatttaggtagctgcttaaggattgaacatagatttttggttgattgattgattgattgattctgcgtttgactttgtttgtcccttcttaggaggttatgtcaattacgttatttaggtctctttccttaattttctgcgaattctgaacctaaagtgtttgaaatttctcgtgtttatttatggtatggtgattgagactttattgttagttcacatcgatatttctggtaaaatcataaagttgccaaaaatagttaagttctataaaaggagtgggaagcaagtcaagtttggtactatagtatcttgaaggtgtgaattttttggtaattgcagactcttctccatcagcagctgagaacacaacagagaagcataacagtttccagtttccgtctccattgatgagcctagtcccaccagagaacacagacaactactgtgtgatcaaagagaggatgactcaggcgcttcgatacttcaaagaatcaaccgaacaacacgttttggctcaggtctgggctcctgtgagaaagaatggtcgtgatttgctgacgactttgggtcaaccttttgttcttaatcctaatggtaatgggcttaatcaatacaggatgatctctctcacatatatgttttctgtggatagtgaaagtgacgtagagctcggactcccgggtcgagttttccgtcagaaattgcctgaatggactccaaatgttcagtactattccagcaaagaattctcgcggcttgatcacgccttgcactacaacgtgcgtggtacactggccttgcctgtctttaatccctctggtcagtcctgcataggtgttgtggaacttataatgacctcagagaagattcactatgcacccgaagtggacaaagtttgcaaagcccttgaggtctggctctcttttctcactactacacatactccaccctttactctgtttatcctttctctgaattgttcctagaacttggtgtgaatggattagatttttgagttgcaagttttgccttgccggttatattgaggaataaccgttaataaaaggtttctgctcatcatttggcctgctattttgaagctctttctattcaaagcatggtttattctttgataataacaacaaattgatatcagtatcttgttagcttctatcttagttatagctttttttaatatctttcattttcttgtatccaaatagttctgtgtttttgtgatttgcttgagctttgaagtattttttcgtacagagggatataattctaataccttattaatgataacaagatttggttatttttttaggcggtaaatctgaaaagctcggaaatacttgatcaccaaacaacacaggttagctacatgtatcattttgtggattaccaagaaccatttaagcactggtttctcactgttttcagttaacttgatatccacagatatgcaatgagagtcgccaaaacgcgcttgctgagattctcgaagtgctgacagttgtatgtgagacccataacttgcctctcgctcagacttgggttccatgtcagcatgggagcgttcttgccaatggtggcggtctaaagaaaaactgcaccagctttgacggtagctgcatgggtcaaatctgcatgtctacaaccgacatggcctgctatgtcgtggatgctcatgtctggggctttagagatgcctgtcttgaacaccatctccagaaaggccagggagtcgctggacgagcttttctcaatggtggctcatgtttctgcagagacatcaccaagttctgcaaaacgcagtacccactagtccattatgcgctcatgttcaagttgaccacttgttttgcaatatctctccagagctcttacacgggcgacgacagttacattcttgaattttttcttccttcgagtataacagacgaccaagagcaagatttgctgttgggttctattttggtgacaatgaaagaacattttcagagtctgagggttgcatctggggttgactttggtgaagatgacgacaaattgtctttcgagatcatccaagcattaccggacaagaaggttcattcaaaaatagaatccattcgagttcccttttctggttttaagtcaaatgcaacagagacgatgttgattcctcagcctgtggttcagtcttctgatccagtaaatgagaaaatcaacgtggccactgttaacggtgtggttaaggagaagaagaaaacagagaaaaagcgtgggaagactgagaaaacaatcagtctagatgtacttcagcagtatttcactggaagtctcaaagacgctgcaaagagcctaggaggtctatccatttacttttcatgttttggttagttactggctagagatatttcatctgaactctatattgttcttgtcacagtttgcccgacgacaatgaagcgaatttgcaggcaacacggaatctcgcggtggccatcgaggaagatcaagaaagtgaatcgttcaatcacaaagctgaaacgagtcatcgaatctgttcaaggtactgatggaggcctcgacctgacttccatggccgttagttccatcccttggacacacggtcaaacatcagcacagccactaaactcacccaatggttccaaaccacctgagctaccaaacaccaataattcacctaaccattggtcaagtgatcacagtccgaacgagccaaatggttcgcctgagttaccaccaagcaatggtcacaagcgatcacgaacggtggatgagagcgctgggactccaacctctcatggctcatgtgacggtaaccaattagatgaaccgaaagtcccaaatcaagatccgctcttcacggttggtggatcacccgggctcctttttccaccttattctagagatcatgatgtatctgcagcttccttcgcaatgccgaacaggcttcttggttctatagaccatttccgaggaatgctcattgaagacgctggaagttcaaaagatctgagaaatctctgccccactgcagcatttgacgataagtttcaagacacaaactggatgaacaatgataataatagcaacaacaacttatacgctcccccaaaggaagaggccattgcaaatgttgcatgcgaaccatcaggctcagaaatgagaacggtaacaatcaaagcaagttacaaagacgacataatacggttcagaatatcctcgggttcaggtataatggaattgaaggatgaagtggctaagaggctgaaagttgatgcaggaacgttcgatatcaagtatcttgacgatgataacgaatgggttttaatagcttgtgatgctgatcttcaagaatgtctcgagatccctagatcctcccgcacgaaaatcgtaaggctcttagttcatgatgtaacgacaaatctagggagctcctgcgagagcactggagaattgtgacctgataattcattcgaactcttttgtaaatatgttttttgaattttattattgtttagggtttctttggacaaattaaagttgtaaaagaaacatttgtttgtaacttttaactgtaaaagtgtaagagagagagaggttagaagtaaattttagttgtaacttcatacattttatttttgaactttttcatatgaaaattaaagaaaaagcttgttagagaaaaacttcagaacccgaaaaactaaaccggaacataccttaaatattagtatatattatacttatatatagaaaatattctgatttttttagatattttaattatttttgtttatttttggatatatttaagtaaaattacatgtgttgttttgggaattttttaaaatttcaagtaatttgatagatttgcacacaaaattttgatattttaatatttaaataaatccgaaaccgacccgaaatcttaaaatttatggtcattactatgcataacataagaaaaacatatgcatatgaaaaaaattatgtgcatatcacatcatcttaaacaatcccagataatagaattttttttgcagattatcggtgcaaagctttctaaaaattctatagtactacaagtaaacatgttcatcgtggttttgtgttttaaccattactatgcatattataagtaaaacttaagcaaaacatatgcatatgaaaaaacattatgtgcaaatcacatcacctaatacttgtttagcaatgtaaacatcaagaaggaaaacaagctaagtttgttcttaaaatagccggaaaaccatacatcggtttctttattaaagaacaacctaaatttgttttaagtttattaaataaatattgttttcaatcacatatgaattaactagattaaaaagtttcaaatttataaaaatagtacgtagaaacaaattttgaatacttaacaacatatcagttctcacacatcatcactattagcttcatgatttttatttttattttattcaaatgtggtagtatatattatctgttttttaggatttatcttcaaatatatacatattagtatttaaatttagttattgttatggaacatttgaggaagaagcaaattaagggggagggaggtcaggtgttttattctaatagactaactgttatccttataatatgtagaaataatctctaataatatgttttgttcgcagatatcgaatggagtttgcacgtttattggattagtccaaattgtaatctatgtgtggtatataagaagtctagcgcaaggatcaccacagtggagaatgcttaaataccaaaatacagtacttttaatttaagtttgtaatgtttttctgttttattgttactttctatattttctgtgtgttttgtttaatattggtatttcttatgatgtgaaataacatacgttagtaagagtgtgtttttccatagttggtacggacgaatatatctatttaatgtcactatcttatttatgtcattcgaatgagcattctttgtttaaaaattttatgtttaaaattttataatattgctttaaataaaaaaaaataaaaaaaaaagtaaacgaggaaatatggatctacaacagacggattaaatcatgtaaataaaacttaaaaaaggggatcaaaatggctgccaaaaaaaaaatcggatcaaaatgacatggaactaggtatgcatgtcaaaacaacttttaacagcatgaaaactttgacttttgaggttaagaaggatagagataccaaatttgcttgctcaaagaatatagtactacattgtttaaaaccgaaccgaaccaataacccaatatgtttattaatttaattaactaattatattaataatattgtaataactaaactaagtaattattatctacaaaattctaacctttaaaaatctaaggttctacttctaactaaataactaaactaaagtatttattatttctaaaactttaactcttaaaaacctaaggttatacttctaacttctaaaaaataaaactcaaaaaaaaactttcgtatttcatttgttctttcgtttatacggctaattgatttttttgaagtaaactaataccaaaccaaatccaaccgaactaaaactggttcaaacacaaaccaaaataacttcggttgagtatggttagagtattacaaaacccaaataaaccgaacccaaaattaaaccgaaatgcacccctgataaatattattactatataaaatatatataactttaataattacataataacacctaaaaatgacataaaaagcaaaaatcccataatcatattttctacaaaattgtaaaacgaaaacctttatctgcgcatccagggaatcgaaccctggtcagtaccgtgggagggtactatgataccactacaccagatgcgctatttctgacaaacaataatcgttttatatacttatatttacattttctcggttcaaaatcgttattcctgtaatatattgatccatcccacgatcttcttttcttggtcgtcttctgaaacgctaatcggatccagaagccatggacaaaagcatcagcatcacctccaacgttagcacgacgacttccatggaaaagatcgaccacgccgctagctggatcagcgcaaccgtaatatccgctttcttcacctccctcgaacgctgcgcctgcgtcaatctctccacctctcatgacgacgacgacgacgacgacgacgaatcccatcaccgtcctctcgctctctccgccgctcctcatccaaacgacaccgtttagctctgttttttaacctctggtaatttataaatttaatccctcgtttgtttcttttgataatcgattggtgtggatttgtaatttcttgatttgaaaatgtatgtctactgtgtgtaaatgtgcatgtctcagaatttgattgttttgcgtgtatctgactttatatacttgggtttaaaatcagaatgaatcatcgtttttgcatttacattgaaaaaatatcaagaagagaatttggtagagatcatttgtttgttttgaagttttcttttgtgatcaatgtttctcgatttacctttttcatttcatttctgatctctgcgttcaactattaaaaccggaacagcatcagtttcatgttttattttgtcaatgtgtcagagatcctgtcactttagatttcatagtttcaaaagtgattatttgatcatgtgggtccctgctgtgagaaccagtgggcactggcctttagtttggttaaaagcaggattcaaaacttcatactagtttctttgttctaaaatgtatttagcctttttcaaactcaagttgcacttgttgtacaaaagacacttttcttttgaatctaatttaacattacattcaaaaaaaaaaaaaacttcatactaagtaaatgtcgtgtttgatccaaacttttcccaatttgtttgcttagcagggtgcaatcttgtttaaatatctttgtcatgtataatgtgattccatctcttcatccatatagagaaaatcttgtttaaatgtcttttgtcatatgaccatattctcacttgggtttctagaaaaagttttgggttctttgagtttgttgaattggatctccttatggcttagaccgtcgttccaactgctgaagaagcaagtatgttgactcaaaacagtcacgttatatctctgtctctttgataattcttggcttttatgtgttgggtgcctagtatcatttgttttaaaggtttagggaacaaaaggtcataaactataataagaatactttttacaatgttatttcctcagcaaaagtagcacgcattcacattctccaagtttcatcatttgttatttatgaacgcaaacaaaaaaactgtactattaacaagcttttgttaagaaaaaagtaaggaaaccctcttaggatatgtatgtttcaacaataagcttatatctttactcattaagcccactagacaactttgtgagatagatcttataagaagcgtatcactttatccccgtgattacttctcaaaacaacgagttttgatttgtgctactttattaaattcacgttctgttttcagaaattttgttttttctgataggttcgtattgaaattgacctctttggaaactggatctttcataagatagaaagagaggtccccatttcccaagtttatcaaacaaaaagaaaaaaaaatctaaattgttctcatcttgagacaaccaatcagaatgaaccatctgagtcagccaaagggtttaatagtcaccatttgccaattgtattcatactctttcctttttggtgcgttattctaagagccctagtcagaattcaaacatttggcaatgaaatcatacaaacttaataaccctaatttactcatctccacgcacacacataataaactcttcttatcctcttctccattcaatctcttattctcttttccttccttcatataccttaaacagcaacgttctctgttcttcttcttctttttcttcctctgtttttctttcacaacttccatgttggactcggacacagacacggactcaggtcctgtggttgcaacaaccaaactcgtcactttcctccagcgtgtgcagcacacggcacttcgatcataccctaaaaaacaaacgcctgatcccaaatcctacattgatctatctctcaaacgtccctacagtctctccaccatcgaatcagccttcgatgatctcacgagcgagtcacatgaccagccagtgccagtggagacgcttgaaaagttcgtcaaggaatattttgacggtgcaggggaggatctgctgcaccacgaaccagtagatttcgtctcagatccctccggcttcctctccaacgtggagaacgaagaagtcagagaatgggcgcgtgaggtacacggtctttggagaaatctgagctgcagagtctctgactcagtaagagagtctgccgaccggcacacgcttctaccgttgccggaaccggttatcattcccggttcgagattcagagaagtctattactgggattcttattgggtcatcaagtaagtcattgtttccaacttttaaatcacaaatcaaatgttttttgttttttgttattaaattgatttcctctcctttcgtgttgactacgtaacacaagctaacgtgtcagtatgtcaccgtcttgtaacacgtgcttttgcacatgcagaggacttatgacgagtcaaatgttcactaccgccaaaggtttagtgacgaatctgatgtcacttgtggagacttatggttacgctttgaacggtgctagagcttattatactaacagaaggtaactacaactctttgtctctatttgagatttgtcaataacggagaaaataaaatgtttatgagatttataatgtttttattgttacaagccaaccacctttgttgagctccatggtctatgaaatttataatgtgacaaaagatgaagaacttgtgaggaaagcaatccctctgcttctcaaagagtacgagttttggaactcaggttagttatttagttagatagtttagtaacactagtttggtttaattcttagattgaatattgttatgttttcttctttgtaggaaaacataaagtggttattcgagacgctaatggttatgatcacgttttgagccgttattatgctatgtggaacaagccaaggcctgaatcctctgttttcgtatgtttcttgtctatttacaaacatgttttctaattttattgcgagaaaaaatgttgactctttctcttcatgtgttaccacaggatgaagaatctgcttcagggttctcgactatgttagagaaacaacggttccatcgagatatagccacggctgctgaatcaggatgcgatttcagcacgcgatggatgaggttcgattacttaacaaactaatcaagtgtagttcatgttactactgtcacttatacttaaattctcaaaatgataatgcagggatcctcctaatttcacaacgatggctacaacatcagtggttcctgttgatctaaatgtttttcttctcaaggtctccacttttcttgatcataattctctttgattactgttcttgcacatatattatgtagataaacgatgaatgttatctgtttaccgtagatggaactcgatatagcgttcatgatgaaggtttctggagatcaaaatggttcagaccgttttgtgaaagcgtcaaaagcgagagagaaagcgtttcaaaccgtgttttggaacgagaaagcagggcaatggctggattactggctttcctccagtggtgaggtaagctgttacagaatctttgaatacaatttcggatttcttgatgaggaagcttttgaaaacgtgtctgtgtcttcaggaatctgagacatggaaggctgagaaccaaaacaccaacgtctttgcgtctaactttgcaccaatctggattaattccatcaattcaggtaaagtatctctacttgtctatgtatacactttatatgttgaattatgtatttgaacgtttaattttgcaacatgtagatgaaaatcttgtcaagaaagttgtgacagctcttaagaactcagggctcattgctcccgctggaatcctaacttctttgacaaactcaggacaacaatggtaaatgaagcttgcggttcaagtttcatttggaatcttgaaatttacttcactaagcatattatcttgatacatatgtggttgcactggaacagggattctccgaatggatgggcaccgcaacaagagatgatcgtcacagggctcggaagatcgagtgtaaaagaagctaaagagatggcagaggatattgcaaggagatggatcaaaagcaactatcttgtctacaagaaaagtgggactatacatgagaagctcaaagttacagagcttggtgaatatggtggtggaggagaatatatgccacaggtcaacttttcttcttcaactttcttttgatttcatgagttttaggggtccaaataaaagtttcttgtaatgttgacttcatgtttccaaaaaatgcagaccggattcggatggtcaaatggagttatcttagcattcttggaggaatatggatggccctctcatcttagcattgaagcctagatttactaagtttattgaaagttaaataacggaattagacattttatgttacaaaaactttggtagatttgatcgtagtggattatttcttggggttttctgtcagaacgttttagagttacaaatgttttatgaccaaatattgtatatgcaaataaagttaaatataataagcatctaatggtacatggaaaaactggtggattcagttggttaacacttgtgaataagatgacaaaaagctttaagatatctactttaagtcataatctcttctctgcctaaaccacttgatagattctttgaatgatggacactggacagactaacttcactttttgatgtcacaatagtaaatttataaagttatcaaatttctttcctccaatataacagtataatattcaaaataaaaagtaaataagaaggccttttaacaaacaaacaaaaaactaaataacaaaccaaaaaatattatgtacttatgtagtacatgaaataacaatgttagagatttgcaacttgtctatctaatatatgtcaaatatattagttaataaaacaaaattaaaaggttctctacaatgaaatacaaatgtaattagattgaaaagaaaaagaaaaaggaaaggaagcctaaaaaggcaagatatataagccaataggtctaagacagaactctataaaggaaataacaaaaaaaaataaagcataactaaaccattgaaattgcagtttacactcatatatatatattgaaaaacttaaattcatattcaataaataagaaaacaaaaccaaaaatgtgtagagttttctatttgcaaaactcttaatttggtgtaagggcgggccgagcaaaagagtgacaatcattgtagaagttgtgtcctcttcttttcattttaaaatatctttaaattgcttttctataatgtttggtctggatattaatctatgagcatgtaattccttctaggttaaaaaatggttaaattttttatttaacaaactaattgttactctagttaagaaaaaaaaactcagtgaatatcaatattattggttgaaaagcgcatgaaaaaaaccccatgacaatatagatcgatcaaagattggtgaaattcaaaatctcctacattttaatggggaatgccggaatgctaagctgcagttaggcccaaggctaatcggcttacccaccgaaagccatgttcacatactaataaactgaaattcacattaaaactatggaatctaacactcaaattggtgttatttgagttgttggcttgaaatgggtgagtggaagctgaattattattcatagaagctacttaaataagtgattaatgactaatgagtgatcaaaaagtggtttattagtcaaatatagttggcaaaaaaagaaatatatatatcatattgtgttatgattttcgtttaatcagtagtttcattcgtttaagttagaaaaggtttagaagttggaaaaaggtgatcgtaaacagaatctccatttggatgaatcagattgtaccaaacgaatcgtaatagaaaaattgcagcttgtttaatttataatttaacttctttttattaaaaaatacaaaccttttgttatatattatctagtatagtacaacgttcagatttgtgttggcattacatgttactaaattttaaaactaccgaagaaagtttagtagtcccactgttatataaaccaactagtactactccttaaaggaatttttttagtcatcaatattatagttttcgcttatttattattattcatgttacttcgtattatcaacatttttaaaaaaacagtcaacctactaacttatcgatgaactagactagagcaacttgagttcgaatttttttgacacattatatttagttattgttttttatatgttttatgatgctaactgtgataaaatatgagtactaatctttagttggtgaagaaaactcatattttaaacatgatttgagctatatcgaaaatagtcggttgatgtattaaaaaacaggggataattaagatggccgtaaacaattgtttggaatcaggaatacaagttgcaatgatataaaaactttagttgtagactgtttaattgaaattaaaaatacaaatagggtggaaaataatggtcgatagtttaaattatgccaacggatgatgcmtagagaatcttccgtccaagtagggattggtttattgctggtcaaaattcattttcagttcccaaaaccccatgtgcattttctcattagtcaaacttaaaaatgttttacataaaagaaccatttaactttattttataaccgtttgccattaaatatttgactgttcgattattaccatgatgactgcgttattttgaattttgattatcattttcgttacattttaaaaacgtaatatctgtttattatattacttgaatgttataaacgtaacaatgaaacacaagcaacaaaaaatgttttgaggctttgagctattgattttgacaatcctaaccatttgaatcatactaataatgttttttttttttcaatttcagccatcctcttttgtgttaaaaagtcaattaccaaaatgaattttataattttcttcggtgaaaataccaatgatcaatgaaagtaggagctggaccatgagtaccattaggtgttgaacatttgcattttaactgtttaatttcgccgtgtagatatgagccttctgatgtacgatttgatgattaactaatcatgttattttcataattaatttatattaaagctcaaatcagaggctcaaatagttaatcaaatcattacataagaacacatgtaagtgtagagaatggtacgtaacatctgttctctctttacggatattgcgactatatatatgaaagtagatttcttaatgtttttatttatttcctactactaatcagtatatttatcttctgtcagctttgtgttatagtactatagtagattgatatatgtaagccacaaatagtcccatgataccttttcgcttgataaggaggacgccattccattcgttatgatgaggaactttacctttttctaattataacgaaagagaaacgcataataatccagaaaaaaatatatataaaacgtactttcaaattttgtatattattgtcatattgataactatttcgataactacgtatttaaaagtatatatcaacatcatcatgattctaaagatgtactttgggttgaatgttgaaagtgacgatggaaagcatactcaataaccaattttcaggaaataaaatgcagagacgagtgtattacttaagtaaataaggcagagatgatttcatgtgatatattttatttacataataaatgttaattttaatacacactaaatattgttaatcgaccttcacaaatacaaataaaaagtattagtccaaggaagccgtatgtatgtaggaaatgaaaatgggtccccattttcgttggctagccaatacaagtgctcttaaaagctgattttccattatctctatatttccaatttttccctttgtcttaaaccgaaagtgatttttactttttagtttaagtggttaagaaagtaacgttttcaatcttttttggacagatttttgcctttggcatatactctttaacattgccatgttgatgaggcgacaatatcgatatttttttttttcacaagtgtgattggtaattatatgagccacacaacttttctcatttggaattcatagtcaatcgacagtgtcagttgcataacaaaattcatagtttgatccaatattaggtcattgaactgaagcaagtttcttatatagaaaagtctctgacaaaactagagtactcgaagatactagatcaaaaagagtactttctacacattatctccaagaaaaaaaaaggtgggtaagaaaacactgattgagagtaagagttcaatattcactcgaactcacttttggataagcgtaatcgagctaccaacgtgacaatgagctggaatcttgtactcaagacacaacaaggacaatacgaaaaaggcaaggagggagagaagctttgcatccccaatcatctattgtcgtttgtatgaaagggaacacacatgaagctctcagatgtgccaaacaagagagataaagaaagcttcacataagcatcatggtttttgaatgtgttcaaagtttgtaaagaatgagattttttgtgtgaatttggggatataaacgacatgtgaatatgtgataaactgaatatattaatttcgttctccttctacaatttaacagaattttatttttattatttttatcaatttcatacttgtaaaactctctgtccttctcttattgatatttgatttgatttttttgtatagtaaatatgttcatccgtgagagatgcatgtgagctttatatgttcaacaaaatttcaagcatatataatcattggctgaatccttacaaaaacttataacaatatgacttaaaaacggtattggatgttacggagactgaattattgaaaaataattgatcattagcaaataataaccaaactaattagtaaacaaattaaatatatttttttgtctatgaccgtgttccaagggagaggagaagcgatccagcacgcggtgagtaaacctcacgtgcgtaaaccttctcacaagattcttctttaacgtttctacgagactaattacttccttattcatccacataccacattgcctctcctgccgttttcacgtttactgctctaactactcgttgtctccatgtacttactttatattgtctacggtagtcccaagaccgcgcttattccgagattgatataggaaatacaagtatttaaaaaaaattaggattagtaaatgaggaaagaataatgagataatgagtgacactaagtatacaactaatacgtcacgattgtataattgtcccctacaagtagtcaaaccttagcccttttgaccgttaatatcttgcatttgacgataatcttttccgtgttttgatctgtttccactgtacaaaactaaacgttaataagctcagtattgggtacgttagtaaaaaatcaatcataaaatataaaataatctcactttaagctccaaccagagactgacagctgttagttagtttgaatactcaatagtaatcaattaggtttgaccaaaatagcttcataaattattcatcaatccaataagtcatttaagtgataattaccaaaaggcacatgatagctctctaaatatagatataccaaaatcaatccataccaaaagttgatgatttctttccctctacaccatcgatatgttgaatagtttagattttttccaatatttgtttaattattatttatattgcctttatatatcaaaagtgaaaaaatccaaacaaaatcttgtcaaagaaattaacactggataaatatttagttatttttggataacttgttttgaaattgagtttaccattccaaaatcagcttaactttgtccaaaaataaggaaaaaatcagtctatatttaacacatgtattctttgtaaagattaaatctaaaattctttaagacaaacttgtgtttttttttctgtatacattgtttccctagtattttatgtttcatcgtaatgcagcatcttttgctaacctctctagtaggttttaaacaagaatgaatattgttgacaataatatcataataaaaatattatactgtatacaacaactagacctaccactacgaaatgatttaaaacaagaagagagtacaagaagaatatgataaatttaattttaaaaaaattcaccgatcgtattgataaaaaagttgtatctacttttctctctttttacctcatcaattaaaaagttgactataaataacacattactatttcttctctctcgccaggcggcgttgcctacaaaaacctgacaatcgaaacacagtttttctgataataatatagacatttaccattatgcccttctaactgaaaacggcaattacgttccttgttatttgttttcttccttctccttctgtttcttttttgtggctttaatttttttcatattaattcggaaagagaaagactcttcactcccataacagtcgccggtaacagaatcactccgatgatcgagactggtaaataccttctcggcgccgccggtgctagcggtttcggctctaaatccaccgccgaggaagttaccgagaactgcgaccttcgttccatcacagcggttatcaccggtgagttcttttcctctctgcttcgtgttttccggtgagtcgagtcgtcaggagattctaactagttgatttggtgataggtgcgacgtcggggatcggagcggagacggcgagagttctggcgaaacgaggagcgaggttgatttttccggcgaggaatgtgaaagcagcggaggaagcaaaagagagaatcgtttctgagtttccggagacagagatcgtcgttatgaagcttgatcttagttctatcgcctccgtacgaaacttcgtcgccgatttcgagtctcttgatcttcctcttaaccttctcatgtaagtctttaatcttctttttttcctaagaatcatatgcatgtatatttacataactacgtgttaatctaagttcttaattcggattaatttgttttaaacattattgttatgttatgtgattattttattatttatgcaattgtggaatcagaaacaacgcaggcaagttagcacatgaacatgcaatatctgaagacgggatcgagatgacatttgctactaattatctaggtatagtagtattttcctaattatacgattcccttagtctatgacagatcttaattaccctatatactagtattactttattgttaatagccttcttaattttttaatccattcacaatgatcaggccattttctcttgaccaatcttttgctaaacaagatgattcaaacggcagaggaaacaggagttcaaggacgtatcgttaacgttacgtccggtattcacggatggttctccggcgacttgatcgaatatctccgactcatttcacaacccaagtggtaagtttgtgttatgttctggttgagtcatgaggtataaatgtttcattccatacttaattgttatctatacatcaaaactccaaagcagaagtgtaaataatgtaccatctacaatccttatatcaacctaatagctagaagcctagaactataaatgagagagtaggattggtgttcttgagaggtgaataaaaacttgtcgaggaatttactttttaccaaagcaaaaagctgcgtagttgttaatgttttgattgatgagtgacagtaactcgataggagggtaataaatgggaaaagagaagtaaaaaggttttgacttttgacctttggaaaatgtaataaatctttctttttggttttgatcgattagtcaattcgatgcgacacgtgcgtatgctctctcgaagcttgccaacgttttgcataccaaggagctctcttctagactccaggtctctttctctcccacacctatctctcttatttacttgcatccatttaattattcccccaaaagttaattattcccaaaaaaaactctgaagcattatggtagaaattaatgtgtgtcataatggtcaaatttattgatttttcttagtgtaaaagaaaagagtgaaaggtatgggaaggggacaacaagaaacctagataactaggagatttgtattctaaccaaatatatgaaagtgttagttaagtcacacactacaaagtttatttttgactattgaccatagttaggatttaggacaatcatgtgggtcattagcataaagtgattaaagtttagtatataaaaatagaatctaattgtaaaagaaaacaaaattgcagaaaattggagcgaatgttacggtaaattgcgtacacccaggagttgttagaacccggttaacaagagaccgagaaggtctattgacaggttggtttatttttttttttcctcattaccttgtcatattattttatcatgaattatatgatcatgattaagattccaaattatatctatatgacttccttttgtctttacctactcagatctcgtcttcttcctggcttccaagctcgttaagaccgtccctcaagtaaataattgttattttcgttagttataaagtttgtaacataatctgtggtggataagttattctttttgtttttaatcctgtttaagattattggatttatgtgctactttttttttgttttggcatgggattaggcagcagcaacgacgtgttacgtggcaacaaatccaagactggtgaacgtatcgggaaagtattttacggattgtaatgaaacgacaccgtctggactcggaaccaactccagcgaagctaccaaattatgggctgcttctgagattctggttactcaacattccaagaccagtttcgacccatgtagctaagaagaagaaaaagtaattatcttatcttcatatacccccttaggaaaaaagttatactagtatatcttagtagatgagagaaaatatcacaaaagtttagttgatatatacaaatagtatcctgtttctatagtgcgaatgcgaagttgatgtagtctttgtttatactaacgttatattaaacaatatgagaacaattaattatataagatatatttgctgaagagttcaacttggactaatatactaaagttttagaataataaagttaagtaggaaatcataatgtcaatcattagtttcgaagtgctcggaagtttgataattatgtgattaaactcatttggactgatctgtgagagatctctccctctctcttatcgttttcattttttctttctttccaatataatcgtttatgacattgaatattcatatgtccatgtgatactatttggatgttgattttcctttaataatgagtttgcactttgcattgattggttacccttttgctttaatagctaaatctaagtcgtgaagaatagaggaaaatctgtatgtttttaaatgttgtactcgaactaatattctgcctctatacacatttttcattttgaagtaaattacagaaatggtataacgaaactattaaaatatggataagaaatctacaaagaaaatgaaagaataaaaatcatataatatgaaaaaggtgagaaaaagatagatagatgagaatcggttagagatgggacttaggaccatttaaaatggcgcatgataatacttttgagcatgggtctcttttctctatcttctctttttcttttctatcaaaaggaccctactaacatgcgccaggggttttcacttttcacttctgaaaaagatctctcgtgcgccatcaaacttgctccgtccttacggaatttcaatcattacatgaagaagaaaaggaaaaaggttggtgcaaagaagagagcttaacacttaaacaaggaacaatgaacatgctttcttagttttaagttttaacaatactttatagagtaaatctagcattgtaaaacaaaacagttcacacgtgacatacatttgataaattaatcttacagctttaaaaagtgttattcggtgataaaatattactttagcaatagcaagaatttagatagttgtttaggaaaagttacgggctaataactcataatggacctataccttatttgaagaaggcattaactatgaaattaaaagcccacatgtattgagccccctagagtccttaatgcgaacttcatcttctccttcttttttttttgaatttgcaatggttagtaaatactaatagtaaaactatgtagagctgcttattggttggtcgtctatgtagataatagctactactataaaagttttgttttggctcgtcttttgccatcaatatttacaaacggtgatgttttaataccaccaacttacatgtggtgtaatctattaaaattgaaaatagggaagccaataagataaccagttataagttagcccattagtacacatgaaaactatattaaaacaatcaattaatcgaaacattgaacccaccctacactaaaccagcctaacccctcctttaaaagatgaaatgttacgtacggtgtctccatctccaaggagtcagtcaaactctcaacccttttgagtgtaagtatttgccttgtacgacaatcttttgctctttataagaatcgacactttaaaaaagaacttaaaaccaaagttgggttgaaaacgagtcaaatccatctataaatctatctgagtcttctaatctttttttttacctgaaacaagctcttgcatcagatttgttatctattccaaaagtgtattcgagagggaaaaaaaagaaaagacacactattggtaaagtggctaaggtgcagagagaaaggcaagttgttaatatggtgcgggtttgtccacacacgctgacatggaccgcaacttctaagatgctatccacgcacttcgtcggacccattactaaatccaacggctgagattcgatggactttttcttcgtcgagaattatcagagaaggcacgcgcatgagcaaacgtgggacctgaatttcaccggccacatcaacccgtaataaccgttcattagtcgactcagtcaacttaaattacgacacttgtcaacatctcagtctttgatatgtctcctatgattactgcttcaagaaaatgaagattaataataaagtttaccagagagattaatctttctttataatgaaatttgactatttcaaattttaattttaaaaaccaaatcgagtgaatatgatttattcgaatgtttgtgctggatattagtttagagaaaatgttattatatgtgtttggtaacaatttattgggtgataagaagatgactaaataagtagggagcgtggcatgtggagtgaaagaaattaggtgttcctgagctgttttgtacactaagtaagatagctcacgtggcgatgacatatatgtcatgttaaatctgggggccagactaatcaaacacaccacaacgttatgatggagtagatcatgaccgtctaaaatgaaatactataattaaattcgtgcaatacaggtaatcatagcctaattggaatcttaagtaacacgtgaaatacggataagttttatgaaataacagatgatgagctttttaatctggtgcatgtggacctttaagggagtctttggcttttctcttcttaacatttgcacattatacacttgtacgtgtgactatgtcccaagaaaaacatgttaaagattagatgaaatgtatcattttgttgttatttgatttaagaatataataggtcgaccaaactaagagagaatataagaggtcaactcgtcaatggatggtcaacttattaggtcgttgaagtttattccatccgtactaatatgattctaagtatactttatatcgtgaaaaagttatagattatatagcttttggaaaaatttctttcattctgacaattatttttaaagataatcttttaacaagatagtttaaaaaggacataactatcactttgcatttgtcttcaaaaaggtaaagtgttgattttacattcaattatgtgatgatgtagcatacagcagtagtggtgatgcgttatactagtaaagtagtatgctatataatggaatggtatttgtaataagcagtttttaatacatgctataacataggttaattgtctcaatgaatggttcactacataatcaaacagtttagtttcaatattaaattgaattaaaatattttctaaatacttatatatctattaattatagtttttactcagaattatcggaaaactgttgcctgataactttctaaaaaccataatatatttaacgaaatatttggttaaaaagaatccactttccgtcatttcactatgaaaagaacagtcgacttttgaaacagaagaagagaacaatctacttttaaggtcaggcattgaaatcaaactaggaaatttcgatgtactatatagtttaaatttaaacacaatcgaaaatccttgtggatgttaagacttaaatatccaatacctaacttattaccaaaaattcaatccgactcggattttcaaatttgaaagtttccttgaactgaaaaacaacaacgtgaattataataaacaattaggaactgatagctgatgttgtatcagataacacacaagtcaaaatatttcctaaagcataaccttattttgcttgtcgaataggattttacaaatgtaccttgttttaggaattaacgcgttaataatacaacatacaggctacatttatgatcgtatgatttacacctaattaattcttccgttaagttctaaatatatagatgggtgtatatataaatagttatataagcccatacatacatgcttatattatatatagacgctattcaagtatttgtttattttcagtacgacaaagattcccactcggaatgttttaataatcttttatcatacaatttgttctctctctctctctctctctctctaccataaagcaaatgtgatcagagacaaagcatacaaagaagttcctcattcaaaaaagatttctcagccatcaaaattctctttctcttcatccaacaaaaaaaaagcatacctctttttcttccatatagataagttaattaagaaaacgaattatcaggttttgtttcggctgatctgaggaagttcatctatggatacggctcagtggccacaggtactatacacaaacatttacatatttatatattcgtacaattcaatatgtatgtgttgatgtagtttagatcatctgatttatctatctactagatcttgacttagaattttaatgttttcggatcttcttctttttgatgttactcttctcttcaacagtttttagatcttctcctttaattttaaatatatggttttttttttcactttaccctttattaatttgctttttcttttatgtttttagttaaagcttctctcaaatatctcaattatcattttgatcttgatgaaaatccattaatttgttgatagacagtacatatatatgtcaattatgtcttctatacttgtatataggcaaaggtttttgtgctaacgtttggaagagatgtatttttttattttgatgatcaggagattgtagtgaagcccttggaagaaatagtaacaaacacatgcccaaagccgcaaccgcaaccgcttcaaccgcagcagccaccgtcggtgggtggagagaggaaggcaaggccagaaaaggatcaagctgtaaactgtccgagatgtaactcaaccaacacaaagttttgttactacaacaattatagtttgacgcagccaagatacttctgcaaaggttgtagaaggtattggaccgaaggcggttcgcttaggaacattcctgttggcggtggctcaagaaagaacaagagatctcactcttcttcttctgatattagtaacaatcactcggattctacacaaccagctacaaagaagcatctctctgatcatcaccaccacctcatgagcatgtctcaacaaggtttgaccggtcaaaaccctaaattccttgagacgacccaacaagatctcaatttaggtttttcaccacatgggatgattaggaccaacttcactgacctcatccacaacattggcaacaacaccaacaagagcaacaacaataacaatccattgattgtttcttcatgttctgccatggctacttcttctctggatctcataagaaacaatagtaacaatgggaattcttcaaattcttccttcatgggatttccagttcataatcaagatccagcatcaggagggttttcaatgcaagatcattacaagccttgcaacacaaacaccacactgctagggttttcattagatcatcatcataataatggatttcatggagggtttcaaggaggagaagaaggtggagaaggtggtgatgatgtgaatggaaggcacttgtttccttttgaggatttgaaattgccagtttcttcttcatcagcaacaattaatgtcgacattaatgaacatcagaagcgaggaagcggtagtgatgcagctgctacgtctggtgggtattggactgggatgttgagtggaggatcatggtgctaattaatttctcggtttggttgatgaagatagtactattagtggttaattattgctatttatttaattaatcaatatgttcttaatttcactttgaattttcttattggtgggtttttcctttttttttgttaacttggatttttaaggatactattgggggtgcatgcatattgaatgactttaatttgttatccctaacacagattataaatgatacattggttggtcttttgttgttccttctcttgttcatgtcacattatgagaaaaattaatgctaaataggttgtataaatagtgtgtaactaattatatgtatatgcaacagcataatatgtttttgctcttttgggcacgcaacacatggataccattttgttaaagaacaggtacatattaaacaaaaaaataagacacattaaaatttttaaaagagacaggtaagccctgatgactttcacatgatcctcactaaatacactaaactattatttattgctaaagatggtttagccctaccatacctattaataaacaaaatcatattccatttaaaatttccatctaaatttaaattattggattcgttcctgaccaaaaaacaatagtttgggttcgtttacaattacaaggaaaggtacctaattaatttgattcatttttattgtatacagtacttattaattagatatggcatgggtaagtttggaaaatgttgatttcagggattattttgcttcagaaaacaatttgaaatgaaatgaaatgaagtgtgttttggttttcgatgtgtaaactgaagaggcaattgagtttttttaaacattgaaaataaagacagtggagaataatgtgagagacaagtcacaagtctaaggactaaagaaggaggggcccacaaaaacattctccttgaaatctgtgtgtttgaaattatacatcccactatggtttcagcttcatcaatctagatcttgaccctttttgccccttgagttttttttttaattctaaaaatattacttgtataatactctcttcatatctgcttaattacattgaaaccacgtacaattacatacttttattattgaaaattaaactaaatttacgaacatgaaatattctttgttctgcaaatatatctttcacagggctatagaacaaattatagtctggctataaagttctgttaaaaacatccgctaaatttggaatctaattgtaagacaaaaaaaaaaaagaatagagtcgaactttgatgctacaaaaccacaccggtcaaatggcagttgagaatatttctctcaactatcaaaacaggaaacttattagctgcatataaagtaatgttttataaaatattagttccaagatattcagatatcttctaatacgtaccacaattcaaacacaatcctcccctaacttggattaagtagtaggccaatgatatccagaagatcattatctaatcaaaggcaattatacaagaacaattttgataatctcgaagactcttagttaacgatgttttgtggtattgggtttaccggtaaagtattttaaattttacaagaaaataaaataagtaaaatgttattcgtttttgaaatcgattatttcatttgaactagatatatagacatcgaggtcaaaggacttaggtgatgtgttatggtggccaccataaaaagaaagagaagaagaatccgaccaacgttaaataattttgtctgaaagtgacaatgactcgaccttaagaacatacttatacactaagttttaaattcggtgtgcttgtgttgaagtattcaagtatggatgtgatcttacggataagttctagtggagaatggaacatttaaaaataaaattaaatagatgtcagattaaaagttttctatcagattgtagctcaacaacttcgaataataaaaccatgtccataaaaattagttgaatctatatcaaaatctttctcgaacacttttagtttcctctttaatattttctttgtttttgtgtaatcaagtctaattctctaaaagtcatatattcaatgccactagttcaaagtttatatttgccaatttaaaaatttatgtttttgagcatcacttgtaactactagtaatgcaatctttaagcacatattcaatttctgtcatattttgttttctctgtgagaattgtattcatgtcacttacatttacatatatttttgacaatcgtaggtcgtcgacatatatttcgaaagtagattcaagttgttcggcaagtggagtataataatttataggatgataggatggaccatgacatgttatatgtagtacatactacataaggcaaacgaatatatgttagaatatattcttttcagaagattaatagatcttaacatcatgatataataatagctaagctaggggacattattttgtaactaaatgaattgatatgatggaaaaatattttgaatttctaagtagtagacttctacctaattattcaacttttcattttggtttggtgagaaaaagggaaaacaaattagattgggaggacgaccttcacatgctgatcaattaagtatatagtagaatataaacaaaaagaatatgaagtgtaaccgtaaaactaagatgttcgcatgcatgagaaggatattattcacatttccaatattatttttgtacaaatatatttctattatgatatttcattcgcgttagcaaatttatactactaagtgggtattagtaggttttagttaatatcaaattcatacattagaatgcaactcaataaaatatattcaataaagattgatcaagtacacaattaatgaatcggataaaactttgatgctacgtttaggcgttgacataaaaaagaagaagatttgatgcgacctacgcataggttttgaaaggcgttgggaaaggtatgactcccgaccgttttttttttattgtgagtgagtgatatatacgcatatggttgtgatcgcataaatcattgtgaacgcaccaaacattcaaatattgttcgtaaaatatatgacttgtaagcttcaacgcattgctagaacgaaaacaagattaataaaacagaaattgaaaaacacatgaagatcaaagatggtcaactcatatagaaccggatcatgttttaatttgcagtcttttcatgtccttttaactaaaccttcacactgtcaagttttccttggtcacatacacggatacaactagtttcaactttgcacctaggtctgaattatttgtctcaccttgtctcaaactagttacattaacaccaacaaattagtgattcattgtagatttactaaaaaacacgttatctctcttcgagaaagcccaagtccatcatcacttattgggccgagagatctgagtgctagtttggggttacttcacgatccaggaaacccgaaagtgaagtctgtcatgagggtggctgagacggcggttttgggatctgatccggctaacggcggagcttacttggcagggatggcgacggcacaggacaaagccgtggatctaaagtcacgtgggtatcacatgatactcggagctactgatgtgcctttgtttaagaaggcggtggttgacgacgtcaaaagttttaagcttgggtcttcgtaaatttattatgatatattttgacgtaattataagttttatatgatgatgaataagttgtttttgtcggagatgttttgtgccaaggatatgtatgtaagagcagcctcaacgggaggtctaagtagggtactaaacacaaaaagatctaaaaattaaaccatttgtttgtcgtagacgatatgtaatgaaccatttgtttttcgtagaacaattgaatttgaaagcaattttacttgttctctttgatacgaaagatgtttaaactacctgtgtcaaagaaaatctagattgtgagaatgagacaagagaaagcaattgctcttgaggatgaacctgacaagagacctgatgttacacaactgagctcttttacaatcttttcttgcctttacttggttgattttagtgcatggggttatctcccggagatcaattccacaagacaaaaagttagtagctcgtaagaacattaggcgtgattcttatctgaattagcctaattttggtacgattttcgaatggagaaagaaaaggtcggagatttcaaagcacaaccacgatcaagacgctctacgactatgttgattggcttgggatcttagaaagcaagagagtatagtttaatatcaaacttcctgaggacaatgtacggtaaagacaaactctcgatgtctctgaaagatacatgtctgcatcctcaggcgagtctcttcataagcaaaaaccagataattctcttttgtttcttcgtttttatgtttcgtatatgcatgagaatcttgagcgcttaggttagatataatgtaggggatcctctagagtcgacctgcatttggtactcatgaaaaaaaaaaaattggttgattatttttccaaacataaacgatatactagtaatcttgaatgcacaacacatcaatatatgaaaaaatcattaaaatctcaattaaataaagagctacattatgattaaacaaaaaaaaacttcatggcgaaataccgataaatatagcaggagcgatatgctattctatagaattaattttcataattagatagttcataatagaaaatagttaagaagcagtaggatgaacccgatcatgataaccaatacaaccccatagagcaaacgcgatgaggatgatgaccataaggatggtggcaacgattgttacgatgaacgaagtatccatattgtttcttcaccgcaccaaattttttatttttttctaacctttcctcgtgtcttcttcttcttgaaattacatttatattgtaagtaaattggaaatagtggaagtaatttacattttgtcatcaagaaacatactagcaaattttttgaaattttacatttagtctcttaaaaatattacctaggagtaaaaattttgtaagtaaatcgggaaaagtggaagcttttacatttgtcatcaagaaacatactagcaaaatctggaaaattttacatttagtcacttaaaaatattaactaggaatatatataatagaaattttacatcttttggtattttgttggtcgtcaaagtaaacatgactatgttgattcgcttgtgcggttgtacgaagacaatgtactgtagagacaaactcttgatgtcgacgctatctggagactgcagtcttagataaccttttcatcgagttggaaataattagagaaaccaaacaaaatgcaagaccaacttaattctcttctcttgtaattctggagcttaagttagagattgggtgttgtcatattaaatttgttaatcatactgattactttcactcacatttgttcttgttattgtttatgttaaatcgtcactcacattgtatgcacatgtcagattcagaccaatgttaaaagtgcattattttgtttggaagcgtgtgagaaaacaaaaagtttatgtacataacataaatccaaaagtactactcgaataaagtacaaactttatatcttttaaactccacgtaataactcatttttgtttgttttaatcaaaaattcaaacgtctaaaatttcgtcttaaataagaaatgatattaagaaaaatatctttggattaataacagatcaccgaaaattagaatatggttttaccaacccaattaaattctcaaattaattggaaagagaataatgttgacaacaacaaaaaggaaataaatcgcatgcaatgaaaggaatgaatcttcttcttcttcttctctattaacgcttcttcttcttctccttcttcatcaccctcctccacttctctcagtcacaatggcgaccaaaaaatctctgaaatcacgtctccaagatggagaaaagcttctcggccactttcttctctccttttctccggagcttgcagagatcgctgcaagagctggatttgacttcattgtcgtctaccttgagcacggtgccggcgggattcgtgaagcgcttcactgcattcgagcaatcgaagccgctggttgctccactgtcctccgtgtacccgacattagtcaggcttgagctaagaaagcgttagatctcggacccgacggcattatgttcccaatggtcgaaaccggaagatctgcatccgaggcggtctcgttttgcctgtatcgtcctgacggtgttcgcggctgtgcttactccgttgtgagagactccagcttcggatttaacgaagggtatttgggtaattacgctgataagctcttcattatgtgccaggttcgatcctcaaatcccctttgattttcaattttattggacgaaattgttaaattgaattctaaaatgcctacttgtgaaaaaaatggaagttagaatttttatgcaattgatatattttgtgcagattgaatcagaggaaggtatgaaaaatgtgaaggagatcatagccgttgatgggatggattgtgtgatgatggggccgagagatctgagtgcgagtttggggttacttaacgatccaggaaacccgaaggtgaagtcggtcatgagggtggctgagacggcggtgttggcctctgatccggcgaatggtggagcttacttggcagggatggccacggctcaggacaaaaccggtgatctcaaggcacgtgggtatcacgtggtgctcgggtcaaccgatgtgtcgctgtacaagaaggctgtggttgatgaggtcaacgcttttaaagcgtagtgtcggaattagattagagtctgaataaaacgggaattagagtgctttgtaataagtgatgagtttatgtaccccatgattatcttctactttgttagttatgtctactactttgttagttttgacttttgagcaagtcttgttaagattcgcattatccaaaagaaaatttaaagccgcattaacagtgtttagctctggtgttactaaagaaaaagtgattatgcgggtcaaacacttctcaaatagtttgctttgatttctttggagaactgaaatgcatgccgtttcgaaatattagaatgcatgtcgtttcgtggatttcagtaccagtaaaggctaatgctgatgcatcgttgcattttaaaaatcgtgtcgtttttcattccgttttagtggccactcttcgcaaccagataagaactcgaagattttctttttctttatcaaaatgcaatctttatctctgcaatcgcttccatggaaaccaaattcagtgactttacctgaaattaatcttttgaatcccaagcaattgactgcctcgagttctcagtatcgtagaactcgaaactggagaattagaagttcgtcggaagataatgtagcaatttcgagtgacggcggagatttgaagaattctctgtccggtattgtgggaaatcaagtggaggagctattgagcagagaagagaacaaaggtttgcttgatggtctggaaaaagcttcgttgagagtggagattgcgaagagagagctcgaagatatagagagacaagaaattgaggcgaaattgctacaggattatattaatcagctcgaatcaagagccgcagaggtgagagcttgttctcgaaatggtgttagatatgaaaatgattgaacatttgattcttttgctctttggaatttgaggtttttgggaggttctactatagagtatagattaaggttgcattgagaatgattggtttatattacaatggactagtgaatttgtgcagtatatatttatatgccaggataagctcaagttgtgcattgtatgcttaggataggataggtaattcaaagtatcaatcaatatcaatggtgttgcttttgtgcttgaaacctggaaatggggtttctcttagtttgtgtgaaggtacttcattagataaggttactaactaaatcatgagtttggttgcattttgtgttttctcgtgttttggaacaaagtctctagtttggttttgtatttgtagacagagcatgttaatcttattcaatatctgattcaagattgcagaatgccagcaggagattgacgcagcaagatcaatggttgaggaagcagaacgctccttgtcattagcagataactcgacaattggaagttcggagaaaggttattcgattgataaagacaaggagaggttagaatctgcaaaagcggcagtgatcgcagctgcggttgggaccattgcggaactcccatttgctctttctcaagtcgcaagcatggagcagcttgttctgcccctgggaatagcgtttgcaagctgtgcattgtttggagtcacattcaggtatgcagtcagaagagacttggatgataatcatctcaaatccggagccgttgcagcttttgggtttgttaaaggtaacaacacatttgattactgtttctatctaacttctttgaattgttcaaaagcaattgcgttttgtgattgaataagcttaacagaaatggtaaaagaaaaagactttctttgtctttgtcatgttatatattgtgtggaagtatgagctggcaaagttcccatcgttgtcccgccctttggttgtttttaaattataatctgccagtaatagattactaatcaacgatttgatttattctaaataattgatgagttgattattagtctctgacctgtattatttggatctgtctttttttaaaaacagatttattatagattcgattttttttaatgtgttatataggacttggtatgttgagcagaggaccgccattggagctgagctgggaaagcttgttttcacatgggatagacggcgccgttttggtgtctcagagcgtcttgatatttgcgtttgcgtccataggtttggacttctgtttcaagatgaagctcttaagaccatttcctagctctgactagattgaagagcaaattaaaaatgtagaaatgaacaaaatcttcttttgaagactttatttgtttttttttatattattaattttggtctaaaatgtaaatgtttcatcctagatttttatgatctttaacttgtcacaaaaaaagttacacctgattttaaaagcatgatcataaggaatattgaatttagaatgatgaatccatacataattcaaattttgctataaaaaatgaatcagttgggataattctttcttttaactttgtataaaaagttatgaggaatatttatctttgtcaagtgatgaagtgattagtgacttgtgaacttaaccaaagaggtagatggggtcaaggccattcctagccattcattatttatagtaaagccacgtgtaataatcttagaagcttacagatataccacgtcagcacaaaacagttcttttgtctttcgatcgctctcaaatcgcgttttgtcgtggaggtcaactgatcagaaaaatatagcaagcagaaagtgaaaaacagctgaattattatttttctatacaaaaaattaaaaaattagtatccaatttcaatggggtttcgacttgttctcgagtaaactactagtctctatctctctcagctccagattttgtttcttcttcttctgtgttaaattcatttgatttgttgtatctgaaggcgaaattactggtttctgatttttggtggtattcagggcggttttaaagcgacggaagaagatggtgggaggaggaggaggtagtagtggtcgtggtggtggtagtggtagtggtagtagtaagcagcagagaggtttctctatgaatcctaaagactataagctaatggaagaaataggccatggagctagcgctgttgtctatcgagcgatctatctccctactaatgaagtcgtcgccatcaagtgtttggatctcgatcgctgcaatagcaatctggttcgttttcctccatcttattattgcttatgaattagagaggctttagcttttgtcgtagatctcttgttttatgaatttaatgtatttttgtttttgttttggttgataggatgatattaggagggaatctcagactatgagtttgatagaccatcccaacgttataaagtcgttttgttcattctctgtcgaccatagtctttgggttgttatgccattcatggctcaaggttcgtgtttgcatcttatgaagactgcgtattcagacggatttgaagagtctgctatatgttgtgtattaaaagaaactcttaaagctcttgattatcttcatagacaaggccatatccatcgggatgttaaggttagtgaaagtgaaaaaaattcagcttcatggatccatgtatgtaatatattcaaaatttgttgtttctttgcaacttaggctggaaacatacttcttgatgacaatggtgagattaagcttggcgattttggtgtctctgcttgcttgtttgataacggtgataggcaacgtgctagaaacacatttgttggtactccttgctggttagttatttaacttctttctttttgtattttaaccatcactcttagattcaatggtttacatttaacctctttgcttctgttttgtaggatggcaccggaagttttgcagccgggaaatggatacaattccaagtgagtttactttaagctcaaatactagataaaacgtttatattttctgcttgtctaagatagaaagtagcgtactttggtatgtatgtatgttaagacaacttgtcaaactactctgcctctaatccgaatgtaaacatatttgcttggtgatgcatatcagttatatttgtactgtggaacaaagaaatgcaataattgcttattggttggttgttcttctcatttcttaacagggctgatatctggtcatttggtataacagcacttgaattggcccatggtcatgcacctttctcaaaatatcctcccatgaaggtgcttagtatttctttctctttttcggcttatgtgtatattttgcatctattaaaacggttctgattcttttcttttttccctggttacaggtgctcctaatgactattcaaaacgcacctcctggccttgattatgaccgtgataagaaattttctaaggtactcgtgttctttctaggtgtatttcttatgctgttctagttttgctagattttctgttttttcatttgcaataaatttttactaaactaactagaggactttcagttgtgcccagtcctttaaagaaatggttgcaatgtgtttggtgaaagatcaaacaaaaaggccaactgctgaaaaactgctgaagcactcctgtttcaaacacacgaagcctccagagcaaactgtgaaaattttattttccgatttaccacctctttggacacgtgtaaaatctcttcaggttagccatgctctttgtgtttcagcttttttgtggaagtgatgatgttcttaccttttgtatcgggttgttatatgacaggataaggatgctcaacagcttgcattaaagagaatggccactgctgacgaggaagctatatcacaggtgacacaccccttatattgacaacattacctaaatacttaatgagtcgaattgcagagtgggcataaaacaatatttttaatgtcagagcgaataccaaagaggagtgagcgcttggaactttgacgtcagagacttgaaaacacaagcatctttggtaatttacttctcgcaagctatctgtgattgcactatccttaaatttctgttcattggtttcatcacataatccctgtttttatattgtttgtttgtgtactagttaattgatgatgatgatctagaagagagtaaggaagatgaagaaatattatgtgcacagtttaataaggcgagtactatgtagataaagttcagaaaaatgcatctataaaatttcacttccttggtatgcaagtttggttgtctgaacatatcttagaaaatccctgcaggtgaatgacagagagcaagtatttgatagtctgcaactatatgaaaacatgaacggaaaagaaaaggtttccaatactgaggtggaagaaccaacctgcaaagagaaattcactttcgttacaactacttcttctttagaacgaatgtcaccaaattcagagcatgacattcccgaggccaaggttaagccattaagacgccaaagtcagagtggaccacttacaagcaggactgtattaagccactcggcttcagagaaaagtcatatctttgaaaggtttgacatttgctaattgctgtttgagactacactttaaatctgcttgtcctatatatagtacctttcaaacaatccaacttgttaattttctatctgctagatccgagagtgaaccgcagacggcaccaacagtccgaagagcacccagctttagtggtcctttgaatctttcaacccgtgcttcttcaaacagtttgtctgctcccatcaaatactcaggaggtgagcaagtgatataggcagtcttcgtccagcttagtggttttattgcttctcttgcagttgagttaaaggttttgtccatttcgaataggattccgtgattctctggatgataagtcaaaggctaatctggttcagaaaggacgattttcagtaacatcaggaaatgtagatcttgcgaaggttggtatttaatttactgctattaattttcctatttctttgacggtaactaacaatacaatctactctaggatgttccattaagtatagtccctcgtcgatctccacaggttggtttcttgtctctgcttattactgtagactggttcttcacctttgttagttacctgataaattatacataattccaggcgacccccctgagaaaatctgcaagtgtgggtaactggatacttgagcccaaaatggtcagtttgcgatcacaaagtgtccttcaagtcattcatttctgtatcttaatcttagtcttatttctatcttgcagccaacagctcagcctcagacgatcaaggagcatagtagccatcctacgtcttcctcacccatcatgcctcaacttcaacatctattccagcaaaactcaatacaacaggtgaggaacatccattaagacatgagacttatctcttattaattaattagcaggatcttaacttctgcaattgaatgatttcgctgcaggatcttattatgaatttactaaatagcttacaacccgtggaggcaacagaaggtagtatagacaattatacttcaatctgctgtgactttattattgattgaagactattcagtaacggtgccttcatctttcttataggttctcaatctgggaagttaccacctttgcctcgctcagacagtaatggaaacgtaagttgatttttcatatatgttctgaaaactttcataaagatattgctcacagctatgtaactattactatggataacaggttgaacctgtggcttcagagagggagaggttacttcttagcagtatctccgacctccgtgctaggttagtcctcttcttcaagcaaagcttttgtttctaaagaataatgtagttagtctttctaagtggatcttcctgcaagctttaactgccaaaatcttcaggctggacgacttaacggaggaactcgatatagagaaatcaaaatacagccaagtaagttaacacattttcaactcgttaaaacgcaataatctgcttgttgtgtttcgtgtcatcaagcaaatctttcgtttatgtttgtgtgtacagctgcaacagaaattgaaagcattcacgggtcgcgaacactaagtgtaaccagagggaaagcgacactggaaacactgaactgcacagaacctgtaggagaaagagtgaagtctcttttggttataacagtaataaccagacaagagcttagagacagtgaggcatagagcatatcaatttctttagttgggttcagtgtaggttccagacgatgacaatgacgactaaaacaagatacgaccgatgtctgcttctgatgtaaactactagttgaagacaacagaaacgaatacagaaataaaagaaaaggagaagaaagttcctttggggggtctcaaccccacatatatttgcttatatatttattatcacacgttttgatcattttttgttttattttgtttggtgtatcataatttactagtgagataaaggagaaagctcttcttttgggttctttgtgtattgtaatttgtaaatgcaaattgattgatgtacttttgtgttttcatcacattcttaaacattatcttctggttttaccttattttttcaagttgagaggattcaattgaaaatttgaaactagaaagttcattgctctatgttcgaagaaaaatgaactctcgactattgtaatcaaaatcatggtttttttacatttatgttccaacgttattgtacaattacactgattgattgattacacaaggaattagaagaaggttcttcttgtccttcttcttctcccacttgtcaaggttttggtagaggctttagacactaaatagcccacacccaaacacataacccaaatccccaaatctacggcccatcccattccttctgtctcagactccatctcagccgtccattccacctcttcccactctccctctccgtcgtcagattcgccgctacacgtgcaaaaacacacgccgccgtcagaatccctcccttcctctctctcctccggtatctcctccaaacactcaaacccaatcttttgctttctccttcttctatgtttcctcgccatcgtcgctgttgccacgtgtccctccgccgcaacaacaacttccgccgctccttcctcttccatctcacactcgcactcaagtttccacttgtctccttcgtcttttctgaaaataccttttatcaccctctcctcactcatgtacacctcgaagcggatcccttcccagacccgaacacgttctcttgacccgtaaatcacgtctcctcctttcacgactctgtgaagcgtcacgaaagctggggaatcgggtcggatcttggacccatcaagctcgaaagcagcttcgttgattcgtggtgggtagagaagagtgagagaatccggtaagaatcctcgggtgggtaaacctgtgaaccggacgaagaaagctttaacctttaagctctctttctcgacataacgctcgaaatcgggcgacctacacatttctgtattttgggttcgttagaaaactctctgtttctcgtagactttgatctaaaaacttgtgaaaggatcggcctttttaagagggaaacatcatagagaaaggtggcgacttgtgacttctgttttgtttgaatcctaggggtggtggcacgcggtttggctgctgacgtggacgtctcgacgaaatgtcctagttgtttaaaaatataaattcgggtcaaaatcagaaatggcgtgtggcttcatcatcacttcacggttgcatgatttgcatcggtggtctataaaatatcaacatgcgagcagcaacgtttagcatgattacgaacgtggtttctcatcttgagttgcacaattgtctgcagactttgcttgtttgtcttctacttacaacttgtcttcttcctatatttcatttgtcgtttctgttcactttggtttaagagaattatatatcacacaattcacaaccggacaagtaatcaatcccaagctaaattccaaactcaaatcttttaaaaagctaatactagctataatttagtaatttgatagaacgtagtttacaagcttgctcgattaaattgcaattacgacgatttccaacaagaatttgtagttatagcttataaagttaagtacttaaatgcaatgctataaagcatttttagttaaataatttcatgatacatgtacatgaatgaatgttaacttttttttgttttgtttagtttcttggaagatatttatttttttgactgtaatgatttagacatgatttttatattatataaaggtcccacatgatcttgagctgctggttttgggttctcttttcaactcacacttcttcaaaagcgaatttgcttgtaacatgttaatataaaattattattaaatctataggattgtccttaatgggccggccttttacgatataaaatttggttcaaataaatgtcgaatacgtcttttcgttcagcccatgaattgactaaacaaaggggattagaatccaaacaatcaaatttcttctatagtttagtttagaacaagaccatgaccatgaccaatattatatatatcgattattcgtttttatatgttctatatgcttaaaccaaacttaaaatgtaaaagaaaaacactgtgaatcattttcagagttatgatgtattttgttaggaaaccaaacccctgttaaaaactaatactgaaagtctgaaactatgacgatattcactttcaattggattttttttttctatttgatttaaggaagtacttttgaacccgaaaactaactgaaacttaaccacacacaaaaaaaaaggatttgtatcttatattgaacactacagaatttcgacattagattttttatgattttggttttcataagagtttaaaaatgtgatcatctgttttggacactgcaaatagagattttaaaacaataaaccaagtagatataatagtccgtatagtttgtccttatatataacattataggtgtaaaacacggactacataaaagtggacacataaatgcaaaattgttactacgaaactttacactgcatgtgactgatattttacgctcattacatttggatcattcgtagtgataaattaattcagggtaacatggcaagtaagtgagaacgtggtcattaatttcccccaactagttactaaaataactaaggtaaccttcgaacaaaaacaaaactttggtaaaccaaaatacaaaaacttaggtaacatgacaatgaaagtaaagaatatatagtacttgttgataagaatatagtactcgttaataaaacgctgtcggtagaagcgggtttggacgcaatcgcaggaattagatggaaaacaaacaaaaaagaaaaagaaatagagttttagcaaagagtcaaaaagagtcattttcatatatagtttggggtcaatgtagggctataggaggataagttgtgactttaagagtgaatgagattctttctcaaatgaatggtgtcaaggactagtattcattttttcttctttcgtctccatccacctatcaatatccccaatcttttttacatttttgaaatgttttttgttttgttttgttttcctcaattttagataataagtagacgaatctaatccctactaggcctaatccctatataatacacgcattttatgtcatattagaaagcaacatgttagttgaaaagtttaaagtgttttggtttcagctttgtacccactattagattttaattactaatttttttttgtaactgatttatcgtttttagtattgatagatgttaggaactttatatcaaaaataaggtgagacctaatgtataaaagagaagcaatcaacacattaccaattcagtttaaatagaaaatttgctaaacttaaccccgcatgcccttgcgtaaagcattcaaagcacaagtgaaaataaacccacacttcagaagttatatgttagtcaattgtctaattttgattgctattttccttttctctttctttattttcttcatcgccgatgtggtgttccacaatctattattcacgtttacttaggttttgttaatatatattttcttcccctcctacgtgttttcaacatattttcattaattttctctattttcattctgggaattagatctttaacatcgtcactactcatcactgtcaccagtaatgagaaaaaatacaaaataaaaccacacactctcaaagctggatttcttgtcattgaactatcgctaattaatactgtggaactcgtagaataatcaagacgaagggattgcgtagaaagagaaacgaaaaaaaagaaagaagaaagtgcattgtccttgtcatgacatgtggaagtatcggtcttatatggtccattgagccacactcatttagaatctcactactttttcaccattttcacatctatacacgattatagcatctatatacatttactttttcaattattctgctattatgggttttggatattcatgtcctaatcattataattctcttaaacaaatatcgaatttcgaatattttttaaggttattggctatatgtactatatttctatagaatagtttttgttaatatcatcgatcgatcttcagtcttattttgaactatctaatatattcagtggcttttcatatggacataaaacctaggccagtgtcgaaagttcataaacttcgaagtcaaaactagctataatggttatctttgaaaagtaactcaaatataaggagagtagaaattctacacgtaatgctgtccgagacatttaattatggacgatgtgattgcagaaacaattttgttttcaaaccctctcttgatcaaaaaggacatttaaatcattgcatccacttcaaccacacacattcatttggctgtaataacatttcaaagattcttacaaaacaagtgaaatgtcattaaatgtccttttagaacaagatgctaacgacaatctacttggccacttgacttgtataccaaatttctcccaactttttgttcacagaatttgcgtttacaactttggcgtttgtgttttgacggattcgtctaagtgggacaatgcgcgtgtcggacatgcgcacttaagagggtagagacagtgagttctttagctttccttatattctctttcaaaccaaaaaagagactactattttttgtacacttagactaaggaaagcaaagtttcatattcctaaaaattctggttttataagtatcaaagacaaattcagtctccatggaaatagagcaaagaaggatcatgaagagagaaggagaagaagaagaagacaacaatcaactttcactgcaagaagaagaaccagatacagaggaagagatgtctgggaggacaatcgaaccgtggacgaagcagataacggtgagaggagtgttcgtgagcatagtgatcggagttgtgttcagtgtgattgctcagaagctaaatctcacgacaggaattgttccaaatctcaacagctctgcagctttacttgcttttgtctttgtccagacttggactaagattctcaagaaatcaggatttgttgcgaaaccattcacaagacaagagaacacaatgattcagacatctgctgttgcttgttacggcatcgctgtcggaggttaatttaagaacataaatttgcttttatttatttcttaatagtttattttcttgcgaaacaagcaaagattcagtgaaaggatctgtgaaacagttccaaacatactaaaatatattaactttttgaaaaacttttgggttagttgagtcacaaaaaagggttgatattgcttttgcttttgggtatgatataaaatctaagttgtaaaattttgatttaaaatatttgagtatttgtttttctttttcaggtgggtttgcttcatatcttctggggttaaaccataagacatatgtgttgtctggtgtgaacttggaaggtaactctccaaagagtgtgaaagaacctggccttggttggatgactgcttatctctttgttgtctgtttcatcggtctttttgtcctaatccctctccgaaaggttatgattgttgaccttaaattaacatatccgagtggtttagctactgcggttctcatcaatggcttccacacacaaggagatgcacaggccaagtaagttcattaacctattttacaaaaagtgatattgttacataagtttcctaatctttaattggaatcgatttgcaggaaacaagtgcgtggtttcatgaaatacttctcatttagtttcttgtggggtttcttccagtggtttttctctggtattgaagattgtggctttgctcaattcccaacctttggtttgaaagcttggaaacaaacgtaagcattaattatacaaaaacaaaacaaaaatatttcagtgaaacgagttcttgaatcatataataactaaaaacttttttttggtaggttcttctttgatttcagcatgacatttgtgggagcaggaatgatttgttcacatttggttaacctttctttgcttttaggagctatcctctcttatggcttaatgtggcctcttcttgataaacttaagggctcttggttccctgataatctcgacgaacacaacatgaagagcatttacggctacaaagtcttcttatccgtagctctaatcctcggcgacggtctttacactttcgttaagatcctctttgtgaccattgccaatgtcaacgcaagattgaagaacaaacctaatgatctagatgacgtaggtcacaagaaacaacggaaagatctcaaggaagatgagaatttcctcagagataaaatcccaatgtggttcgcagtttccggatatcttacattcgctgcggtctcaaccgtcgtggttcctctgatatttcctcagctcaaatggtattacgttattgtagcttacattttcgcgccttctctggccttctgtaacgcttatggagctggacttacagacattaacatggcttataactacggcaaaattggtctttttgtcatcgcggctgtgacgggaagagagaacggagttgtagccggactcgccggttgtggactgatcaaatccgttgtttcggtttcttgtattttgatgcaagatttcaagacggctcattacacgatgacgtcacctaaggctatgtttgctagccaaatgattggaacggtcgttggatgcatcgtgacgccgttaagtttctttttgttctacaaagcgttcgacattggaaaccctaacggagaattcaaggctccttacgctttgatttacagaaatatggcgattcttggggtgcaaggcttctctgctctgcctcttcactgtctccaaatgtgttacgggtttttcgggtttgctgttttggtcaacgtcgtcagagatcttactccggcgaagattggaagattcatgccacttccgacggcgatggctgttccgtttcttgtcggagcttatttcgcaatcgacatgtgtgttgggactttgattgtgtttgtttgggagaagatgaatcggaagaaagcagagtttatggttccggcggtggcttcagggctaatctgtggcgaagggctttggactttacctgcggcggtgcttgccctcgccggagtaaaacctccgatatgtatgaagttcttagcttcataggatcagtcaaagagataagaagacttgtgaagttagagtacttagaagacgtcaatgatattaaaatcatcctattcttagaataacaggtagacttctgaacaagaacatctcttcttctaggaattaagactaaaatctacttacatccggatgattcatgctctgttttttggtttggtataatttgtcaacacatctagatctgttccatttccggttatcttctattgggttatctctgaaactgttatgggctcggcccataaatttaaaccttggtgtaacaaaaagtaataaaatcagctatttaatcctatatatttgtttctttttttattatataggaagaaatccttgcctttagattgcatacactagaattttagtattttcaaaaaagaacactatatttcaaataaaaatggtatatatgataagttttgttaagatattatattcaataaattgcctaattcaataagcatattttagtaaaaaatcgcaaaatattcatcatctactaaacaggtcaagatgtatttgactatcttaagaaagaaatattaattcactttgaccaaataaatggacaattaggtaaccaaacaaaaaccacatgaaagtaacaagacagagaattaggcaaaccaaataaataactcacacaacccaccgctcaaccacctaccccttgtaatatatctctccccttcttctttttatttcattatcttccaaaatcctcaccacaaaacattatataatttcctcttcatatttcaagaaaactttaatctttttttgtgtgtagaattctatatttctggtaactaaatggcgagcgagggagttgtagttgtcggaggggagagagaaggggctgagatcgtgtacggggcggaggaatgttacaagcaatcattggagcttctagaggagctagggtttccaaaaggagtcatgcctttgaagaatcttgttgagtgtggaagagttagagccactggttacgtttggatgaagcaagacactccttacgagcatttcttcgaagccaccaacactcgtgtctcctacggtctcgaagtcaccgcctatgtcgacaagtgttgtatgaagaagatgacaggtacgatctatgaaatatatgaagataattagagatataattttatttatgtaagtcatgttattgtttttgtgtgtacgtttatataggagtgaagagtaagcagatgtttttgtgggtaccgatcgtggagatgagtatggaggagccaaaaagcaagaagatttacttcaagactcctatgggaatcggcaggtctttccccgttaccggattcatggacgaggaagagaaacgcaacttttacttggagaatcccaaaaactaaaccaactaataattattcttatgattattacattttgtggtgcttttttattttatttcttgtaaggttgctctatgctattaaattctatcaataatacattttctgggagtgttgattatttttcctacaaactttattcataagtatcttagttttttttcaatctatatgtgaaatttgattttgataattataatgtgaagtaaatgttgatttgtgttaatggactatcacttataattgaaaatgatcaatacagtaaaaaaaatcaaatttgatatgcttcacaaattttattataaaattaagaactaataggaaaccaaatttataaaaatctcgcaaccatacccatatttctatgagtttaacaaaagacccctcgcactatcataattcacatatagagtagtgattcaaatataaatcctgtcaaaaccatattcaccattacttaacaaaaacccctgtccaaattataaatcattaaatctggtcaaaaaactagtgattcaaatatagaagtcttagatattacatttccctgaaactgtcgagttttgaatcgttaattcaaaaattgtgggatgattaaccatacagacaataaatgattcctaaacactgaaaatgaataaatcgatatatttttgttggaaagtgaaggatattacgtccgttggtaatgttgagggccttccggatcatagaatgagcgctttcccaaaatttcattcactttgttactgaatatggccatatgggtacgcattaaaagctttaaagtgacggaataatatgttggatgggtctaaaacattcattaatattggtgaatttgtttaaccaatctgaccaacttgtagggaatcatcgcctaattcacatgcatatataaataaatataccatcgagaaagaaaaaaatatatatacggagtatagaaaaaatgctacagcattaatagaatttttgagattataaatatgtaaactattgacatttactgatttacatactatacatagtttgcatcaatattggtatttttgttaagtcttttactatatagtgtcaaatgtttatttctcttcgattagattttgttcagtcttccatcattgtgttaggcggataaggtatcatcccttgacaaagcgaattctaggatatgaacttagaagagtacgtaagatagaaaattgtggtataagccatagggaggaaaaacctcaccacaatgatgactatatatatcgaacttcatataacgaattaaatttgtagaactcttctatctttaaaaattaaaaaatctgcaggtatataccgttgatttaatttggtcaaaaaggttcaaataatgaaggcataccaaaattaaagtcatacctatttatatataaacgaaatatattaatatgatgaataaattagcataaaaaacagatgcgaaattattatttaatactccatttcctggattatctcatgatacataaggatttccttaatttgtaattataaaactcttaagaatatttttaccaacccattacatagaacaatcataataaatcacaagttctctcatcaaacataattttagcaagaagaagtcttccaaatctcttggagctctctggcaaactcatcttgtctgccaacgaccatagtgatatgatctttgtgctcaataaccttaactcgtgcccgaggaattcgctgtttaacgttgtagctacactcgacagggatgagttcgtcgtctcctccgtggaagatggtcacgttgcactttagtttatctcgtacgatgtctagatacgtatcgagtttgcttcctgtcccacatataatgttatgtagagtatgccatgctgcgttgtgtgtgtgacacatgaaaccttcaattaaaaagtttacagtcctggatagagaaaatatatttattattagctagtaaactagatgatatgacaaaatgtagtttcgtactagatgatatgacaataaagagtcatagagtttgcatctcaacgtagctaatttacttattcctgatgatgattatttaaacttgattgaatttaatttttcaaatattaattacgaaattaatagctactattgattttggagttgaactcatatctggtagcactaatcggaggaatttttattccattttctatattttatttaatctcgaagggttggttgttttggtaggacgagagcactatttctaaaccatgtattttacttgtaatacctataaagtagaaactatagaatagaatcgtaaaatctatacggacatgtcactgaaataggccgatcaaccaacgtagacaattcaaaagtaagatcaattaaattgctccaattacacatagtcataagtacttaggttggaatttcaaaatttagcataacactagagtcaggtttgtttggttgcctaagtccccatttgtcctagagatcttctccactaaacgaagatataatgatggcatgtcaaattaaatacgtgtctctctatatttggtcatttgatgtaacttgtgggtcaagctaacaccacgtagagttgtactatatctaaatttgtatatatgtaaattattatgatttcataaccataaaatggtcgtagacactaactagccagcgaccagatgcggctaagaattaaatttgtaagtaagagttagtcatttggaggtgcgtttggtaactgatgacagcaactaactagctacatcacccctcaattgtttcctattaatgaatatgattctaaacttagaaaaagttaaaaaagctcaagcagaaaaaatctaaaattagaccaaacctaacttttaaatcactaaaaattttaaacttctccaaaaaatgatacaaaaccaccaacattttgtcttttgcacgcgactgcgttttgtgtacttattattaagtatgagcatttgttttttgtttttttttttctaaagaattttaagttcaatatctttacggattttaagcaaatgagaatttccttcgccaaaagttagtatgattagaaatttgtgtaaacggatcaataaataaatgaaatttttaacaagttgataagaataaaaacctgttgtttcgggtcaagacaccggcgatgaattgccaaacacggtggtgtttgcatatgaggagacaaatggtacggctaatgtgttcgtaccaacaagccatcgacgctccgagagctattggtggccaaaccttcctcggcgccaccttcttcatcacgtactgcctcggctttttctctcccttcggtactggatagtacggctgcccacacgtacacatgcacacgtgttgtattagcgtacctctcatatatcttacttacacaatgtgttttgtcaagccaatacatttgaaattttccctagtttgttaaattatttcttactacattagagaaaaaacacacataaaaattcaattttattttcagaaattagaaaattgtaaaagaattggttaagaaacacagcatttttcttgaagcaatctaaacacaatcatgtcaaatattaatttagtcacatagttcaaacttctaagacttttctaaatggaagtaacttaaatgagtgaccatcatgatattcttaatgtaatgacgattaagagtatatgcagttattataaactttagcaatcatgtcttgcatgcatataaagtttataaaccaataaagacaggtccaaaatatgctaaaactactaattaactcaccggagcaaggagggtaagcgacttgattaagccgccatgtctagcggctaggctaagcgccaaaatgcatcccaaagagtgagccacgatgtggaaagacttcacattgtatttgtgtaagacagatttctcgatcatctctacgtgttctctcaacgtgtagagtgaatcagctggctttggactctttccgaatcctagaagatccacggcgaagagtctatgagtcgaggaggaggctgacaggcttggaaacaccgtctccgtccaaaacgctgatgaagatatgaaaccatgtatgaaaagaacatcctctttcgctgttacccctgttgtaatgaatccgattgttttaaaacgccaattaaaaagttgtgttagcgttatatactcaaacaaagatgtgaaattttaccatttgggatttgagttttgacaaagagggaatggtttttgtcagaagtagaggcccacgatgtacaaaacccacaatcacaatccgaccatcgagagatatcgtggttcaaattctgcggtctgatctttccccgaagcatctcaacgaccgtgaagttcaccgtcaagcttgacttcgttaatgatctcctccttttgttcttggtcttctcattatggccgctacactcagactctgaccgagtaaccttaacgaaccgcttattgagctcgttaacggagatggttgagatgtcggaaataagagaaggacgtgtgtaaagggtctcggagatatcctccagctcaatcttggaacgtccgctacaagaaaatcaaacgaaagtaaatttcaaatattctactcctagggaaatattggccagtagttctaaaaaaaatgcatgtcaaatgttatagtaaatatgttaaatgatagtaagatatttcgttgaggtaaaaaaaaacagaacaatcacatgtaatgatgtaaaataaatagctatagattatatgagttttatttatttattatagatatctattatatattagacgaaaagattcattattgtctcttgaaatattacggttaataaaacctgtttagaggctctttttaataaacacatctttgaacaattctgatatagtgatatgagtacattttgcattaattaataaaacataaacaataatgaatatatatacccgagttcttgaagcggagaaagagtgaggatcttggactcgccattattgtgagacaaaaggatcttccctcgagttgtggtgatgggttccttgtccgacaagcaatagcaaggcttccactcggcttcgaagagataatcagctgctttgtagaggagacaaagaaatgaatcaacgatgtctaagatacagaacacgacgaagctaacggcttcgttcagccatgttcctgctacggtcgctgctccttttatcttcatcacagccatggctcaacaaaagcttagagagtttgatatacaaatcttctttatatatttgaagagagatccgtgatgatttttccacttgtacaattgtgtaatgtactttatctataatatatagaacctctctctgtctttctgtttttctctctctatttgagagttgagactaggagatattatggagagaaacgaagaatcagagagtcgtatgaatgtatatagtctatagatgatacgtgattaatatataatatgatgtcataagttgagattttgttaaagactctagaattactatataaggtcacggatccaccggtttgaccggtctggtattaaaaacattggctaaataacatgtggctgtgagttaattttagactctccttatatgaatttgtcgaaaaatctatatatgttgataggaagatggcgaatttattgcaattaactttattttttatacataaaaaaatggaacttatttttgaaataagaaaataacttttgctggaaacgaattcagaaggttccatagtaatgcgtgtaagagaaactatgtgtattttcttaacttgtgagttgtgaatgaagttgggagtgacaaattggtggtttttgtttcttctatatgtatagatgtggtacataattgtatcacatgactatattattctccatatataaatgttttctatcataattgtacacacagtattgtttgtcttgcagtgaaaacatttaaaactttcttgaatgtacaaaggtgccagattcttcagatgaacaaaatacttagtatggaaaaaacttagaaattgagaaagattggaagataaaagaggtaaataacagttgtaaccaaataaattcaaaacaaaaaaggatataaaaagataaatgtggtttgtgtcattaaacgcccaaagaaaaagaggtgcatggtggttgaaccgtcctgtgaaacagaagaatcagtccatgacttggctttatcaaatgatcatgcacaattcttcatttcaataagcttttattttcttacaaaagtatttacttttccatttgaataatcatttcttgttcctctaaaccttgctaatccaattatttcttatctaactcgtttatttctttgtttcatgacacgcaattatatctattttcagaccaacgtagaggttttaataaacaatatatcaccaattcttttttttgtttgtttgttacattgccgtttctggacgtataaggttttctaatggcgatatggttgattcgtccttatatgtgaaaaattctattcactcgtaccaccaaggcaacaactaatataccattatactagttatgacaaatatatatcaagacttcctaacattccggtgttaaataaataatcgacacatctaactgtaaaacggtacggatcacgtaggttaagaaaatgacatacatgatctttggggtatgatgtctttctatcaaattaaatttgtttctttcactcccgagtgtattttaattttgacgcaatactatttctttgttgtataaatttggatatttggttatcgtactgcgtggcagtccatgcaatttcatatatatatttagaatttttatttcccttggatttgcctatatatttctatctttcgtttagtccataaaatttactacatatactacaatacaaatgttgaatgttttaaccagaaaaagaagaagaagatcaatttccattttaaaaagttcataatttttgttctctctcatgatcatactttggcggggaatttaaaacatgtgttaagttattgattactcaataacagaaatatggatttttagtagtgggccattattgagctattatagcggcccatgcgaggctgaaggtgtcgtgatcggcaagtcaagaaaccctagccagagattgtacagataccaaacgtccgtcgcatctcagatcatcgacgatcttatgtcactagacactagtctttttgtaatacagatcagagtcgctcgtgtttgttttcctctcctattgtgcccaaattttattttgttgttacttgcagttttgcattcaacttgtttgattaatgtctctgagagaccaagttcacgttaagacgtgtctttttactcagaagacaatggaatatgaagagacaaaatgtctatcattttttgaagtgatatttctcatacaagagtgcatttaacaagtaagattttgtcagcaactaagatttgtttgagaaatgcacaaagtttgaaattctagtcattccaacaatgaggatgcttcttgggattccttacgtagacaagtcggttctttccaactctgttcttgagaggtgactcttatctctgaatctatcattgcttgtacgcacatttttacttctttctgatcaggttaatgctcacatttacagaggcaagcaggataaaagcaaactattgttagtcgacaaatgccattatgagcttgatgttgaaggtatgttccattcttttatcaccataattgaaatttgtgtcattttgtagaccgtacaaaggaatatagatggtttaattcgactatgtttgtgatatgtagacaaatgctcacatatattatcatgagtttatatgagcattgtgtctcttattggagtggttcctgatttccaaaaagttggggttcactttggagtctttttaaaatgtagtcctcttttggtaaaacacacatgttttattaaaaactatataaccaccgattaagttaggcctactatatatcacttactaacaatgaacttaatagtccatatgttttgacatttgaacctaggtgagtggtcctataattaggggtatacgacaacaaagacaagtagacaactatagttacccaattgataaaaggatataagtagttttattctttaaattatctttttgccgcaatatttatttccattcttcccccaataattatcatcatgtgatctataagagaaggaatttaactaaatcagaagaaaatagaggattaaaagtagtggggtcgaaaagagaaagaagaaaagaaatggggggtgaaaaagatagtaaaatctaagaaagtgacccgaagagagtaaattagttagagcatcacatctctctctggtccccaatgagaagaagctctcacggaaacctcatatgggtcctatttaccaacacacatctccaagcaccctcctttaaaacgccgttacacttaacggagctttatcctcatcttcatggtacgatgtagtttgagaatgagacaaaaagagaagacgttacctaaggtcgaagtaaaagcttttgaagaggcggtgtaatggagagagtgttaacggcgttagtgtaggaaacgacaacgtgggatgctgctgtctgtgtcagggagaagagagagagagagttaatgaagatttttgtctgtattctgaaacaaggtcgaatgttggagactaaggaaacaaaaataaagctttttgatggcttatgagtctttgaaatagctacaccgctcctctcaccttagtctttaacctaataacccccccccccccccccccccccccccaattttctctccctatcctctcatttttgtagtgcgcactgagagagacaaaaaaacaaaaaaagatggagcctttgtttttaaggttttctttatgttgaggacattaggctaagacaaaaagctctgttttctttctttgttggatttttgggtgttgcttgtttgaagaaataaagctttgagtatctccaaggtttccattacagagacaaaaggggtatttgagcttagtttctctgtttatgtgtttgttgtgcttttaaatcggggtttaaggtttatagaagtggtgtttctggtaacagttgagactttttgaggggatattacagagttcaggaaataaaaaatatagaaatttgtgttttgtgtttaatgggaacaagagcagaacgcaaggaagattttgttggtgggtttggatttggtgttgtagaaaattcgcataaagacgttatggtgctacctcatcatcactattatccatcatattcatcaccttcctcttcttctttgtgttactgttctgctggtgttagcgatcccatgttctctgtttctagcaatcaggcttacacttcttctcacagtggtatgttcacacccgccggttctggttctgctgctgtgactgtagcagatccttttttctccttgagctcttcaggtttcaagttctcacctttttgttgacttctgagctatgaaaaaattgaattttgttgttatgtgttggttttgatgtgattttggtggataaaatccaggggaaatgagaagaagtatgaacgaagatgctggtgcagctttcagcgaagctcaatggcatgagcttgagaggcagaggaatatatacaagtacatgatggcttctgttcctgttcctccagagcttctcacaccctttcccaagaaccaccaatcaaacactaacccggatggtaagatctccctagcctctcacttaaacgtttcccatttttgtcaatttgtcttggtttcatgtgttcttgatctcttgttatcatgtttgatgcaactaaaagccattatgatggtattagaatgtcaagttttttaccagtgttacctcttagtggatacatataggagtggaatgtttagtatttatgctgattacaagaatctgccgttgtctatgtggatgacagtaactgtggcagtggcgacaggaggctcattgcagctggggattgcttcaagcgcaagcaataacacggctgatctggagccatggaggtgcaagagaacagatgggaagaaatggaggtgctctagaaacgtgattcctgatcagaaatactgtgagagacacacacacaagagccgtcctcgttcaagaaagcatgtggaatcatctcaccaatcatctcaccacaatgacattcgtacggctaagaatgatactagccagcttgtgagaacttatcctcagttttacggacaacctataagccagatccctgtgctttctactcttccgtctgcctcctctccatatgatcaccacaggtgcttttacttacattcttgtagtcaaagtattcaaatccttcccctttgaaatcatttgaaagactgaaacttagtggttgatatgtgaagaggactgaggtggtttacgaaagaagatgatgccattggaaccttaaacccggagactcaagaagctgtccagctgaaagttggatcaagcagagagctcaaacggggattcgattatgatctgaatttcaggcagaaagagccaatagtagaccagagctttggagcattgcagggtctattaagtctaaaccagacaccacaacataaccaagaaacaagacagtttgttgtagaaggaaagcaagatgaagcgatgggaagctctctgacactctcaatggctggaggaggcatggaggaaacagagggaacaaaccagcatcagtgggttagccatgaaggtccatcatggctctattcaacaacaccaggtggaccattggctgaagcactgtgtctcggtgtctccaacaacccaagttctagtactactactagtagctgcagcagaagctcaagctaaacaaatggcgctcgagttccggtttagtgattagaaaccatcgttgttagtgttttgtttgaaaaactgagaccttttagctttctgttggtgttttacggttggattttgcagtagactgctcttatgaatggaaaattgtttgagacaacgctttactttcactgctggattagtgaaaagtcagaataatcacttttgctaaacatttgactaattatttcaagagttgaccagaccgacaggtccaagtattgccaacgggaagcttctgtgattttgcaggatacgtgacgtcggcaatgacgcgtgcgaagaacaaattaaaaagcatatatccccttaaagcgacttcgcagcaaaacctcttgtctcgtttatctatataaagaaaatttagtagcaaacttctcgattccttgattcgtgggaaaaagaaagtctagatttttgtggattttgattttgtgattccgtgattgtatgaacttgagccgttttgcttcgagattaagaatggcggaagaaatctcaaagacgaaggtgggatcttcttctactgcttcggtggctgattcatctgctgctgcgtcggctgcaacgaatgcggccaaatcaagatggaaaattttgtggcctaattcgctccggtggattcctacgtccaccgattacatcatcgccgccgagaaacgtcttctctccatcctcaagtagatctttctctctcaagcacacatttttattctcaattagggatataactctcagttggattgattgttgacataaatgaatttgaaattctgtaatttgggtttagccctgtttctgggtcattgtttcttagaggacgaaatgtaaaaggagagttttttaggttctatattagggatacgctgcttattagctcttttgggatgattactcttcaggacgccttatgtacaagagcaagtcagtattggttcaggaccaccaggttctaaaatcaggtggtttaggtctacgagcaatgagtcacgttacatcaacactgttacatttgatgccaaggagggagctcctacactcgtcatggttcatggttatggtgcttctcaagggtttttcttccgtaattttgatgctcttgccagtcgatttagagtgatcgctattgatcaacttgggtaagcaactttggtatcattcaacttgtcttcctcaactgtattagtcacaatatggccttttggttgcttcaagtgttaaagatttcatgctgttgccatcacttgattttaatgtcttaaaaatcgaagacaggatattgctgcccattttaaactacttgtatacattgtgaatgtataataaggtagttctctctttttcttcgtaggtggggtggttcaagtaggcctgattttacatgtagaagcacagaaggtatttattccctctactgttaatgaatcgtggctaaactttcattggtaccctctcagtctcttaatggcttgtatatgagttgatataccagtaatgaaactgcattgttccttctttaattgtgcagaaactgaggcatggtttatcgactcctttgaggaatggcgtaaagcccagaatctcagtaactttattctattaggacattcttttggaggctatgttgctgctaaatacgcgcttaaggtgaattctcatatttggtataactaaattagtaagtggtgacagtttttgattattatgatatctgacttttcattgggcatatctctggatctttcagcatcctgaacatgttcaacacttaattctggtgggatctgctgggttctcagcagaagcagatgccaaatcagaatggctcactaaatttagagcaacatggaaaggtgcagtcctaaatcatttatgggagtcaaatttcactcctcagaagctggttaggtatgctcatataatcatttcccattcaccaataggttgattagatagatactcatttcgttgatacaaatttatggcactcaattgagcatgggaacacttattcgatgaaattagttggcaggagtaatatattcactatatttctgtaaatgtgctttgtgtgcagaggattaggtccttggggtccaggtcttgtaaatcggtatacaactgcaagatttggtgcacattcggagggaactgggctaacagaagaggaagccaaattgctaaccggtaagtaattgtttctttaagttccatagaagttatggagagtgataatgcaatcgctgatagtgatggttcgttttgcaatgtagattatgtgtaccatactttggctgcaaaggctagtggagagttatgcttgaaatacatcttctcatttggagcatttgctaggaagcccctcttacaaaggtatgtccaccaaaaacattgctgataaagtttctgcatactcacactcgatgactcctcttttgtgtgcagtgcatcagagtggaaagtgccaacaacgtttatctatggaatgaatgattggatgaactatcaaggtgcggtggaagcgaggaaatccatgaaggtcccttgcgaaatcattcgggttccacaggtaaatctctaaacacattcatttgttttctcatttaagaggtgaatatagagaagaagatgacgcttacaagagattttgtttgatcgcagggtggtcattttgtgttcatagacaacccaattggttttcattctgcagtgctttatgcttgccgcaagtttatatctcaagactcctctcatgatcaacaactcctagatggtctacgattggtttagtcatagtatcttgttccttttaccttccaaatttattctatatgtgtatacaagtatatatgaaaaagaacataaaaaagaattactttctttatttgaatattcggttgtgtattggagtttcaagtcctctttccatgtctaaaagttctatttgtaacgttcttgatttcactctaaaacctcttaaagtgtttcaaatgtgatctcattatcgacatccaagttgtaatctttcacaatccacaataatcttttatctcattttttacattttacatatgaaacaaaattatatgtgcttgaaatggggaccactaggtctggtaaattcttattgttttagacttttagtcatcaacataaggttaactttccttgtacagcaaggaaatagtgtatttaccgtagcgggaagggtaaagagaggttacaatttggcatcattcttattttagtagagagacctggacttggtggtcgaaacatttccaatggccatgccgacatgttctctctcagacagctcaatcagctgaaaacttgaggaagaagaaactagagagggttttttgacctgattatttattttggctgactcattcttctcacatcccaacaaattttcgttgatatctgtctctgtcttcatttccgacatggaatttgttcaacatcaattcttttctttagctttatgatccctcacaaataaataatgtccctctctcaatttgcagcaaaccgctgacgatcaaaaggtgagccaagtcttttacatgtcgataattaggtttggtcaatgaaatgtttgaatgtttcattcttggtttctgatacgatgagaagaagtttggtttcaacacatttttttgttgttgttgtgatatctaaattctgatcatttcaatttgatcaaatgatcatcaactgatttaagcatccttaaatgggtttggatttgcacaatagagaaatatagaaagcaaggaaagatgggcggagaagagaagatattggtgtcggtgagggttaggccgctaaacgagaaagagaagacgaggaacgatagatgcgattgggaatgtatcaacgacaccacaatcatctgcaaattccataatttgcctgataagtcttcctacacatttggtaagaatttgaattgcatctctttctaaccattttgatttgaggtatactattatatgaatcatttaaaaatgtgttatagacaaggtatttggattcgaatgccccacgaagcaagtttacgatgatggagcaaaagaagttgcactttgtgtcctctccggaattaactgtaagaaataggtaggtttgttgcatctctccttatgatcaatcattttgataaatactattcttgtgttgcagcgagcattttcgcgtatggacagacaagtagtgggaaaacgtacaccatgagtggaatcactgaatttgcaatggacgatatatttgcttacattgacaaggttacatacatgaacctaactttttgttttctgccatgtatctaaatttctgtctctgagagatcctctgttgtttcctttagcataaacaagaaagaaaattcactctaaaattctcagccatggaaatctacaatgaagctgtaagggatctcctttgtgaagatagtagcactccacttaggcttttagatgatccagaggtcagcttaacttctttatcacgccattaataacactctaatcatcattagctactaaattgattactgatattactatttgcaactttgatagagaggaacggtcgttgagaaacttagagaggagactctcagagacaggagtcatcttgaggaacttctttctatatgcgagagtacttgagcaaaacttatttcttctttctttcttcataatttagttattaccaacaactaggtatatattgaatttgtggatttttttgcagctcagaggaagattggagagacatctttaaatgagattagctccagatctcatcagattctccgactggtactcactttcatatcttttttttttccccctttttgcattcttgatgaaagtttttgttcatgcagacaattgaaagctcgagtcaacaattttctccagagagctcagcgactcttgcagcatcagtgtgctttgttgatctagctggaagtgaacgtgcttctcagacattatctgctggttcaagactcaaagaaggttgtcacattaatcggagtttacttactctcggtactgtcatccggaaactaaggtcacttttgcaccaatttagtaattctttgctaggtctcatatcacttcatctttgagctgatatgagtcttttattgaaattactacagcaaagggaaaaatggacatataccatatagagactcaaagctaactcgtatacttcagaactcattgggtggaaacgcaagaacggctatcatctgtacaatgagccctgcacgtagtcatctcgaacaatcaagaaacactcttctctttgcaacttgtgctaaagaggtgaccacaaatgctcaagtcaatttggttgtgtctgagaaagctttggtgaagcaactgcagcgggaactggcgagaatggagaatgagttgaagaatcttggacctgcttctgcttcttcaacctctgatttctacgcgttaatgctcaaacagaaagaagagttgattgcaaagatggaggaacaaatccatgaacttaaatggcaaagagatgtagctcaatctcgggtcgagaatttgcttaaatcaacagcggaagagcggtcatcttcaagttcaatggatagcagaagaagaagaataagctacgattcaacggattttgatgagcctcgaatgctaaataacttggggaagagtaacttgtactctcctgatgaggatggtttcctgctggatgatactacccctcaatttccggggcataacctacatgataaatgggaggagatggctcaaagcaccacccaagaaccagaagatgcttgcaaagaagttagatgcattgaagtaaacagtggagaagcagaaagagttcaaatccaagactcactagatgacattgttgaaaagaaggaatatgaacaaaactatgagtcccaaaaggatgatgctgattcatctataaaaaacatagatatggagttgagtttatatactaaacctgaagctgaagatggggtaagtgtaaagaaattaatagaagacgtccaagagactgagcaatctgtggagaaacaaaagcaatctccaaagaaagaagaaatggaacagtatttgtctagagatatgtcagagcaagtaacgaagtcactccctgaagaagagcaatgtgtacaagaatatggagcctatgataaacttgaagctcaagatgtgctaactataaacaagttagaagaatcccaacagactgagcaatctgtggagaaggaagacacaaaaaagaatttgtcttcaaagaaagaagacttaaaacagaatttatctatggatcagtcagagcaattatataaatcacctccagaggatgagaaatgtgtagaggtgtatgaagggtctgataaagacgataatacatatgaggctctgaagaaaaaggtcaaggaaatgcagaagacaattgagtactttatgagtattcaatcagcagaagagaaacaatctccttcgtttaatattatagatgatactttgagtccaggagagtatttcaagatgagaagaagccgaagttgcagagaaaatctcttgtttacaaaggcggcggctgctgctgctagtagaggtttcatattcgagaccactaacacatcctttgattcagatatcactgtctccatggacgcacagagcatcaaagattctgatacagagactagcagtagcagcttccatgaatttatggcaggacttagagaaagaacaatgcagcaccattccacgcatagcgacgatactgatacaaagacgatgaagccagaaaacacagatgatggcggcgagaaaacagagtttgagagacaacaaagccaaataattgagctttggcaagtatgtaatgtacctttggttcacagaacatactttttcttgctcttcaaaggcgatccatccgactttgtttacatggaagtcgaactccgaagactatcttttctaaaagactcgaccgagacatcgaggaaacaaactgccaaagcagtaacacgcgagagggaatggttagctaagcaaataccaaacaagtttggaaagaaggaaaaagaagaagtttacaagaaatggggtgttgaattgagctcaaaacggagaagcctgcaagtaacacacaaactatggaacaacaacaccaaagacatagagcattgcaaagagagtgcttctctaatagctacattggttggattcgttgactcaactctaacaccaaaggaaatgtttggcctcagcttaacacctacaacattcaacatcaaaccctcctctggctggaaattttcaaactctttctctcgtattagcttcactggatgataaataatgaaagcagaaatattcagtctttgtgtgtattgtgaaagatgagtatgtattgattggaatcaaactcaatgaacagagccaaaaaaaaaaagtcgtatatataaagaaaaaaaactgactttgataaaagagaaaactttatagtttatagagtgtagattagataaagctctgaccttggaacgattttgccggagcttgcaatggcgcaactaatacgaccaataaggcaattgtcgccgcaatgtaatcaccattttcgtaatctccggtatttgttttcgaaaaagctaccgaacccaccttcttctatccccactcttcttctcttctcgtctttctccactgaaaggtctccacctcgtcggcgaattcgtcccgcgccaccggaagctttaaagcctactgttattgttgccgaagaagatggtgataacgatggttacgagtctgattcgttgaggagtcgtaaccagcggaagcgtgatgctcgccgtgccgttaaatggggtatggaacttgcttccttctccggtgatcaggttaagcagattctgaagtaagcttctcaaaacttggaaacatcatcttttcaaaatcttcacttttatatttgtgttgaagtttctggttttaaagtaattgactttctcatcttagagctgcgtcgcttggtgaagaggtttatgatgcattgatgcttgcgaaggtaagtcacaatgagtacattttggacgttatagttacgttaatcgtaaatttggcacaatgcacataaggtgttcgttgttttgccgcagagactaggctcggatgttcgagaaggaaagcgtagacatttcaactatattggtgagaaaaaacatcatttttatgtagatgaactattatctgggatgttatctttgtattttaccatgtttgtaaattctttagctaatgtggtataacatgctctcagggaaattgttgcgtgaagttgaacctgatttgatggacactctgattaatgctacaaagcagggtgatcactcaacgctgcagacgctgattagttcagcaaaggatgtcgcagatgatgttggagacagttatgatgatgatacagaaacagagtcagaagatgaagaggaggtaagtgtaaacttgtatctcaatataagtataccattcatgttaagtgatttacacaagaaagttgtctcctagatcgcttagttaaattccatctttaggatagtttcagtaactgcatgggagatatgattttatggtgaggggaagattttgtggttaattgccgaggatttaataaatatagtggccaatagagtgggggagaggacattccaggttcttacgaggaaaaaagagcttccgcaacctccttaggggaagaggagaggatctctgaaccacaacattcccacttctgtgcacactcatgaatagccttttaacaagctactgattacatgtcgagatggatgaagagaactgtgtctgttgttttcgtagagtacgtttaacttgtttggtgtctaaactcaactacttttcaggggtctgacgaatatacggctatggctgcgagatggtttgatggcctaatcagtcaaaatgtggaacttacaaaggaggtttattctcttcagagtgttgatttcgatagacaggttagtcaaattaaaattgaataagtcaaggagatgtgtatgacttgtttatcatgtgtatggatctttgaacctagaggtctgattcaagaagcatcatatggtttaatggatgtaatctttatcccattggttgttaataggaattgcgtaaacttgttcggaaagtacagttggttcatgagcaaagaaaaggcacaacagaggagaagcagaaagaagttgaggctgcattagtgactgctgaaaagtctctgaatcaattcctctgctccatggcgaaacaagtgcacagtgagcagactgatttgtacttatgaatgataatgtgttcttgactctctatttgttttttatatatatcagaactccattctttccccagacatccaaaggaccatagttttttaggtgaatgttgttaatcgaatgatcctgtacaataagtccataaggcataagcttggcaaattgaatgatgctgttaattcaggatagtaaattcgtaatcattctttccacttgacaacaaacattaatttacctaagttgacatttaactcttcaatacatgatgtgtgtaacacaagggtttaagcatactttccttaatatcaaagtctctttcacctgatatttatcatcataagaccggaaccggacccattcaagacgatcgtctagctaggtttggaggactaatagaaggttatgattagcttatcatcaaaaggtttaagtgcaaacatcagtataaagacacataatcatcaagcagaccaatcaatagatctttaggagatctcatataacactccgtctactttcctttagtcttacctcattctttaagaaagtctccatatagatgtttgtttgccttgtatcttttttattctagataatatcttgtacttctttccacctttgtttctgttatcttatagtcctctatttttatttttgtttccctttcttttccactccaagtttttgcatttctcgtcatctctccatcaatgtaattcttatcggacacatcatccatcatcaaagcaaaacaaaaactaatactatatatctataaatacacgagtccttttcacttggtagtattttattatgttgcttactaatttgcgactataacacttatcgtacttctaccctaaagttagtggcatctcatatactttgcatttggatacggttttgcatggactttaggctattttccgccaaaatttaaatcaacccccaaataaatttggttaaattaaatgttcatcaatgtgcataatcataatcatgaaacataaaaatgttataggatagaaaatatacacccggaaatgagaaacaaaaatatcaaaaatgcagaagaagaaaaatagtaaagatgagtaaatattgggaagactgaacatttgaggaatcagaggtgaagacatcggacaaccacgtcgataatggtgacggtgaggtttgtactgatccaccgccatctctccacccattcgctgccgatttttggctgtaacatattccaactttaatcagattatcagaataatagtatataggactaaatataggactaaattttaataatttatctgtgcttccccgtttcataatggtaggcctatggtacgtgttgtaataacctttttgttttccttttctttgatggaatgactattataaactcctttattacgtgtaaaaaaaaaaaaagtatcaacttctttttcttagcctggctcaagccaatcaccttactttgctagctaagctcgtcgtgtgcatttaccaaaaagcaagtgggaacaaataaaatgaaaacaaaaataaaataagttaacctacctaggcaaggaagggcaaaaagtgatggtgtaatcagcatcagtgcatgtgaacgtacttgtagcatcgtcgaacgcgtagctatatgatcttggacacgcagatttgaatatctccgagtacatcgatggtttacactcggtgggtgaggcgtacgcgccactacaacaatattctggactaccaaaagcctcacacgcgcttttgcatgctgacccggacccgaaccggagctccgttggacatttttggtttagatccgttacgcatcccgtggttaagcaagtaccttctgacccgccacttgcttccaccaacatgggaacgttgtaaccgtccacgaggcttacgtcgtagaagtcttgtttacgggccgggtctgctggacctgacccgattgtgaattcggcgagtgtagcgggcggttttgctcctgcaccgttacattcgacctggttagagccgcagtccccggttaggcaggtgccttgtcctgtgtctgagttgaagttgcaaccggttcgtgcccaaaaccgacctgaccagctagctggagcttggaacgaacgtgaaccaccgggaacgagctcgaagccggtggtgcctatatcgccgcttccggagttggacaaaattcccggccacacggtgaagctgcatcgatttacgatggttattgtagcaccatcacttcctaccaaatgcaatgctttagctatatgttaatatttacattttatatagaaatattcatactgatatgaaagtatgatagatatgaatattacgtaccatggaagaagaggaagctaaggatgatgaaatagaatgagacatgagaatgaaggactgttatgatcatcactgtttatttttgtctctctattaaaaaaaaaaagtacttttggtggagaaattaagtttggaatattcacaaaacgaaagaccaagagagaaaagaggaaaaagaaagaccaagagtagagtttaaagcacctctatatatacgttgtctcaagggtcaagctcaagatatgtgatgatctcacaaaagtattgaccaatttcttttatgttttaaagtgatacaagataaaacaacatcttgaaaagccatgttatcacgaatatattgattaaagtctttttccatataaaatctatagctttacagattatctgtttgaaatttttgcaaaagtcataagttttcgaaaataaattttgtggaaaataacaccgagtaatatatgcatgataggtggccaaattagctaaagagagtgcatattatggtaccatatctagataaactcggacaatctagataaactcggacagcaggaccattaatcttgaaagataaaaaactcatacattgaaaagaagaagtttaggttccttgatctctagaatgcaagtagtgcgtttacataatccatcaaaaactgcttaattaaactaatcttgatattcgagtaaaacgatgttctgctttaaactaaagaggtaaacacaaaggagaaacatcagaagtgaaatctacagttcgtccttggtgttctcttcttgttgctcaacgggttcggcttcaatgtttagaccaccagccaagtcatctgatttcgtctcagttgcctcactggtctctggttcctctgctgcctcgatttcctcgtcggctactgcatcagggctgatgttcagaccgctcttgactgagttataaatacgggcagcaaagtcttttgggtcggtgagtatgaatccactctcgatcaaagctgtctggtacatgagctgtgctgtttccttcacactctcatcctgagagaatttggtatgttagtttatttctctaatagacagtaagtaaaaaaaagaattgatgggtcttatgtttgttttacctctgggtcacttgcaattctatccttgagttctttgatgatagggtgtcgtgggttgatctcgaggactctctttccgcgcatgtaagcttgcttattagcatccgagagagtttgggactgcatgatcctctccatattagcactccatccaaacttggatgttacgactacacatggagtgtcagccaaacggttgctgattttgacatcgtctacgttttcgctagcgagatttcctttccaccactttgttagctccttgaatgcttccttcagctccttgtcttttgaatctttcccaaccttcagtccttccttggacacattctggaactttttgtcttcgtaatccatcaggtattgcatcaagtattcatcaactgggtctgtgaagaagatgacctgggaacacaagtatgagaacgtgttatgcgagttggagatcatttaaagaagaattattcgtgtgcaatgcaaacctcatagcccttcttgatgagcctctccaggaatggagatttctctagctgttccttgctgcttcctgtgatgtaaaatatgtccttttggctctttttcattctcttaatgtactgatccagggaagtcaattttccatcggactttgttctgaaatagcaaaatacaaatctttagcctgctggtgctaatgaatggacagacgtgtattaaaaaaaaagtaacagagcttacgtctcaaaacgaagaagttttgccaagcggttcctgttagcagcatcctcaatgatacctagtttgacagacttgccaaactcgttccagaattttgtgtattgacccttcttctcatcgttctcaccagacttctccacatctgcgtgccaacaagtcaataagctt

SEQ ID NO: 620 - DNA, 108459 bp, Arabidopsis thaliana
aagcttggcaaattgaatgatgctgttaattcaggatagtaaattcgtaatcattctttccacttgacaacaaacattaatttacctaagttgacatttaactcttcaatacatgatgtgtgtaacacaagggtttaagcatactttccttaatatcaaagtctctttcacctgatatttatcatcataagaccggaaccggacccattcaagacgatcgtctagctaggtttggaggactaatagaaggttatgattagcttatcatcaaaaggtttaagtgcaaacatcagtataaagacacataatcatcaagcagaccaatcaatagatctttaggagatctcatataacactccgtctactttcctttagtcttacctcattctttaagaaagtctccatatagatgtttgtttgccttgtatcttttttattctagataatatcttgtacttctttccacctttgtttctgttatcttatagtcctctatttttatttttgtttccctttcttttccactccaagtttttgcatttctcgtcatctctccatcaatgtaattcttatcggacacatcatccatcatcaaagcaaaacaaaaactaatactatatatctataaatacacgagtccttttcacttggtagtattttattatgttgcttactaatttgcgactataacacttatcgtacttctaccctaaagttagtggcatctcatatactttgcatttggatacggttttgcatggactttaggctattttccgccaaaatttaaatcaacccccaaataaatttggttaaattaaatgttcatcaatgtgcataatcataatcatgaaacataaaaatgttataggatagaaaatatacacccggaaatgagaaacaaaaatatcaaaaatgcagaagaagaaaaatagtaaagatgagtaaatattgggaagactgaacatttgaggaatcagaggtgaagacatcggacaaccacgtcgataatggtgacggtgaggtttgtactgatccaccgccatctctccacccattcgctgccgatttttggctgtaacatattccaactttaatcagattatcagaataatagtatataggactaaatataggactaaattttaataatttatctgtgcttccccgtttcataatggtaggcctatggtacgtgttgtaataacctttttgttttccttttctttgatggaatgactattataaactcctttattacgtgtaaaaaaaaaaaaagtatcaacttctttttcttagcctggctcaagccaatcaccttactttgctagctaagctcgtcgtgtgcatttaccaaaaagcaagtgggaacaaataaaatgaaaacaaaaataaaataagttaacctacctaggcaaggaagggcaaaaagtgatggtgtaatcagcatcagtgcatgtgaacgtacttgtagcatcgtcgaacgcgtagctatatgatcttggacacgcagatttgaatatctccgagtacatcgatggtttacactcggtgggtgaggcgtacgcgccactacaacaatattctggactaccaaaagcctcacacgcgcttttgcatgctgacccggacccgaaccggagctccgttggacatttttggtttagatccgttacgcatcccgtggttaagcaagtaccttctgacccgccacttgcttccaccaacatgggaacgttgtaaccgtccacgaggcttacgtcgtagaagtcttgtttacgggccgggtctgctggacctgacccgattgtgaattcggcgagtgtagcgggcggttttgctcctgcaccgttacattcgacctggttagagccgcagtccccggttaggcaggtgccttgtcctgtgtctgagttgaagttgcaaccggttcgtgcccaaaaccgacctgaccagctagctggagcttggaacgaacgtgaaccaccgggaacgagctcgaagccggtggtgcctatatcgccgcttccggagttggacaaaattcccggccacacggtgaagctgcatcgatttacgatggttattgtagcaccatcacttcctaccaaatgcaatgctttagctatatgttaatatttacattttatatagaaatattcatactgatatgaaagtatgatagatatgaatattacgtaccatggaagaagaggaagctaaggatgatgaaatagaatgagacatgagaatgaaggactgttatgatcatcactgtttatttttgtctctctattaaaaaaaaaaagtacttttggtggagaaattaagtttggaatattcacaaaacgaaagaccaagagagaaaagaggaaaaagaaagaccaagagtagagtttaaagcacctctatatatacgttgtctcaagggtcaagctcaagatatgtgatgatctcacaaaagtattgaccaatttcttttatgttttaaagtgatacaagataaaacaacatcttgaaaagccatgttatcacgaatatattgattaaagtctttttccatataaaatctatagctttacagattatctgtttgaaatttttgcaaaagtcataagttttcgaaaataaattttgtggaaaataacaccgagtaatatatgcatgataggtggccaaattagctaaagagagtgcatattatggtaccatatctagataaactcggacaatctagataaactcggacagcaggaccattaatcttgaaagataaaaaactcatacattgaaaagaagaagtttaggttccttgatctctagaatgcaagtagtgcgtttacataatccatcaaaaactgcttaattaaactaatcttgatattcgagtaaaacgatgttctgctttaaactaaagaggtaaacacaaaggagaaacatcagaagtgaaatctacagttcgtccttggtgttctcttcttgttgctcaacgggttcggcttcaatgtttagaccaccagccaagtcatctgatttcgtctcagttgcctcactggtctctggttcctctgctgcctcgatttcctcgtcggctactgcatcagggctgatgttcagaccgctcttgactgagttataaatacgggcagcaaagtcttttgggtcggtgagtatgaatccactctcgatcaaagctgtctggtacatgagctgtgctgtttccttcacactctcatcctgagagaatttggtatgttagtttatttctctaatagacagtaagtaaaaaaaagaattgatgggtcttatgtttgttttacctctgggtcacttgcaattctatccttgagttctttgatgatagggtgtcgtgggttgatctcgaggactctctttccgcgcatgtaagcttgcttattagcatccgagagagtttgggactgcatgatcctctccatattagcactccatccaaacttggatgttacgactacacatggagtgtcagccaaacggttgctgattttgacatcgtctacgttttcgctagcgagatttcctttccaccactttgttagctccttgaatgcttccttcagctccttgtcttttgaatctttcccaaccttcagtccttccttggacacattctggaactttttgtcttcgtaatccatcaggtattgcatcaagtattcatcaactgggtctgtgaagaagatgacctgggaacacaagtatgagaacgtgttatgcgagttggagatcatttaaagaagaattattcgtgtgcaatgcaaacctcatagcccttcttgatgagcctctccaggaatggagatttctctagctgttccttgctgcttcctgtgatgtaaaatatgtccttttggctctttttcattctcttaatgtactgatccagggaagtcaattttccatcggactttgttctgaaatagcaaaatacaaatctttagcctgctggtgctaatgaatggacagacgtgtattaaaaaaaaagtaacagagcttacgtctcaaaacgaagaagttttgccaagcggttcctgttagcagcatcctcaatgatacctagtttgacagacttgccaaactcgttccagaattttgtgtattgacccttcttctcatcgttctcaccagacttctccacatctgcgtgccaacaagtcaataagcttagaccatgtttcagaaagatgaagctaccaaatggtaaaaaaaagtggaacggtcaaagtggattgataccaagaaacttgttttatggaataccttttttctcatcatcatggatttcatcaggatcttcttcagcaagcttgcggatcatatcaagcgcctttcggataagcttcttcttaattgtctttaagctgctgtgttgttgaagcatttctcttgatacatttagaggcaatgtgtcagagtcaacaagaccctgcaaaagcaactcacgttagggatttagcccataaatttgtattgaaagaaccccttagtttgtctttcaagtagtttaccttcaagaaactcaaatacttaggcagaagctcatcaaattcatctgagatgaacaccctcctgacatatagcttcaagttcgccttgttgctgttgtaatagctctcgtatagatcatggggagctttcggaggaacatacaacacagccttgaattcaacatcaccttcagcattaaagtgactccaagccattggcttctcgtcggtaaaatcctgtataacaactggggtcagggaaatccacacgaaaattttacacctagtatgtaacaagtatgatttagttaacgcatggttttcacctttgagagagagtggtagaatttagtgtactcttcctctgtcacctcctttggacttctcagccatatagccttaacatcattcagaagctcccattcataaactgtttctttcaccttcttggttttctgctttttctcaccatcttcctcctcagcatcttcttccttttcttcctcggtagaggtggtttctgaagtcaagtaccattaccaaaaatcagggctgcctaaactgaagggaaaaaagataacactgcagcagaaaattataatatggtgtttcattaatactcaccagtttcctcatcagctgattcatcttcctcaactgggacctcggtttcaacctctttgctagcccagagggagatagggaagttaatgaattcagaatatctcttcaccaattcctgtagtagacaacaatgatcattagcaaccataatgagaggataaacagaaatattgaataagcagtgcactgaattcataataatgctgaaccacttcccctcaggagagtttggggttctctacaacaaaccctgggttattctggttctttgcattgcttaatttaggtttgtaacaaaagagaaatttactttcttatcaaaatattacccaccttaagtttactttcttctaggtactcgccagcttcatccctaagatgtaatctaatctcggttccacgtccaagaggctcattccatgtatcctcggaaacagcaaatttaccgttagcctttgattcccatacatacctgaaaacggaaaagaagttatcagaaaagcttttcaatgattttacatgcccacaagtatattgccaaacaaagccctctaaatcaacttactggctgtcatcattgtgcttgctaatgacttcaatgtagtcagcaacaagataggcagagtagaatccaactccaaattgtccaataaggttcaaatccccacttgattgcattttctcaacaaaagctgcgaaaggcaagatcttagaaatatggaatttattgatccatactattatgcaggacaacgtatcaccacataagtaacgtacctgacgttccagattttgctatggtaccaaggttcttgattaagtcttccttagtcataccaattccccggtctcgaatagaaagaatcttcttggctttgtctagcttaatctgcataccatagcatagttacggaggtaagaaaaaagcttacactagacacaattccaacgaaaggctaaatttactgagatcagcatttgataaaacaaatcgatgaaactctattttcaacactctcaagcataaaaatcatattgagaaacatgtagctaacctggatctcaagcttagcagtgtcaccttcacccaaaacgtctttgtcagtgagtgcaaggaacctaattttgtccaaggcctgaaaatcaccaacacagacacttattagttcccctatttaacgaggtatcccaaaaactcactaaaacaatgtacacgaagctgcttacatcagaagcattggagatcaactctcttaagaaaatgtccttgttactgtatagagagttgataataatgtccataagccgagaaacctcagcttggaactcaaacttctccgcgttactgcgaagcgtcttctttgacatcgactcagactctctgtcgatcaaacgaattcgaataaggcaagattcaagcaatccaagcgaaagttctaccgtgaaactaacagaacactaacctatgaactacatcggaatccgtcgataaaccaccgtgaccaccaattttctcctcaacttttggtggatctgtaacatcatcggaactctcttctgcattcgcgtgtaactttcttcctatgataaacaccacagaaatatcgccatcatcagcatatgaatcctaagcaacacttatatctatctactcaaaatcaacacatatatacatcgaaacgtaccttgatctggaagaagaaacagaagcgagaaaaggaacaaaacggacacgagcgtcctcttcctcattgttagatcggagccttggttctctcagtctttgctttcgggttactcagtgatgatgatgattcagctcgatagatccgtatataataggaaatgattcagtgatgtgtgaactgtttagttgcgtacactttagtttctcctgattggttagcttcgtcatgatttgccaacgtgtcagatctaacggatcgtattgtgagatagccacgtggtagttttgtattggagcaaggttttgttcttgacgtggagcgacgtggatttcggggttgtggcgtggatggacgacttttaaattatcaaagtatgctaaatcaacggtgatattcgtttacgtcctaattgggacgatcggacggctatatttagttgttttacatgtgacaaataactattggatattaggatgctatgcttttattgatgtcggatacaaaagtaaaatgatgtttttctttgtacaacgatgattatgcttgccaaggttattacgtttggctggctttaatcggttgatggctaaagtctcgcctaaaggcgatacaatttgtcaatttgggaagatcatagtcatcactcatccgtagtagcaatatgtatgcgcggttcaaaaatggtaatgtctatttggtcccattatttattgaaagatacaacacgtgagagacttccttcctcaccagagacctccttcgctgctttcttccatgaacagttgttcagaaatgagagcataacatatcgacgaatggaacgaaaatggacgcaacagattaatcaaaccactagaaccttttctgtatcttaaaactatatatttatttatggagaaaaacccaacaaggttaaaaagaagcttgacatataccaatgtttgaactaatcctcctatatgttatgaaataaaataaaaaacctgaaaaatgggaaaactgaggaaataaaaaaaaaagaaggaaaagttcagcaagacactttataagttacctcaaaacacttgtcatcatcctttgaccaatcaatcaattcatcaacctattcaagaacccatctccaccactttgtagatcactcacctccatggaggaaactcccaacgtggctccggctcttttcgctttccaccaatgctgatagaagaactcgatgagggctctacatttgctcctgaatgctctcccatagccccgctttgtgaaggtgatagaaactgcctcaaatttagcgactctctgtttcctatctcaagtccaaacccagagttctgatcaaagtttggccgcattgatccattcgtactaggcgatccacccgccaagctcatgaacatgtgttgttgagggaatggtggctgcacatacggcgctgatccgattatttgcggcatcatcactggggtacctcttgaatccaccatgtatggaatagcagttccaggaacatacatgggtgatgacattgacaaaccaggaggaccagtcaatccgttgtagccatacataggggctggagaaaaggagacaccaggggctagacccaaagagtttcccgttcttcccatgtgtaaacctgttgcaggctcgagggacttgccattggacaagaacgaagccatctgaggtacagagtcttttctgtcagcttccacttttgtacccaagatagatatacctggttcttccaatttgtgccccccataggaggctgtactccatgggtgccgcccatagtagggaccctgatcacgtgaatcaatgaaaaactgtggcctgtcattcaaatcaaagtttacttccttgcctgattgttgagcaactgacgatgaggagacaggtgatgcgctttgctgaccattgtgacttaaaaacaatcttgtttccatcttcgactcagaaggtggaggcatctcatcgtcctcgttcatacaattcaaatccaagttgaacttgcttgatcctcgcagactggcttcatgtgaagactctccacccctagagtttgatgaggagaaaggaaactgtttccaaggagtaagatcttcaacttgatcatctcctacctcagccacgttcagatcgataccacgagaaatcacctgcttttctcttaaatccccactaggaactttatgaggtaatgctgagtgaaatacactcgtagcagctgatcctttcccgctaagagatctttccaaatgccacggtgctgctgcaggcattgcagaagatgagacagaaaatgaaacagacataggagcaggggttgtagatgtggaggacataatgacatctgtttcatcaggacatatatcttgattaagatcaaagccacatgggcttttctctctgcctacttcagatttagcagctgttgctaggtgtctttcttcaacatcaccactttcaggtttgtcatctttctcatccattagatcatcatctccaacatgaggttcctcaaaggaatggttttcagtcactgataatcccttagatggagaacctgtatgtacatcatcatcgcgggagtattgcgaaccagactgcccgctttcatcggatagttcttctgaagaactatgagaaggttctccagagtccacttctcttgcgacttcctgtgcgactttggtagcgacctccaaggcatccaaaataccaagatcaatatcagtagttgttttgtcaattgctccaaggcgctgggatatggtcattgatctagaagagatgcgtttttttctccgttttactctcctctttttgtcagaatgacccatatcatcttttccttcattgtcagcaagaccagttaaattgtcactctcaaattttctacttctaccaaggccacctgataatcttgatgaattgtcagaatcttgattgtccgtcatatgagtcaatgaagacacctgtttgctattatgggctacgctcacatcgtgcgacccacatatcgtcccagacacattcttgctcacctcatttgaatcaagactactctgcaaaagactatttttctccaactccatgctggcaacaatagaatcagaagacacagctacgtgtcctgctgcactagatgtccctgcttcacccaatttttcaagaaaatagtttgccatctgcttttccttgggtatctcagcatccagtggagcatttgatgggccttcagcactatcacgctctaaataaagtaggctactagacccagtaggcatagtaccaaaagtcgttgggccacttgtctcccccatagagcttttttccttcacagaaagtttttcttgaacctctttcatgatatcatcggtacaagaaccattgaaagtttcagtcatcgaattagagcagtgggaattcacgttcgagacaaacccagccttgtcgttctgcagtcccaaacccttatcttgatctgggatgtttccttctgagcatcctgatagcaaggcttcatctgctatttcaggacaatgtttttcactagtactttgcatcgaacaaagtgtaacagcagatttttgcccactgctctcgatgcttgctgctacaactctcatctcatcttcatgaattttgttacagctttcactgtcatgttcagagtggtcataatcatccttatccttccagctaccaaagagctttctcgcctgatcctgaactcgagaactaccatggtccacaagtttcttgacagcaacccataacccagaagaaactaacttggaactgtctacacctagattttcaacagcttctaacaaagcaagaattgactcctctacagatctgtcaactgaatcgttatccaacatctgagcttcagctagccagctacttaagtaaacaagtccatctaaatttacaaaaacatcaagacaatctctgttctttgtagccgcaattgtgcttgcaacagcagtccattgtctaaaagcatcaccactattcttcaaaactgaatccttattactctgcataacagacacaagctcttcaacacgagaagtgaccgtgagtccatcttttatttctgttagggtaaagaaatcttcaagcgtcatactgctttacttatgacaactccaaaaatatagaacacggttagaaagcaaaaaggttctttctcccattcgaaaaactcctgagaaacaaaacaaaaacagaacaagacaaactttatgtcattaacctactgtgacaagtacaaaaaaaaacacaatcaaactgttcaaaatattttgaatatgaaatcgagttcaccatggcttagagagacccaattcatatgcaaggaatccaagatcactccattgtcgaagaaatatgaatttacatttggcatagtaccaaaaacaaataactacaatatgcaggacaactacactataccttctagtgaccgtgactgatattaacaggaatacagcgactttcaaattgatggtacagacaaaggacaacaaaaattgtaaaatctcccaatctcagaaactatagagtacatctatttaaaaatcatgccaaccaaatcccaggtccaggatcaaaaccctaaaattgagaagaagaaaaaactagcaaaattcaacacatgtggagaactatacgacaaataatatgagattaagccaattcaatgaataagattccaaagatcaattcaaaaagtgattaaaaaattgaagacagatgaccaaatgaataccactaataaaccctaggcgaatttcagagctattcatcattgtaaaaagagagagaggaatatagaactcaccacgaagcacaaggaagacgaaaccctaggtcaagcgagttagccgttccgacagaaccgatgcgcactcgcatatcccaatctctttccttgtccctctgtgtatatatatgtgtatatatctctcactcagttacgatttatcacaggttttttaaatctccgggcaacgatggttggcagctctgagagaaaacctcgttcttcttcttcttcgaggaaaaggttgtcgcgaaaacgagagagaagaaaaggctttttcttcgtttattctttttggcaataaatatttaataactaaaaatcttatgaagcgattggtgaatatttatttttttgctcaatttcgtttgcgttttttgatgaaaactgcacgtgctaagcgtgtgaagagtgaatcggtagggactcacggcccggctcattatgtaccaacttgtgtgagtcaacaagaacccacccatatggttccaccacaacccatttttgcggaattctatggggaacaaacaaaaatcagataaattccgtgaatatcctaatccataatataataattaagatttttcatatggttaaaatatgttttgaattttttgttatatttgcaatatgttactttgtagagttttcttatgtagacctttaaatttatgaaagtagttttttatttttatgatttattatttgattttagcatggtaaatattgttgatacattctaaaataccaaatactaaatttataagaacatatacactatagctcaaaacccaatattttctttcttccaattataatccggcataaactataaggtggtgttattcaatcatggatttaatagaactgaaatttaacactaatccaatgttattcaattaatgattctaaactatactttaaaatctgttgttatgaaatctttacatttgtaaatcatgcttactagaatctataatttggtgttattcaactaagattttaaatactttcattaacatccaatgttatgaaactccgaaaaaatttcatttcaaatggctcaaaatagatttttaaaaataatttcaaatttcaaatctaaactttacagaattgattttaatttcatgatacacccccaaaaacgcaaacagttggcatgataaatacaaatcggtttaccgaaaaagaaacaaatccaaatgctagtgtgtacattggcatggaattgtctttgtttttggttgttaaagaattgcattgttaaattacagattgtatggaattatagtcttgtggtgacaccaaagatactcggatctttctttcacttgtgtcgctgaaaactgaaaagaacaaataataataaaacgcaaagcaaagggcgtttcttggaagcatgagttcgcaaaatggtgattaggcaaagcaacggcgctcaaagctttttcaacactaatctctttgatttgcgtatcacccttcggcaaatcggacacaccttactttcttccgacaagatcctttgagcacagccgcgacaagtggcagagtgaccacacggtacaaagaaacagtttctacgttcctcgaagcatataacacacagtgtcgagtagtccacatcatccgacgagctaaacgacgccgtttctacatctcccttccccgttacctccaacgactcattgatcaacggcggcgtccaatcggtggtgacttcttcttctgccaccaatggtagcctctgtgtgtcatcctccatgtcacattcgctcaggaatttcaataccaaataagtaatcgtcattattgttcctgagaaacaataacaaaaacaaaaaaacaaacaaattagctctacattgaagataaatagtactccatatgttaattatataaatatgggagaaatatagtacccaaaactgtaatataaatcaccactctagctgagaaggatagccccaagtaccatcgaacgaactcatcctgcaaaatacaagttactcgcatatatatattaatccatggtttcgtcaagtttttttttttatatagaaaattgagtagagctaggagctagaggggtactcgcgttatccgatggtaacttgatggaatttagtttacggaagaacatatatagaagctgcagacattttgagatcgtggcatcgaacattttcgagagaaaagaatgatccagtgaagatagaaatgatttgttctcatctgaagttatattgaatttcttattgtttgttagagagcattaaacaaatgaatttctgattaattccaagcaattgtcatcactctgacagtatatatagattgtgtcaaaagactcgtcgtgcaatccatatttattaatttgatcagaaaaagaggcaaaatacaagttgctgacacaaacttaaaaagaaaggtacagtacaatttcctaactctgatttaataatacctatttgttaaaaaggacaattcaagtgagaaaatgaaaaggcacccaaataattcactctgtttaagtcctaaacgactgattcttttatctgaaaatacgtgatgctaaattagtcaatagttgaaataagatttaaaaaatggattatccgttaattcacaaaaattcctagaggtctctctggtacattcaatgaacactctttttaatagttgaaaataaacatttgggaagaactaagaagaaacaacattataagatgggcttgggctttttgttgtattgttttttatgttttacaattttatttaacaaacaagatgacaaaaaaaaaaaaaaggactccaaaagtccaaaacagctatggagtatatgagggtaaagtcgtcattttacaaaaagcatttttatcttcgttttgtcgtcttcgaaagttctcaaagagaaggcatctgagaaaccccaatctctaatcttcttttcaattcaatacttttttttctcaatctctcctctcaaatcaaacaactttgattgatcttcgcaatcgattccacatgaagcgcagtactaccgactctgatttggccggtgatgctcacaacgagacaaacaagaagatgaagagtacagaggaagaagaaatcggattctccaatttagacgagaatctagtgtacgaggtgttgaaacacgtcgacgcaaagaccttagctatgtcatcttgcgtgagcaagatctggcacaaaacggcacaagacgagcggctttgggagctgatctgtactcgtcactggactaacatcggctgcgggcagaaccagctcagatctgttgtgttggcgcttggtggcttccgaagactccactctctttacctctggcctctctctaaacccaatccgcgtgctaggttcggtaaggacgagcttaaactcactctttctcttctctcaattcgatactacgagaagatgagtttcactaagagacctcttccagaatccaaataattgactacaaattattagagtttggttttggagtttgtgtatttggagtttgttgattggtaagtcagatgtgatgttcaatgctggcaataaaatttgttggtatccataagccagactgttagcaacagttgtgttctgtaataatagagggtgatgagaatttttaattactgtaatcggagctgattaaaagtagatttaatatcaaatgtgattcgattttgttgtaatggttctgtcgtgaagttaagttggtccgtagttggacaatgattgtaacaaaatcgattcgtgatccagtttggtaagattaagaactgttagtgacgattctgttttattattcaatgaaaaacaatgttcaccaatttggtaataaacctaacattcaccactttaagtccaaaccggaatcaacgtcaagctatgtaatgttgcttatttctttatgtccttcgtttgtaacatttcccggtggttactactctgtcggatccagttttgccgtctagtttttacagcggtacgataaatctcaaatgttgtttgatttggttattcttgcgatggttagccttaatttcgctagatttatgtgtatttgagtgatagctacaagcctacacatcattaccatgtaccaccatctccttattcaaatcagaatcattatcgccgtaaccacttttgtcattttctttttttatatgtcggtaaagaaagaataatgaaataaagaggtgtaagtaagagtcaacaaaataatttaagagcttgtgtgaattgataaaaacactccttttctgttcttggttttatatgaaatttataaacaaactcgagtgattacaaagaacttataaaccacttatgtggcatactaaaatttaacaaaaaaaaatgttttgcgaaaaataagaagattttgttcatcttttttggtaagatgccagtttagctaaagatatttttcatatataaaaatgacaataaacacattacaaaagacaaaccccacacggctctctctagccaaattacttggccacgaccataaacacaaaacaccgcttagcttctaaaatctgaacatcgagaaaaaatgagttggtggtgggctggcgccatcggagctgccaaggtaaatttcaattcaatccttcaaatcatatcctccgatcttcatcttcaactgattgaaaatcatctctttaatttgtgtactcgcagaagaaactcgacgaagatgaaccatcacaaagcttcgagagcgtcgctctcatcatcggcgttactggaatcgtcggaaacagcttggcggagattctccctctttccgacacacccggtggtccatggaaagtctacggcgtcgctcgtcgtcctcgtcctacctggaacgccgatcatccgatcgattacatccagtgcgatgtctccgacgccgaagacacaagatccaagctttcccctttaaccgatgtcacacatgtcttctacgtcacctggaccaatcgtgaatcggaaagtgaaaactgtgaagcaaatggctcaatgctccgtaacgttctccaagcgattatcccatacgcgccaaatctccgacatgtttgtctccagacagggacaaagcactaccttggccctttcaccaacgttgacggacctcgtcacgatccaccgttcactgaggatatgccgagattgcagatccagaatttctattatacccaagaggatattctgtttgaagagatcaagaagatagaaaccgtgacgtggtctatccacagaccaaacatgatctttgggttctctccttatagtttgatgaacattgttgggactctctgtgtctatgcagcgatatgtaagcatgaagggtctccgttgttgtttcctgggagcaagaaagcttgggaagggttcatgacggcttctgacgcggatttgattgcggagcagcagatttgggcggcggttgatccgtatgcgaagaacgaggcgtttaactgcaacaatgctgatatcttcaagtggaagcatctgtggaagattctagctgagcagtttgggattgaggagtatggatttgaggaagggaagaatttggggttggtggagatgatgaaagggaaagagagagtgtgggaggagatggttaaggagaatcaattgcaagagaagaagcttgaggaagttggtgtgtggtggtttgctgatgttatacttggagttgaaggaatgattgatagtatgaacaagagtaaggaatatggcttccttggtttcaggaactccaacaactcttttatctcttggattgacaagtacaaggcgttcaagatcgtaccttgattccaaaacatacttggatgtttgtttactctggtttcatgtttatgtttctcccaaaatctcagttctttgttgtctaaatgaaataaaagcggtaccatctttttctgttcttttttttaattccatctttagtcttgtaaactctactcttttgggaatagttttcaatttttaaatatcgttacaagttgtaatggaaagatattggacaatggtgcagtgtcataaggacaaagagctttacaggctaatggaaataccagattctgtgttttgcagttggagtgtatttgtactccatatggttccataagctgggagaaggcttcacatggacttatctcaactctctttcttgcaagtaagaaagcttgcttatttccaaaggtaggctggtacgtggaaacaaaccaaagacaacctaagagcatattcatataactacccttgcttgattcataaatcataggtctttgcataatcaatgcactagaaatcaaccagtcctcgcgcacatatgtatacatatatttaagtgttttggtttccagatgcacctaaaaaaatacttatatgcaaaagaatagatttgcctttgttatcccaaagtcctccttcaagccttgcctgcttaagcactggattcacctctcccctgaaactatttctaagacaagttagcttgcagttagaaaaagaaccatataactgggtgctggaaggaaacatacaagaaatctctgacaaaaagacatcatactcttagggaataccatttttgctggattcatcaacaccagttgtgactaagttggtcggatcttctaatgatcctgaattcggaggcaagccaacagaggtttccatttctgacatcttccctacctgttgagagagcaaagtcaaaagtttctcagacctcaaaagccattaaaacatccaggtgatattcaaaccctcaagatcaaacaactcacagtatgaccagctttcgtcaaaccagggatttcctttgagacaagtgcaagatactgctccattgcctcttcttgactcatgtttccaagtttttgccacgcattcctaaagaacaaggtaagcacaatttgtcactcccacatagaacttgttgaaagataccataaagcaactaagctatacaacaattgctgattctgtcctaattagatgatcagaaaccttttaaaactttatccctcctagtttctagtgtatggaatctatttccatatcagtaatatgacctgcaaaactctgcaataaagatttctacctaaccacttttatcagtcttacaccacaaagttctctcctttatgacgttcacattacaagtatcaattaccaatctgagttgcagaggaaagaattcagaaacagtggaaaagtatggtaccatttggcacgagcagagatcatgacggccataggttgtgcctctctacatgacccttcagtggcgatcttgtgaaggccaaacaactccatcttagcttcagcaccaatttcttcagctttcccggattcttccaaaagatttacagcagccgcaaaggctttctcaagttcactcctctcaattccttcccaatcatcatcttcttcaatagtcaactctgttttctcttcattctctgcttcagcatcactctcctccaccatattactactcttttcaactctaacctcctcagattcagcgactaagacatctccaccactttcttcgttttctacgcaaccacttcttcctaattctgttacttcctcttgtccttgactcttaatctcctccgctaccacgttttccggcgagacagaagaaatggactcagcttcagccgagtcgctctgttcgtcctgtcctcgaactaagatcacctcctcggcgatcacataattttccgacgaggctgcagccgaggactcagcttcacggtcaccacagattttagcgtttccagtaacagcttcatcgacttcataaactcgatcagcttcttcgctaagaaaccgatcgacaagttccacattctcatcaacaacttggaaattcctctggctttcgagaacacgagcatccatcttcataccaaaacgaacatcctctgtaacaccgacaccgatctcgggcttgagcggctgatcagaactcaaatcgttctccaccgtagcaacagaaacgagcttggccaaaaggaaagaaaacaagagagcaacaaccgccgtgagaagcatctctaagaaaacctccatgatcgaagaagatgatgaaaaaggaaagtaagatacttaggatctaaagaagaagaaggagaaaggcaaagaatgtaattatacgaaaggttagaaaagaaggaaaggaaaaaggaataaatgagagacaaagaagaaagcatattcggctttaaacgggaagcgggtccgtcaattatattttctcaacgcctaaccgctatgactgctgacttggctcttgcggttttattcttatcctcttctccacctcaccggctccttccttaatccttatgcagcgcgccgcttttttttttgctctcactggatctttgtctttggactctttacaaactaaaataatgattggaagagtttttttaattttttttttttttttttttttggattttcgtatgataaaaatctggcttttaaaaaacacacttttatgaaaactaatttccttaattttgattggatgtttagtgagtttttttgaaataacaaaaaccagctcattgaaaattactcccattccaagctttaatgatgctgaaattaagttatagttttgaatggtatagaaatggaaatagaaaacaagaccaaaagagagattaaaggtttttgaggtaatatgcaaggacagttcatagtttatttgggcctttacaaacaaaacatgggcctatgttaatgcataatatgataagactaaggcccatgtcttcctacctattcacctacatggccaaacccagtcgataagtttgtgacggaaccacaatcatgacactcgtccttatttgctcaactacggttaaaaaaaacttgataaatgggtaacaacacacttcacgaagaaacttaaaaatcagtctaacgaggttttcactaataaaaagtttttgtttctttccctaacgactttaccaaacaaagaaaggcaaacttaactttgccaaaattactaaaatcactgtcgcacaacaaaagtctcctctttgtttttttcttttcaaaatctccttatatatcagagttgatagagcatttattaaatcagtatgtgtgatttattctatattctgcataaatatgtaatatttttagcatctttttttttttttttttctcataagtgtaatattttattcattttatcattaccagtacaatgcttggttatgagaaaaccaaaataaagcccaagacatcccacatataaaggctcatacgacacaaaagaagagataagctatagacgtgtcagaccaataataataagctagggacacgtggaacgtccacaaccttcactagtcctggacaaaatattcgttcgatccgctttaactcaatattcgatttgatttgattcgaaaaatccgaatattcgtaagattttggagcaaagcaaatagaaaaatgtagtaatcgtaaaaaccgaagcaaataacaaatactattttttctaaagtcggatattcgcttcgatctatatatatatatatatatatatatcacaatataggttgtgcatttgtatatgttgggatttgggcttgtatttgtatcctttgggcctgtgttttttttgtgacacagtttttattagagaagtggaattttttaaaataaaattgttttattttttatattttatcctaaaattgtcgttttactttccaatccatcaaatataagagcgacatttctgtttcctttcttcgacctttcactatttttatcactcaatttggttacagaatttataaccagaaaattttcagttgctctcaatctcacactcgtaagtcataaggtaagaaatttgaaatctatgttaaataatttatataaaaaaatatttggatgtagcaaagcaaagcggatatccgacaaatatcatacaaaaatccggatattcgtattttcggatatttggaaattttcggatcaaagcaaataataaaattaagtattcgattaaaacgaatcgaataacaaatatcccaaattttccggatattcgcttcgtgcccaggcctaacctccactgcacatgagactcaagcctggtgaatcagaaacgtcgttggaaaatcaccggtcaacgagacttcttttttatcaccaattaaaagttacagaacaaacatcaatctcctaatctcatccgattgcaagaatcacaaaggattcggcaaaaatgggtaaaagaaattagagaaaactgagtagttcaaacttgtctaacaattaaatctcttgcaagaacaacaaaggcatatcttaattgcataggaaacgagctttgacctaaccttagtcgtggagaaattgaaactgtcttaaacacagtagatccaaacgaacctaattgtcgagaacgcacacatcgccggaaaactgttggagccaaaaaaaacagaacccaacggtgaagccaatcaaagcagaaagaaactaaatcatgcgaagagaacacctcttcggaactgaagattctgcctgtcataatgtttcatcatcaagattttaaagctacaaaacaaaaacaaatccgaagaaaccgaattcaaaattgcccaaaaagaaatctaaatcccgatcaacgggagataatagccggaaaaaatccagataacggaaaccggaagaaacccggacggcgattctaaacttacatcggaaaaatctttctctgaaaaatactatagagagaagagagagaccttcctccttttagatctttctttaattaaaaatttaatttttatatttttagcatctaatcagcctcaaaaatataaaatatcttagatttttctcgaataataataacgaatatatatataattcgagctccacttgctccaaatttaaaatcattgacgctgaggagtgtcaaaacgcttgacaaatgatcacacgtgtaagcctatgagtggtggtcgatttgactgatgcactatcaacacatacctaaagatatagagagagaaacgcatatcgttgactctccccctttttcactctcttcatttattcttcccctcatcatcatcatcatcttcttctttaaccaaaaacacaacttacaagaaaactgttgaatctttgtatttatttacatctcctttgacctttaataagaatctgagtggttggtctctgatttgatgagatgactgttgagctgatgatgagcagctacagcggcggcggaggaggaggtgatggttttcctgcaatcgccgcggcggcgaaaatggaagataccgctttgagagaagctgcttctgcagggattcacggtgtggaggagtttcttaaactgatcggtcaaagtcaacaaccaacggagaagagtcagacggagataaccgcggtgactgacgtcgccgttaacagcttcaagaaggtcatttctctactcggtagatctagaaccggacacgctagattcagacgagctcccgcgtcaacgcaaacgccgtttaagcaaacgccggtggttgaggaggaggtggaggtggaggagaagaagccagaaacaagctccgtgttaacaaaacagaaaacagagcaatatcacggtggtggatctgcgtttagagtttattgtccaacaccaattcatcgtcgtcctcctctatcacacaataacaacaacaatcagaatcaaacaaagaacggttcgtcttcttcatctcctccgatgctcgcaaacggagcaccgtcaacgataaactttgcgccgtcaccaccagtctcagcgacgaactcattcatgtcttctcatagatgtgacaccgatagtactcacatgtcatcaggattcgagttcactaacccatctcagctctctggttcgagaggtaaacctcctttatcatcagcttcgttgaagagaagatgtaattcatctccctcaagccgttgccattgctccaagaaaaggttttgattcaacttctattattaaaaattaatcttattttagatctaaatcttgagatttgattaataaaacgttaattataatttgtgtaaaaaaatcaggaaatcaagagtaaaaagagtgattagagttccagcagtaagtagcaaaatggctgatataccatcagatgagttttcatggagaaaatatggtcaaaaaccaatcaaaggctctcctcatcctcggtaattattttttacattttttaccatcgatatatatactctacacatacatcacaatcactcactagattcaacaccaaaaatcaaatattggctagaaaattaagcaacttgtgtattgtcaatattagtaccagagagattgtcaatattgtttttttctatatcggttgtaccaaacatgttgtctagtagtacagtagtgggttcagtttcacgctctttttgacttgttgtttcctatagaataaatttgaaatagaaagccgagagttaagttgactatttcttttctcattaattaataagaactcgaactaactggggaggactcggtgtaatggttatgacaggggatattacaagtgcagcagtgtaagaggttgtccggcgcgtaagcatgtggagcgtgcactagatgatgcgatgatgctaatcgtgacgtacgaaggagaccacaaccatgctttggttctcgagacgacgacgatgaatcatgacaaaactctttagtttctcgagtttgaggggaactgtctgtgtgtgaccactatccagattagtcaacgacagagtgggcccgcactgcacttttttattcttttctttttgaaaagcttttgctttatctttctttttgattggaggaaatagagggaggggagataaagacgagagaggaacgttgtggatcttgatggaagttgaatcatgtgaatgtccttttctgtttatttatttctaggataatatatatttagtgcactatttttgtcaaatctctgattcttttcttacttgcagaactatttgagtttttagggaaattatcagttaatttagattcaactgaccataatgctatgctggtaattggaaaaaattgcaattcaaatttcgttaaacaaaaaaaaaaagaactatttgtagattacatagtcaaatcaacttaacacacgtttatagaaactagaaaagttgtcgatcaaataataagtagctctaataagtatttatttcagcattagtgaaaaacctcagatgcaatgtcgttatccttttaagtgtgttttttccaacaaagttgacaatgtttatgattatgttaacggctataaattcaagtgtaaagtacttcaacatttagtaaaaaatttaaagctttactacaaaattttgttaccaagaaaatcagctattcatgcatcattgcgttataactcttcaatatcacttttaagtgatgttttagagactttttttaaaaagatgttttaaaattttttagaccaatcatattttagagtatgttatctaattagttaaaatttgtttaattgtattatatgtaaaagaggtaggattaaagtgatacacaaattatgtgttttcttaatttgtgtataaaacctttaaacatcacttaaagtgatacaaaaagagtattttacaacatatccattaatagaatttaaaaagtcattcacttagtcaaaaaaaaaaaaaagcattccatattttttattttattttagagattagtaaaagaaaacgttcaaatgcaatgttatttagtatttttctcccttacaaagttaacgacctttttagaaattctataacgtctacaaatcgttttaagtattaaattgaaaaatgacaatgagttcgagtaatttgttattgttaaaatataaaatttatcttatttaaaagcaattctaaagttcttctctttagaagatgggataaatttatcttatcaacaaaaaaaggtacttatataaaaatttaaatttgccactctgaaaaattaagctacatccgataacatcattgaaaatttaaacgttgtgaaagtaaataacatagaagctttttaattatatatcaatccatgtatcatcgaagctttcttataaaaagtaacaagtcaacttaatctagtagcctcaaaagtagaaaggaacgttggcgtcaatgtcatagatgcacacaatcctctgatgagagctctaaatgtgaaataataaagggatagccttattggattacgacacaaattgcaacttaattaagggttttcactttggacattataagattcaggagttgtaggttgcatctctatcctatgagcctcgctcgtggattcgcctctgttcctcgtatcttctaaccatccttccagtgtggactgtactacattgtcgaatatccctttcttgaatttgctacccatcttttaaaaaccgagcaaaacaacaacaacaattgattcaaatttgttgtgaattggtgtaaacatgtgaatatatatgtgtcacttacttgtgtaacaagggcatatagtggtaatgtgctgtaactgcaaagcacttggactaacactctgtatgaacaaagatcgaaccaaaaatattaattagaccttttgaaggttgatatttagatttaaaagagttcatatattaccccatgacgagtcttgggataaggtagcctagtttctccatgatacatgaatgtattccgtatgtgaactgatgatacgatggataactcgtaaataagaatgcgatggttcaaaaattgtggaagataaagaaagtgaagctgagggttgaaagaaaacgtaccaaaatccagaagaagaaagcaatctcaaatgaattctgaaagagaatgaaatggatgagttggagaacaatgcctggcctatggaaccaaaagagttcatcagaaggtgtgatcactgcttcttccgcgcggcttcgcttctcggaaacatccaaagctaagctacttattatatattccaacttggcacccaccattagtaacaactgcatttttgaaacactttttaactattcaaaaagataaaatgagatcaaaagtgacaaaagagcccaatcatatataagaacttacaatcaaaggcaagaaagataaccagaagtaagtgttccatcctccaacattgagcagcaaaaagacgacgacaaagagccatagataccaactttataattatgtatgacatcaacaaaaaggtgtcagacaaaactcattaagccataaattggtttgtctgtttagagagctgatttgattattttaccttatgctcacaactttcttgaaatctatttccagtgttcttagcatgtacttgtgaaaatcaaatgatgggtttgtgcggcaatgactctagcaaggtaagaaaagtataagtattgttacataagagatttagtaacctaaataagatgttggaataagacagtaaaagtaagaccatgatgaatgcttgtcgcagagctatgtattctgatttggtgacagaaccataaaactgcttgaagaatgatctctgcaacaaacagtacacattggctaatctcattagaatataatttgattcatgtgttatacttttggcagtagtatatatatccattactcaccacccagctgatgacaacagatcttctccaaaatcctccagcatgcatctcgaagaactcgtgatttgcactgaataactcgtgagcatgagcatgatgaccacgccttgtagtgcctgcgacattatgttatgtactttgcgtgtgttaaggtacaaagtaactgttaattactattgtggaatctcgctcacccttttgagaaggacgtttcttgaaccaatcctcccaatgtttccattgttgtatctacatattatttcacatcaataaaattaatcagagccagcttttgaaataaaggggtttaatgttgtttggtaacttgagcaaaaagctataaaagcaagtggtattactcttgctcctccaagaaccatggttgaggcgcagaagatgacgtgaaaaaccgctagcacaaagatgaagatatggagttgatgcaacgcttccacagatactaatggaacctgcccctgcagccataccaagagatcaatggttaatagaaagagatccagtaagagaaaggaaactagcaaaacagcaaagaatgattgccttggcagcacaatggtctggactttctcctgttgaaaggagatgtcgtgcattgttgataatcgaatgagatgatttaggcgcatgatgctcctccaatggcttcttacagggaaacatgttgtttacaagagctggtgggacacagatatgccgaattgcggcctgagataccgttaacatcagggagataaatccaagaagcatcaattctgtgtcaggacatcaatatggtcaggtgtcaggtgtaatcaaatcaaccatttcatgtttagggaagaagtacaataccttctttgagtttctgcaaggcttcgaacaaggcatcttgttgcctacgcttcagacactgaaacagagagaacggaaagttggaaaaagattttaacttaaaacctcaagattactacaaacagagatagtgatattggacctttccaagatgatgaagaccacgttcagcgagaagagataagagaacaatgatgaaacagataaacgcaacgacccatgtgggtgtatactcaagagaaccagaccttgcttctgccatttctgcacctccaagatggagacaactctgaattaatattattattatttaaggcagagaataaacgcggaagaagacgagggaaaagaatagagagaaagaacaacatttgggttatctatctattactaaagcacaaaacctttcttcggtctcactcaactgcttacaaaatagaaaacaaagaataatacactgtatacctcacaaacccagagagaaaacaataaatgtttggtttctcagaccgcattttttgtattaagctaaagaaaactactttttctgacttgaagctacgttttattaaggcaaaaaaatgacttattacattcgaaaagttttatttttcttcaaggtgtccaaggtgctggaggcggcggtgtagccataaccaatggaggtacggcagagaacatagtgtttttgtcaataccaccaaccgctttttcccctgataaagccaccagagcggcgactagaccagcatttcccgctagagtcggctctgtatagttgtaatttgttcgtatgtcgtggaatccgtcatgcttgtctggtccagcaaccattgctccattaatagcgtttgggttattctttttgctctttttccatttaaatcctcctgtgcaggtttctttcatgttctttggaattgaagctcctctgtgatgcacttgtttcgggtaccgttgcccataacccacaacataactcatcttccgagggtttttaccaagtatataatcaatctgccaaaacaaaagacacaaagttccatcagataagctccttcaaaatcttgtttgttttccttcatttgtgaatcatacctgcgatcttgaaaagttgcgtaggaattcagtagtatagaagttaggaccacagtaccatccgggagtatcagcagcctctagataatcactgaatagtgccgctaagaaagccgcatttgcaacatattgaagaggctgtggagctccatggttcaactgaatcaaacctcctgcagagatgataccgagattattttcttgatcacgttttcaaaacgtgtgcaaatcctcaaattcacagacaactcaccattggttctgttaaatttcttgtaataaggcaagtaagagcacataactctgcctgtttggttatgaaattcgcttaacatgtcttcatatggatatccagggctcagaaacagcctcatccgtgttaacagcaacttcaaaagaccacataaatccagaaactaagcattgactacaaattccaaaaacagaacaaagaatgtctcatagagtaactaacctgagcccctggaagcttgttgtcccagctaaatacgccataataaggactattcccgaaggcaccagctttctcagccatgtggtgactggtaactcgttctagataagttacatttccagtagcataatacagccaagcaccaccccataatagctcatcctcaaacatgctagagttataaaatttgctagactctttaccattttgactgtatctattcctagaagtagttgcaaacctataaagcgtcttagcaccatgaacaagatttttcgaatataatctgttgtccttgaatacaatggatgcagaagccagagcagctgccatctctgcagcaagatcagagcagctactgtaacattgagatacagtccttttataatgaatatcctcaggacgcatccaacagtaatggtcattgtgcaattcacttcctctaccgctaactccagatccgacctatgaaaaagcaaacgttagtagctgaaacagcgaagtaagtaagtttttctaaactctgttttttttttcttacctgttccaccataacatagatgttatcagcactactattgaaagtcttgagaaagtagtcagttccccatttgatgagttctttaacatgttcaagctcgccagcagcttggtactttgcgctgtattcgattacactccagctcaacatagtcatagcataagacattgggaagttgaatttgatagaatctccagcatcatagtaacctcctaccaaatctttgtagcattgtcctggatctcccttaccatcttgtagacaagaatcatgcctccatgatacattataaatgttctttggaagtttcccagctgcaaagcaacatcaacatcacataagaaatcaaaattgagacatgaagaaaaaatctcaaagttttagtgcttacattgttgagcattgaagaacttgagagctgtacggagagcgatagtgtaattatccggtggtggttccttgtggtggtggtgtggcaatgttttaacgatcaaagttatgaatccagagagaagagcagttactacaatggttccaagagtccaaagaaagatcttacggctgactaagatacatccaagatcgacgtactttttcttcttaagcacttttggtccaagaagccaactctgttgcgtttcgtcgagtggccgcgaaggagtcgcacggtcaaggtcttgtaggtttcgactacgatcgtcgtctgtcatggagtccgccgcattgatctctagaggaccaccccatggatcacgtccgtacataatgatcagtcaaaatccgatgagatttgctgaaatttctgagggaagaggaagaggaagagttttggagtgttcctgtggttttagggtaagtgaggcgtgtgtgatgtggaaagtgcaagtgaagaagtgtaagttaactcagtattttgccacgtggaattcattcggtcgtgcattggactttatgtccttttttaaaaatattactttaattattttatagctggaatttggtccgtaggcccactttgttgttttgggtaatgttttaacgtcagaaaaccaattaggtgaattcatgattttattgcagaagaaatgtttgtctgtaatccactttgtttttataattagagggtaaatgcatttacgccagaaaccaattaggtggatttcacgaccttatgttataagataaaagaaaatttcaaaataccatcaaaaattattgtattacaacctgttttattattttacatttctaaaaagattatgaccttaactcgatgcttatgtaattgagaagatgcaaagatgatacacgtaacatgttaaaagatgttgaattattctcgcaaattggtttccataaaactgctcaaattacggtatgaaacaacgaactagactcgaacttaactcgatgacacaaccgaatattcccactgatctctttgctgtagctggttctacaaagtggacgttactagttggattcggcaccatgtactgttgataagactggtagatgcgaagatcagacacttgagacaacaacggggttgcttcaacgatggtttcttcttgttggtgaggtaagtgatgagtagtccaaggaaatgatgatgtctctgggggacaaagactccgagtctcatcgaaccaatacggaagaggaggcgctgtgggctcaaccaacaccgctactgccgtggaagagtactcacaagagcaatggtgaggctgagatgggcaagcttgcttacgtttcctcttctttcttgaccagaacgtgagcttcttcattgctttcataatcttcattgagtaatgttaatgcttaagaaaatggtcactgcgttttgtatcaaaaggatactactattttgtaaccgttgaagaacaaaaagtcaaaagcatcatttcctattaatcttttcggatctccaatctttgtgaccgttaaattatcactatcttgcagaggtcctacaagctttgccactatatgaatgtgacatcgcttttctatatacgtttgttttgtttggcagtcactacagaagattcccagtgtacaaagtgaaattttttgcttgtaaaggttgcttcatgacaaggggtttagttccttctcttcaaagaaaacatgaataattcacttggcaaagctctcaaaatatatatggttctaacatcaaactaaatgaaagataacatcaaaacatattaacatggtcgtctagcaagacttaaatttatatattagttatatagaagctcaactagttatcttgacaaaagagagtagcagatccgatgttgctggtctacaacataagattacttccgaaaagtagaacaagacaagtatctaagggaaggaagatagggaccaagcaaaagtctcactttttaaggaacatattcctgaactcatcatttgattttggtgtctcatctgcgctgggtttaggtgtcgtgtagccgagtggtttaacatttcttgggacagcaaacgtgttcttacccctcacttccacttcatttcctttcctttcaccctcagtttctccaccaagtggtgctttcgccttctcagaaatcagggaagggtcctttgaattcccagaaccatctactgaagaataatcagactagtttaaaattatttataccagaagtagatacgaattcaatacatggctggctacattatgaggaaaacaaacaagagagatagattctaaccatttccacgccgagtgaattcttttttacccttctttggatttgaccgtgctatgctgatcttcttaccaaaaaacatctttctgttctttgctatagctgctgcaaggtgttcatcatccacaaaatcagcatatgccagtccctgagggaaacaagaggatcaagcaagcttattaagccaccatatcagcataattcactaaaacagaaactaggagtttgtcttatgcatctaactgccatatatggtgaacagttcctgctaatcatttcagatggaaaaatttattacaaaactttcttccctgcaacccctatagagagtataattgaacagaagttatctgatggctgcaatttttaagtctcaacatgacttcatctaaacatgatcacatggaaacagggaaattcccagattcattaacagtgacagcagaagatgacatcacatgcagaaggtgtgtgtaagagagagacccttggttttccagtgtctttgtgatggagaatgcgaatggaatcaaccccaccatcatcaccaaagaatttacgtatatcttcctcttgtgcctaccaacaacaattagtagcttaatatctgaaaatccccacacagtagcttttttcagtagattgtcttcgtaaattttacatgaagcctatatacttaccttgacactgagattcgaaataaaagctgtacactcgtctctataaactttcggcttcagtggtttggcatcttctgtctcttctttatctgaatcagctgtttttccattctctgctttaacgttttttgttgctggtacagttgcactctgaccacctaggtccacttctttttgacttttcctcttctgccgcttagccaaagactcttcttctacattctgttctgcttttctcttttgtgagctatgctctttcagaccagctgacggtttgactggtgtagactcttgttgtaacctcatcaattgtagctcttccaagcgtggcataacctgcagaataaaaatcaagcaactcgtataatttacagcttccacaactttttttgcattcttttttagcaaacaatgcatcgctcttataactgcccatcagggtcaaatatagggaaactgaacataagaagccaagaacatcacagtagctatgaatcaaaaattaagttaacagatcgatctaatgtatttatcacataagagttaacaaaaaaattcaaacccaacaaaatatatcaatattcatcatattctggaaatgccaaacagtaaacaataccttttgaactgctaggtcaaaatgttccaaatccccatgctccctctcaaagcgcaaccatcctttgcatatgtcctggaaaattgctcttcttaggaagtgagtataggcatttagaaattagagatgacaactcaggcatacagtgctctcatgtttcaaagaaatgtcatgtattgtaaacatgcctaaaccatcaaaaacagaaaaaccctcaatctaaacgcgcttgcattgcagttgctccatttatacactgtttctcagtttctctacttttcatttaatagacggtcgtttcagttgcaagtgaagctaaagaatgtgtttcgagtcaaataatcctccttagataacaagaaaagaagttacagtaacacattaaacaagaaagaatcgagtgcatacttctgagccagttccatcaaactttcttgtatagcacctccggtaaatagacctagcttcctttatatgccccaaatgcacttccatatcaatgtatgcatgccaggctgctagcatcccaccactggagagaacaaggtaagatgaaccaaagtgaaccagattgccttatgctgacaaatgctataatttgcctgaattatttcaagtttaaatctgtaattaatcaatataaagggtagagattgcaaaacctcttcttcagaaagctatcccaaacacctcgtgcgccagctagatcttttccaatattaagttccaagttagcccaataagtatgcaaatgtagcaaactgtctgtattttgcatgtgaggcgttaggtaatctgatgcttgctgacagaaagaaacattgagttaattcgagtgtttcagaagatatctaaatcaggagaaaagctacacaaaagaacactattcttacagaaaagataatcctatatagactcttatatggaaagctacgaagagaatgcaattaactaaaagaactgcaaggataccaatatcttgaaagctgagaacaagaatttgagaatactattgatggtaaaggcagcagacaaacctgaaaagtttctcttatcagagaatagtccaaagcctctagcatcctagttgataacattctccttctcaggccatctactcgagtgaggtataaatccaggtactgataagaaacaactcgtaagaaatacgtggatagagattaatatatacatgctagaaactgaataaataatcatgaaagcaaaggtgtacctcttcaaaggaggaaaatgtgcactgcaatgacttctcaaagacctgtacgcaacaatttgaataatagaatattctcagcataactttctgaaaatcacatagcataacgcatcggatatggtaagaggaagatgacagacataaatcaatgttagggcaagtatcctttccttcactatatttcttttgtttttcaattttaacaagttgagacttacatcataaatctctttctcggatgcagaaccacgctctaaagcaagtaaataacgtgcccaaagatctccagtccatggacaacttctagtcgccctagaataggcatgcgttatagcttttccaacctgaagcagaaagtcaattatacagatcaagtaaaaattgtaagaaacagcaccataaaaagacaatttcaagaagatgatagataaaatgccaaaaaaacgctacacaacaagttcttgacagaccttcaaagttttatcaagatacacggtgtagtctatccacaagtcacttgaaaccgggtattcagccacagcacgttcatatatagcttgaactcgggtaggatctccagaagtcttctcaaactttatataattctacaaagaaataattacaatcatcacgttttcatatagataacatcgtttacttggtaaagccaataacaagaacaaaaaggatgcaacagtagcaaaaaaacatgcccaagtctgcagattccgaatctttcacacaatatgagcactaatggtaggcatatggaatccaacttctacacaacatttatgatatatatcaactgcacgataaacaatacgtaccatgaattcctgaaacttttccgtgtcagataaatcttgcttagatatgttttcttcaagatgggcacgttcactatacatctgctgtgccttcttgtttgcaacagcaacctgatgagaaaccttactcaaatcatcagatccaatatcaaggtcaatgccctgttccaactcccaagtcttgtaagcaataagggtggagctcaagttttctagaggaacagacaggtgacggtggaatatgcttctgatcctttgtatctgcttatttctctcctgtaaaataaaactaaaaattcatgatgccacaaaagaactataaagagatgtgcataaactgatttatttctactttagagcctagagacctaaatgatatttacatagcaaccactatctctcgttaataacaagatgttagttctttccactgaaaactatgcgcagcaacccactaccatacttctatttcacttagtaaaggaatcatcctagaacacaattcttgctaacatgctgctagactacagtgaacgaatgtagatgaacaaaatcaagaaatggatccaacctcaatgtcagcctcgtcgatagtggctaagacaccttgctcaaattctctatatccttcccatattctattgccttcagtaacatggaagcccgcagccggaatagcacgttcaaaaagactccgcattttggaaataccttcagatgggtatccacgcactgatggatcaaattctagcataaagctcaggtagtcacaccaaagagatacagactgcataaaagaaaagctattagcttattaattcaatgtggaacgaattactagttgaatgatcgattataaagtatcactgtctttataatcaattgaggaagaaatttgaaatacaaagataaataacagaacaaatcgatatagcataccagagtatttattcagtctatctatctctaacaaaatggtaataatatataagcctaacgaagcttttttattcaagctgttggatccagtacagaagagaacatacctgataatcagaaagtccccgttcataaagcatcacaatttcaggcacattctcactgcaaggataaatataacaacagtttcagagggtgtgttaaaaattgcatgcttgaactgtaacaaataatgatcaaaggaaaccatctgaagcctacaataaaaccggaagtatgagccaaagaagcgcaagaaaaaatttacctagcggctaaagacgcttcatcccttgcccattcaagccacaaggaaggactcaacggaaatatggcactcatagcttcccttgcttgtcttagcttttcaaggttggctgttttcctgagaagcttaatgtactgaaataagaaagcaaaaaagtcagaaacaaatgtagccaagagaaaaccatccatcttccaacaagagagaagacacaactcaaaggttttccaaatacacaagcaatatcattttctcccaaggaaatctgaaatgaagattagcaaattctgctttcctgctaggtgctgagtgagctaaaacgacattttgtagcaaaagggaaggtagagagagtgattgttacttggacataagcatcgtagttgtaaggattagcggagagctccgactccaaggttacaatctgctgattcgactcggcttcatcttctgagtcggaatcagaatcgccggaatcatccgatgaggggggatcagctcgggcagggttttcggctgaagcgtcttccatcttctggtcagtgttactgacgagttcagtgtcatcagccatcatcttctcaagtttaagagttggggatttctgggtttagggttttaagctccaaatacaactttgcaaatagcaattcctctcaaacaccactagtccttgcgtcacatttagacctttttatttcagttcatttcggaagatttttcactatttattctttttacgtatagtattttataggtttttgtaaaatcaaaaataacgaagattactgtaaaaatattacaaattgttttttggtcaaaataccacaaattcaaaaactatattcaaagagcacataatatatgttatccttcttcaaataccacaaactatgaaactattaataaatgagaaaactaataatccgttttattccttataaatccaagtttctaagattttcacacatattaagcaaacaaattaaaatttgattacagatgcatcatttcaatagtattcaattatttgtcttggagtatacaattcatcattattaattaataaaatgcataggaacttaaaataattctttttaaaaaaaatctatatttttaaataaaattttttttctaacacttggattaattaggaacactgtaaatatgtcttagcctcttaggatatgaaaaccaatatcttcaattagtttgtcttttattcctctctgccatattacatttgaaattcgttgttagtttattactcaaacaaagtgttttttttttatggatatgttgctataatttataaacgacaaaatttaacaacggatatttctgttgttaatagcatgttttcttgtagtgatatatatatatatatatatataaatcatatagtaacgaataagtaattagagacaacagatatttctattgttaatagcatgttttcttgtagttgtagtgaataaatcacagagtaacgaataagtaaaagttgtctctaatctacactattattgagtaattgactattgagcagctagcataacgtaaatcttttcacctgtttgtctcccaattattttattttaacacatttttgagacaccaagtatgaatgctatatgtaatgccaaacatttgccagacaagtgcacatgccctgtgttaaaaacgttgcttacaatctccaccagctgtaatattgtgcggatctcattctgataaaaattactctattcatgaacctctcgacacatttatatatatatgcgatactactatagcttagaagtccattcactatcaaaacatatatcagaagaagaagaagaagaaagagagaacaaatcatgagtggctattccaagatggattcaacagaccagaaacttgagccggaccacccggtggtcgatcctcagattcagaagcccgatcttgaacctgctgaaatgaaaccgaagctgagcaggaacaggtcagtgtctgcatcagcacaagcggttccttcaccaataaagatgtctatgagaagatcttcgtctgtctctgaacgctactgtagaatctatgaccagagctctgccacgacttggccgcttcctttccatgaaggagatgaagacgaagatgatgatgataaagagaaggtgcacaagaagaagaagagcaacaacttcaagaaaaaagcattcgtaaaggcttgtaagcgtttttttgggatctcgtgaaaccagtttttgtttcctctacctccatatctatcatataatagatctcattgttattttcgattagagtccatctttttcatgaaacgtttaatacaagaaatttttctttatagttttatcgatcgctttgtgtattggatcagtggtttaacgtattttgcattcttgatgactagtgagatgtgatatattacacgatttagattttcttttatgtatcttttactgaaagtcacaacccacttacttctataactatagtagtagtagacccattgtggtttgtgcgtctgaatccgtcgaaagataacaaagaaagaaaactgtgtaaagatagaatttaacaaattatcatacaagcaataagatgaataaactaaatattactttatttggaagatgatgaggatccttgactccaagattgtccttttgtgtaaaactcgagagagagtcgtccagcccaatgcacttgcacatggagttcgaatttatttatttttattcgaatttatttggtaactctttggtccatgaactttgaggtatatacagtaattagggataatacccataatcaaaagacaagtttatgacaaaaatgtcgccaccgcatttaccaacaagtattccaagagttaaaaaaaagtctattgctattgtctcagacatcaaactggatcggtagtgtaaactatgtctatatgaacaaaaacggtcgtataaaggttctagcaaacaacccatcaaataccatcatcatttctctttcttggttggttcacccaaaacgtacctcaaaatctcaagctaagtgatccgtggcatttgagaggtttaagagatggtgggctttagtgaaaagtgtagatgtttctcaccacaagtctctagtaatgggtgtcaaactcacaaacacttgttggcctattgaagcccatccatcttctcttctcgaaacttcaagtggggtccacaatttctctccctctttctcccaccttcctcttatcttctctgccttctatatctcttcctcctactttcccttagggtttttcagcttcaaaccctccttgcactctccgcttccctccgttacctttacttctctattgcttagctcgaaaaatggcatcttcagccgcccaaatccacgttctcggcggaattggattcgcttcttcttcttcttccaagagaaatctcaatggtaaaggcggtacctttatgccgagaagtgccttcttcggtacaagaaccggtcctttctccacacccacttctgcttttctcagaatgggcaccagaaatggcggcggcgcttctagatacgcggttggtccggttcgtgtggttaacgagaaggttgttggaattgatttgggtacgactaactctgcagtagctgctatggaaggaggtaagcctacgattgtgactaacgctgaaggtcagaggacaacgccttctgttgtggcttacacgaagagtggtgataggcttgttgggcagattgcgaagaggcaagctgttgttaatcccgagaatactttcttctcagtgaagaggtttattggtaggaagatgaacgaggttgatgaagagtctaagcaggtttcttacagagttgttagagatgagaacaataatgttaagcttgagtgtcctgccattaacaaacaatttgctgctgaggagatttcagctcaggtattgaagtttttccctttcattcatttctctagtattttaatcggtagtgtgtttaatctggttaagtttcataaaggtgcaattttgggtggtgaatgtgtgattcttatctggtacacttgtggatggtagattcgtagctagtagatatcgtttcacacattagaatgcttccctgtcttgtctttctggaatgttttgtcaccttcatcttgtctttctgggatttctgattgagaattaatagtgactgtggttgttccattgtagtcgatcattagtttgctgtatatggtttgtttcttattggtttgtgtctgttgtaggttctaaggaaacttgtggatgatgcatcaagattcttgaacgacaaagtaaccaaggctgtcatcactgtgcctgcttacttcaacgattcacagaggacagctacaaaagatgctggtcgaattgctgggttggaagttcttcgtattatcaatgagcccacagctgcttcattggcttatgggtttgacagaaaagccaatgaaacaatcctagtcttcgatcttggtggtggtacctttgatgtctcaggtacttgacattgaatctttgctaaaattctctctatatctccttgagaatgttctttttggctgctatagtaccgtcttttgatgtattagcaccatgtaatatgtatttttgttatgtttcttattatgcagtgcttgaggttggtgatggtgtgtttgaagtgctttccacttctggcgacacacacttgggtggtgatgactttgacaaggtgagtcaaacgcacattttaattttatagtccttattcaaagagcattgaatctgtttactctttcttctgtgctttacttgacagatacaacttttgtaatgcagagagttgttgattggcttgctgcagaattcaagaaagacgaagggatagatcttctgaaagacaagcaagctcttcagaggttaacagaggcagcagaaaaagctaaaattgagctttcttcactgactcagacaaatatgaggtacagttaatttttccagtctaaattttttgacttagtactttcacaagcatctggcttctgattaatgtgaattctgtacccagcttaccttttatcacggccacagctgatggacctaaacacatagaaaccaccctcacacgtgccaagttcgaagaattgtgttcagatttacttgacaggtaattttagttacagttcttatggctaatattcatagcccgtcaagtaaacagattgccacatgttcattttgtagcttttgattaataatggaggcttaagattcttaccatgtatctatcttatagggtcaggactcctgtcgagaattccctgcgggatgcaaagctcagcttcaaagatattgatgaagtcatccttgtcggtggatccacacgtattcctgctgttcaggaactcgtgaggaaggtgactgggaaagaacctaatgttacagtaaatcctgacgaggttgtagcgttaggtgctgcagtccaggtgtgttctcctgaacttgtatctttcaccctatttaggtcttgaatttaacaatatgcattagtcattcctttgataaccttttggcaaagaagttgtgttctactaaaatgaattcttatcaagtaccattctcttctggctccaggctggtgttcttgctggagatgtgagtgacattgtgcttcttgatgtgacaccgctttcgattggtttggagaccctaggtggtgttatgactaagattattccaaggaacaccacactgcctacttctaaatcagaagtcttttcaactgctgctgatggacagacaagtgttgagattaatgtgttgcagggtgagagggagtttgttagggataacaagtctcttggtagcttccgtctagatggtatcccccctgcaccacgtggagttccacaaatcgaagtcaaatttgacattgatgccaatggaattctatctgtcagtgctgttgacaagggcacaggaaagaagcaagacatcaccattactggcgcaagtacattgcccaaggatgaggtgcgttcactttaggaattaaaccgcattgcttcattaacaataacttgtttttgtcagtcccatctttgaggtttagtgattttctactgattatgaaagtggtagccataccataccataggttaactggtagcattctcgttgttgctatcacttaatggctgtagcaatctccatcatcataggagtggttatttttcgttagtattcataatcatggtaacaaaagttggtgtggatggatgttgcaggtagaccaaatggtccaggaggcagaaagatttgcaaaagatgacaaagagaagagagacgcaatcgacacgaaaaaccaagcagattcagtggtgtaccagacagagaagcaactgaaagaactaggagagaaaattccaggtgaagtgaaagagaaggtggaggctaagctacaagagctgaaagacaagataggaagtggatcaacccaagaaatcaaagacgccatggctgctcttaaccaagaagtgatgcagattggtcagtctctatacaaccagcctggagctggaggtccaggtgcaggtccttccccgggaggcgaaggtgcttcatcaggagattcatcttcaagtaaaggaggagatggtgatgatgtgatcgatgctgacttcacagacagccaatgagaaaacaaactaggaaggctttggaattcatacatgggatgcgatgggagagacaaatgattttgtaggttggatttgagaacacaaatgaatttaagcaatgcttgtggacaacatttatttgtcgttagaaggaagcagtgtggttacagaggatgatgtttaatacataataatatgcaagccttctcttacacggtacttgcggatacacacaaaatgtacaaagtgggggcttttgaagcaatcctccgcaattatagtgactcaaaccttaaaatgcttttggtcattaactttgtactttttttggtatccaattatagcgactcaatcaatctgagactatccaacgcaattttagtatccaatgcacaacgacgtatgctttatctaccaaatcttatatgattttggaatgtttatcaaaatgcgttgattgcttatttatcttttctaaattctggccaatagttaaaattgtcacatcgtgttagtgaagagatctctctttgaaatgctcgaagttttgtttcgagcaagaaaaatattttttgtcgttgttatgggttctttgttttctactaaaatcccttcagacagaagaaaaaaacataaattaaatcccagcgaagcatatgtaataatgtaacaacaataaaatgtaataaaataaaaaagtaacaacaggctgtcaaaatgataaacaaataacaacggaggaagagtaaagtggggaagaagatcaatgggcccacacacaattcccaattctttgaccaatagttgacttttcttcctcgagtctttttaactcgcttcacctgttaccatctaccttcttacattattattacttactctcttaatcacttttgattaacaaaactaatttaccattgagggttttcttcttccttcttcttcatcctctttgctgctatgattgagctccatggatctgcaatcatagttcttcgatttaggattcgtttagatcgcggtttttgagctcggttggtgaagacatatgcttgaaaacgtactttaagctccaacttcgtctatttacaatattcctttattactttcatattcttctttcaaagtctttaagggttattttgcagtctttctatttgacttttgcgcttttattgaattgattttatatggtgacattttggacttggtcttctgttcaagattcctaggtcatctagcttcagtttttggtctatatttagaaactatgatttcgattgagatcttattggtcagattcacactttgtgtcagcaattctcagaaatatctaaagtggtgacttttgattgtttttgtgtgttgttgattctgggctctaattctctttctttgattttggtctggccaacagagaagtcttgtactgaagcatggctcttcggctaccagcttctaaagcagctgaagttgcgattggatctattggctgtggttatgatctagctattgatttacggttgaagtattgcaaaggaggttccaaagattctagattacttgacattaaagaaggtgatgataattgtgagattgttttacctggtggaatctccattcctaatgtttccaagtctatcaaatgcgataaaggggagcgtatgcggtttaggtccgatattcttcctttccaacaggtaacttttcgttgaaaagtattggtttgtgttgttgtaggttttgagtggataagatcgccatctgttgaagcctttatctagtttccttgtacattgttctagagagtaaatttccttcatagcattttggatgccttagttattaacattttgttaacatttttcttatggtttgctagatggcagagcagttcaaccaggaactatctttggctgggaaaatcccgtcaggtctcttcaatgccatgtttgaattctcgagctgttggcagaaagacgcagcctacaccaaaaaccttgcttttgatggggttttcatctcattatactcggtggctttggacaaatctcaagtgttactccgtgagcatgttaagcaggctgttccatcaacatgggaccctgctgcattggcaaggtgatgttctgtcttcataataggattgtatgtatgtaaagtctatggaaagttacttacatctgcatatttttctgtgaaattgttcgatggtcgtttccttggcccaatgtcttttcactggatgaaattgtttttgtatgacttaagaattacgtcttacttgttgtaggcgttgtttcattagtaatatttcttcagtaattggagggtttatgactaacacttagtcaaatgtttctttaccaggtttatagatatttatgggacgcatataattgttagtgttaagatgggaggaaaagatgtgatttatgcaaaacaacaacactcctcaaaacttcagcctgaggatctgcagaaaaggttaaaagaggtggcagataagaggttcgtggaagctagcgtagtgcataatacgggttcagaaagagtacaagcaagtagtaaggtctgtgaaatagttattattatttttgtttcccatcatcaaaactttcttgtttgtgcatgtcataaatgttttggctatttgacatatagaagaatttctactaacaatctagtgtttcgactcttaagtctgtaattcctgtcttttattcctggtttcaggtggaaacaaaggagcaacgcctgagatttgcagataccagttctttgggctcttatgcaaataaggaggtaatttctattggtaccatagcttatcataaagacatgtaatctgtgtgttagcttcttttctcaggagttacatgttttttgtaggactatgtcttcatgtgcaagaggcgaggtggaaacgataacagaaatctaatgcataatgaatggctgcaaacagttcagatggagcctgatgttatctccatgtcttttattccaattacgtctttgcttaatggagttccaggaagtggattcttaagccatgccataaatctgtatctaagatgtaagcctataaatcatttgcgctttgtgcatttctttctggagttattcttcatactagtggtttcttttacctttagattagaagtttgatataggtaaaattagaatagtataatcccaaatcttgcgtaatctccaagtccagctgggtagttaggttgatacataggagcataacttgaaaattatagtatttttataagtcgaagatgattttttctgccatctgttatatgatccgcgtaagatgaacatactataaacgaaaagccttgggttaacaatccaacattaactgagatttgtagataagccaccaattgaagagctgcatcagtttctcgagtttcagctaccaaggcagtgggcacccgtttttagtgaacttcctcttggtccgcaacgaaagcaacaaagttgtgcgtctctgcaattcagtttctttggacctaagctatacgtgaataccactccggtatgggtttgtttcatccctgaatatgtagcttgctgatgcaggtttatttggtcagtcaagtctgatctcattaaccctgtgtggttagattttgtttaaagtcctccagtcctgagatgctcgttctcgtttgtctggtttcaggttgatgttggtaagaggccaatcactggcatgcggctctacctagagggtagaagaagcaaccgtttggcaattcatttgcaacacctttcctctcttcccaagatatatcagctcgaagacgatctaaatagaagtatccggcaagagtctcatgaccgtcgatactatgagaaagtaaactggaagaactactctcacgtctgcacagagcctgtcgaatcagatgatgatctttctgtagtaacaggtgcgcagcttcatgtagagagccacggattcaagaacgtgctcttcttgcgcctttgtttctctagagttgtgggagcaacactggtaaagaattctgaatgggatgaagcggtaggctttgctccaaaatcaggactcatctcaacgctaataagccatcacttcactgcagcacaaaaaccaccaccacgacctgcagacgtgaatataaattcggctatatatcctggtggaccaccagtacccacgcaagctccaaaacttttgaaatttgtggatacaagtgagatgacaagagggccgcaagaatcacccgggtattgggttgtatcgggtgcaagattattggtggagaaaggcaaaatctcattgaaggtgaagtattctctatttactccaatattgggagatgaagtgatcgaggaagcctatgaaggttaagagaaaatggtggtggtgtggctcagagacaatgagagaaaataggatgagtggtatgtttatgtctgtacgtgtacattcttaaggttttgtcgtttgtaatgttaatggtgtggatgtctaatatgccactgtaaaacttatatacacgagaagttgggatcgtggatatcaaatttatgggtttgaatagtgacattgacaagttttggtacagcaaaagaaaaatacaacaagaagaacttagtaaatatataaatcagatcagcaggtagatttaatcaagtttttctgtttataaatttatcccttgaggagattataatggaacaaagtttttctagtccttatgtggccaagctcacaattttcctcaaccatttaaaacaaaaaaaaattctaatccctattaccaaacacttttatttccaagtatttaaatattatttctgtttattttcttaactcaattgtcaaacacacaaaagttttttaatatgtaaagttaccatatttaaatatttcgaatttttataaccaaatatagatattttgaatatatattatattaaaatgcatcgttttgttataattgaaataatcactaaattatatgactaacaattgtatcactttttacttggcattccatttatacataaattaatagaaagatgattaaataaattatttttagcatttacaactaattataaaagagattatgaaatctctatgttatctaattagaatatttatctaaataaacaaaccattatatgaattcatacatttaaaacaacaaaatacttttttttggtaataataacagttatagttaaattccaatactaagatttggcaagtcttcaaaatatattcaaactcaaaaattttatattgtttcactaactatccatctatagactataatgcatacattaaatatattaatcttaacagaacaaaattttcaattaattttgaatatattatgcacgagtcgttacctagtaccaaatgaactatgtgttatttttcaacaaagagaagtttgtgtattttttggataaaagagaagtttatgttaagaagttgaattaaagaaaactgatctcgaaagctcctccccaaataatgatgaggaatcaaaatgggcatcactcaaacagctgcatatcgaactctgcttgaagactgctggttctggtgtaagacgaggagtggagggaggagagacaattttttccagtcttatcacagtctaacgatgatgccaaaaagaaaggctatgcacttaagatgcgccaagatcctccggaactaggagaacactacggtgatataaaaataaaggcgacagatggttatgaaggcttatgagctggcatacttctctgatttttttttatattggttttagcacgagagtttgttagggtatattgggtaagcatgaatgtataacagtaagtgaacctaaaagcaataaaaaaaactcttgggataacattcaagatgaagtaaattgagttttttttgttaagatgatagcatctacattcaaaatgtgttaatactccatgaataataataccaagtttaattttctggagctcatgttttatctaaagagaacgatgcgcatgacattcacctaaaaaaactttggactaagtcaagaagcttcgaccaatttgctttaggttcaacctgagagagaataagctatgagagtttcaacatagcagagcagtgagtgccacaagaaacataataatgccctagaaacatctaatgactgactaatctggacacgagacttttgcacatacctggaattcacctgccacaaatttcaacacagacatcataattttaagatttagtgatgtttttgcctccttggacggaaacagtaaagaaagtacctggcgggagaactggatacaaaacaagacagtcaaggcgtacgagagagagagacagagacagagccacagaaggacatgtaaacttgggaaagtcaccttataaaaatgacattttggcaacggggatacagaatattcctctagtgtagagatgcaaaaagaatgcacaaaagcctcatcgaaacgctctgcttctctaattaccgagagagcacactctcccatatctgacaagaccagcttgagaaacttatggtgttcattggcatccaaatacctagaaaaaaaagaagaagaagaagtgaaacttgttgacttgtacagcaagggaagcataagtctcacggttttatttaccttagccagggttttagcccttgtagaagagaaatgcccctcaagtattggagatcgttcatatcccgcgacattgctacagacctgacgatggacgccacaaccatgagttggactcttgccagtttagctcctccaaattcgggatctggtaaaaacggtacacctttggactcgggttctctaactctaaaaccatcgtcgtaggcgggtcctttaaggtggtcaaggactctaaaaccatcgttgtaggcgtgagtgaaccaaccccaggcctggtaacagtgaatcagcccgactctctgaagctggacggctagaggatcgtaggagaccaattcgcagcattccaaacagaaatcatacgcgcggaacaaatccctaggggatccttgggtgaggcgtttatgcaggaaacacacggatttgatgatgaaggggatgaattgctgcgagatggatccaacgggagaccttttttagtggaattaggtttacttttttagttcccaccaaagagtgcgaatctctttaaagttaacgtaacatgcaaatcgattttaaagttttttgtttaaagttggagacgagtaagaacgagagtaatatataatcaactttgaaagtctcaactctcaagaaggaatcaaaagagacccattgacttctcaaaagtcaaaacattgatcacgtcaacaaccatcttctacacttaatcgcacgttcttcttggtatatattatgatcataatcatccattaattctcgaaacaaataagaaaaacgaaagaatatgtcttcaccatcttccctaacgcagagaaacccaactagttcgcaagagcaatcggagtctgttccacagctaaggaggcagacatctcaacatgcagtcatgtcacagacgctaacctcagctgcaaacctggcaaatctccttccaaccggaacgctcttagctttcacgctcctcatacccgtctttacatccaatggttcatgcgattacccgacccaggttttaaccatagtgctcctcacgcttctctccatctcctgcttccttagctccttcactgacagcgtcaaggctgaagacggtaacgtttattacggttttgctactcgtaagggcatgtgggttttcgactaccctgaccctgacggtttgggtttacccaatcttagtaaataccggataagaattattgactggatccacgccgttttgtcggttcttgtgtttggtgcggtggctctgagggacaagaacgccgtgagttgtttttatccggcgccagagcaagaaaccaagaaggttttggacattgttccaatgggtgttggggttatctgtggcatgttgttcttggtttttccggcgagaaggcacggtattggatatccggtcaccggagacgggggtcgtcgttagatttgttatttatttccaaatagatataagcaatttgattatttaatgtttggttgactaattcgcttgtgcatgtgatcatttcgtgtttgtctcatctacttccaattctaataatgattttaattttgttctttgtttagtggacaattatttacgcaagcaatcttattatacgttctgcttggtcataaactaataatacacttagaggtgtgaaatgcttaagatgccttgtctaattgagttaacacacgatatcaataaactgaaagctataaaaaaaaaaacttggttaattgtttgatcaggaagtggctgaactgagaggaccatccaggttgggacctttcaaaagagcatgtggacaacacagttcttgtaagactcacacttgtcatgttgtttactctgactttcatctcttgccatgtttatttgagacatacatgcgtcttcccaaaggaaataagaaaacctgtggaggtttataaattcctttctctgcatccgttttacttacttgcaaaatgcagagactctgtagccactagctaaacaccgttgctagctaggtaatatgcgagatcttgagttctgtttactccaattgctggcagagtcggtcaaggactcaaacacaaaatcttgcacaatgataccatatcagcaaccaattccatactcgattaagctgtccttactcgccctagtcatagcaactcattaattcgacactactactatcctctctgatcaaagactgctgttatgtgcataaatttcaccatcttcacaagctttgattactctcttttttcggttgcttctctcaactccatgaacatagtctcgtttcttccctctccctgatttgctcataagataaatgtactgatgtctgatccccatcaatggatgcttctccagcaagaaaactttgtggtaagcttcccttagaacaacagtctgggtccgaatcttgtgcgacatgtaaaatatacccgggtggtgcaccaaagccttcttgaacctcatcccgaaccctaaatactcccctaagcaaatcacattgtctgtctcagtcttcttagatactaaaaggaacaaaagctcatgaagtactgcgacagcccacttctcagcctgatcactgtacgaccccaagtgaaaagcattttcataaggcgaaatgtatgggagattttgccattgctccacccaattcttcacccttttatgcaattcgtaccctttggggaaattcatcgaataccttatgcgcaacccttttttcacacgagacccatcaatggtggcttctcttctctccatttccgacacaggaaggttgttccgccgcgaagatatcgtcaaagcaagcgtcttttcacccgttaaccgatctttgatctcagttacttcaaagtattccgggtaatcgccgatcaacgaagtaatgtaatcgcgagggagacccaaatcgaacctgaaacgatcgaggacatagagaggaagacttccagctcccgttagcatcaagaatttagtcaaccgttgaacagtgacgttgcgttgaggcggcgagagatgaatcgtctcttcttctttgtggagagtgagagcttggggagtgagacgaacatggagaggatgagaaggagaaggctgaaaagtggtgaagacagaagggtatttctggaaaaacgcggcggcggttatgtgaagattgacgagaggtttgagaagtgaaagagaagagagagggagtgatttcgacggagatgatacgattcgatccttgagagagataacttgctttaggtttttctctcgttgaacagcttcgtcgaggtaatggtcactgacccatttgactctggcgtttacgaaggtgcgtctttgttgcagagctctcgctagctttgttgttgcagctgccattagaacgctaagtgcaatgttatgaacagagagctatttataactctactacatatgacttttgctattaatactgaaattggaacacttggttttgcataactaactgagaataaaggatgttacttcagtgaacaaagaagtcaaggcctataacttcaaaactcatcttatgattcaaagaggtcccggaggattatcggaagtaaggcctcggtgccactataggggaaatcgtaatgaagtaaaaatcaactgcaagtagagagattcatgaaagttcaaaatatctaatcgaaaggactaaaaagggagtagctattccaatggacgacatgacagtgtgtcccttatgcttgattctagtgaccacgactcatcttaactttcggcattgactttttcatctggcgtgcacgttcttttgcttctttcttccttagagcctcggagctaagctttgcctgtgcctcctccaatattttcttcttttcggctttctttctctgcaatgcctcttgtctcacattctcaagttccttgtacgcttcctgagccgccttttgcctagcaccgtcagttttgttccttgcctgcattacaggtttttagatttattcaacctgtcacagttagtgataaaatggcaagtaataataataagtttgcccctatacctgagagctgagcttgtagcgcccaattaagtcaatgtaatacggaattagcgctatcaaccgaaccatatcatccatgtgtttaatatcaggtaaggcaaacttgaaaagcagcatcttcctgtgtttgccaggatgttgatccgagaaatgcattgagatgaaatacttcccaaacttttcaaaagacttgtcaccaaaaacctacagagaacaaatgcatcattgaagtctgattagtacaacagatcatttgagtagagatacacgcatcaataagcaaagtcaaaactatctaagtccaatataatcgatatccattgtccacatctacagacatagatagcaagagtaggtgacgctaatcatgcaccaattgaaaggcaactgtgtcactattgacaaataaaattgagatatatttttaaaatttacgagaatgaaacagtagacataccgcagcaacggcattttcaaacatcagagaaaaacacagtattcaaatgctcttttgaaacttttaatgtaagcgagaggaacattatacacattacatactagtgcttcacccatatcacattcacaactcaggtagtgatcctttaacaaatccatcgagccaaaatatatcatgacaaggggaacctaagaaatttttcagtacatcataattattcaccctacatttctacacagtttgacaacgaggctaggcagttggattcacaccaaaataagaagatgttatggaacttagcaaaaggaactgcccagctatagttctaagctaagtgatcagtgatcactggagttcttattctgatcaagcgcctccctttggagtaaaaagagctcatttttcttattcaacatgattagagaaaatcaaagtcaccaatgaggccagggcatatagggattggagtcaaaaccagttactctctcaaaacttcctatgaactttcatgttcatccataaatcaaatgtttaggctgaagtccaagaagaaactaaactaaactgctaagattgtcaatcatcaaacaaacaaaaaagcatctgacctgatcaagtacaacatcggtgatcatatctccagctacctccttagactcagagaccacagctaactcctccgttacccacttcctcccgccaggactgggaaccatccctccaaatctctgcagatccctcagctccttgtgcatcgttttagccgccttcttcctcgccatagcaaacacaatgtgatccatggcttcatcattcatatacacctcaaaactaatctcatctttacaaggcacgacagagttgaatagccttgagatcagatcgtgtctactcttaagctccaaagtcgccaaaagcccatggcaatacctacgcccactggcatagaacttaaacacattcgtcgcttctttcagcaacaaaggagagtcttctccttcaccaactccaagcaaactgaagttcttctcaaaaatcgtatctttaagaccaaatttggaagcccaagccaaagcgaggttctcattttcacgtttaccagtgaagtaattgatagcgtaaccaatcaatatagagacgcaaacgatctccacagtgtacgattgcatcttcttcggaatgtcagtatctggagtttctgaagcagactcaagatccggcgtctgtggatcggcaggagaggaggcgtcatcggaaaaaaccggagactccgtagatttctcgtcctccggcaatccttcgaactcatcttcatcccagtaatcgaaggagatggaggacgaaggcttcacggtctgagtgggaggatcagatttagatgcaggagtagaatcagaatcgggagatgggtccagatccagaaccgttgactcagactgagtcagaagaggaggacggagagagtggtgaagctcagtggaatcttctgaaacatcgtcgtcttcagcatcgaaaccttcgaagtcggaagaggaagaagcgagaacatgatggtggaggcagaggaaagcgatcagagctatggagaagagagaaaagagacgattcatttttggatccggagagaagaagagtcagagctccggagaaaaagtttaaaacttgttaattagctggttgagtcgtcgtgctatagcctaagccttgcttggccaccaccaccagatccttttttttttgttccaaaaattcatctgacaaattaaaaatattaaaggaaaataagaataaggttgagttataatattttctcgttggataggatatattaagatttctaccaaaaatcataccctaactaaattttcatccgcggtatatcgcgggaacaatttatactttaaaattaatatatataaaattttgcaatttgtaactatctatgtagctatctataaaatatttttattttatagtttagaattgttattaagtaacgtcctgccaaacccgtcccgccaacccgtcccgtaaaaaaactcatttattttattaatgttgatcttatttatcatatgtttatgaatcatttatttttaaaattatctagtaattaaatgctatcaaatatctctgcggtttgatgattataattgaattgtaatagtcatgcagaaaaacaatatcaataatgataattttgtagtaattaaatgatattaaatattttgaaagttttattttagtaaccaatcgtgtagttaatgtagagagattttagaaaaattgttaaatgtcaaatatttaattcgaagattttttttctaattattaaaaacaaatattaaaatccagtggcaaccattgtaaataagtctcaactacagaatttatttcacaaaatggctgcaaaaatgtatatatagatgtttaaagttaatttaatagccaaattaatatcttctttctatccataaaatcataccctaaggtttactgagtttattaggatgtatcaattaaagcaaaacatcccttctaattaatcattttgagtgactgattaataaggaggacatgttaatatatgtagaagcattaaaacacgatggtcttaaggcattaagctattaagaatttttaaaaagtttatgcatggtctcacactgacgaataaaatacgttatcatctttgatcacgaataaaaaatattaatgaaacgagaatcatgtgtaaagaagaaagttcatactagtttcggctcatgtgagccttgtagaggtttgacttggatgctatatatatgtagacatgagctaggcatttatctcaaaccaaccaaccaatatatcagatggcttccatggatcacaatcattttctttttcctctcctcttcatcatcatcatctcttccttgcacgttttgcgtgcttcgaccacaccttcacactcacacaaactaaaatccgccactaccattagaaaaatcaaccgtagaggaccttacattggccttgtgacggtctttgagaccgaagaagatgcttttctcggcagtgttgatttcagactcgatcctacgcatcctttcctcgatctctctggtatctacactgatccctaaaattaccacttgaattggtttctattaagtttttctaccttgagagagtctctagactcttgttcctttgagatgaaaatgtaagtagtttctgattttaatgagtaaatgaatgcaggaagacgttttcgtatagggaagattcatggaaagaaggttgtgtatgtcagatgtgggataggaatggtgagtaagttgaccccaaaataaaaaagtacaacgtgaaaaagagtttatttggttattgtaatgttatttcacggatcctaataaaaaattgaaatgataattaaaaaacatttatattaaaatcacaaaataaattgatgtactaaaaaacatttatattaaaagtatcaaaccaaaactttctataaaaaggagatggtaaatttttcttgaattttatttgaaggtgaacgcagcagcagcaacacaacaaatgatagatgtgttcagtgtgaaagggattgtgcattttgggattgctggaaatataaacaactcgatgtccataggagatgtgagcatccctaagcaaatcacgaatgctggcttgtgggattggctggtatatacaaaatttacatgcacaagttttgttattgataaataattgcttctccttcatattgtctgatgattttagttctgatcgtcaaacagaatccaggcaaagcaaaaggaaatgaggatgtagcgtacttagatgtcgggaactataatgttccacaaggaaacaataagttaggaactattggatacagttacgaggaattatattcagtcagtggtcacatcaattcaccaaagaaagtgttttggattaatacaactcaagagtggcttcatcttgcagctgatcttgaggttgttaagaatgacatatgattagattagaatatattttttctaacaaaagactttattccatggttgatggttgttgtatgaatgtagaagatggagctattgcagtgtgtgaatgcaagtctgtgtcttccaaataaacccaaagtagtagttggattaaaagcagccactgctgacatatttgtggataatgcagcctatagaaatttcttatacgatacttttggagtttcctcctcagacatggagagttctgctgtggccatggtaattattcacgtttctaacattgtgattcattcctttcactccattttttttttcattgaactttcacttaattttgtttgcatgtgttttggattcgaccagacttgcgtgtcaaatgggtatcccctaattgtgataagaggattatcagatttagcaggagtaggagataacactgttcgaaagtttggatctttggctgccactaacactgccaaagctgttttagagttcattaaaaagctcccaccgtcataattcctacgtgtaacctatcattatggatgtttgaatctgtattttccctagtttttctacgtacgttaaaaataaaattaataaaatctgtttttcttttctttaatcagcttcttgcatggaacactttaatttcagccttcaaaactagaattacaggtctctttgttcatatcaacgatcccgtgacagcaacaattcaaatatgggcaaaaatattttgtgtttataaaatagtatttttttggaaatttgtagagcgtgtattatcgtccacaaaatttattttagtggtattgtaggatatttgtcaaaaaaaaaaaaagtgcgcagccagcagcccctcatgtttaatgcatacacaaaggttatatcagctagtctagagacgagaagcacgtggaaagaagaaactatcaagttggacttggatgatatatatatatatgcagctgtggatttgaatcgtaaaccaaccaaccaatcagatggaccacactctttctcttcttccatttctcttcatcataatcatttcttccttccatgttttgcctgtttcacccacaccttcacacaaactaaaatccgccactaccatcagaaaactcaaccgcggaggaccttacatcggtctcgtgacggtcattgcgaccgaagaaaatgcttttctccgcagtgtcgatttcagacctgaccctactcatcccttcttggatctctctggtatccacttgaatcaaataactttttcaagttttctaacgtaaatagagtcttttgttttgcttaaatggaagttagtacttttgagatgaaaatattagtagtttctgatttaataaccttatgtatacagggagacgttttcgaatagggaagattcatggaaagaaggttgtgtatgttagatgtgggagaggaatggtgagtaaccacaacattaaattatccaaaacagaacaaaaaaaactacaacaaaataaagaagtttatatggctcttatttcttatctaaaagtagtatacaaaaagggaatgggcacacaccaaaatatcctgatccgtatacaataattgaaatgatgaattgatgataaaacttatattaagttttaatatagttagtaagtagtatagtatattaaagatgcatattagtaaatgtaatccatatgaaaagtagcaaacgaacacttatattaagacaaaagaattgcaggtgaatggagcagcagcaacacaacagatgatagatgtgttcaatgtgaaagggatagtgcattttgggattgctggaaatatgaacaactcaatgtccataggagatgtgagcatccctaagcaaattacgaatgctggcttgtgggattggctggtaagtataatagttacacaagtttgattgcttcttcttcttcatattgtctgatccatgcttttggttctgagtaaaacagaatccagacaaagtaaagggagttgaggatatagcgtacttagatgtcggaaactataatgttccaaaaggagatggcgacaatgagttagggagtattggatataattacgagcaactatattcagtcactggtcacatcaatgcacctcagaatgtgttttggatcaacacaactcaagagtggcttcatcttgcagctgatctagaggttgttaagagctatacaacatactgattagattatagattataaacaataacggttccattgttaacaacggtttttcgtgtggtatacggtggcagaagatggagctatcgcagtgtgtaaatgcaagtttgtgtcttccaaagaaaccaaaattggtagttggattgaaagcagccactgcttacatatttgtggataatgcagcctatagaaatttcttatacgatacttttggagtctcctcctctgatatggagagttctgcagtagccatggtaattttgaatccattaatttttacataattttgatcgttaagtgatatgtttgtgttgtggatttgaccagacatgcgcatcaaatgggtatccgataattgtgataaggggtttatcagatttagctggagaaggaggagataacactgttcataagtttggatctttggctgccactaacactgccaaagctgttttagagttcattaggaagctcccaccgtactaattcctctagtgtaacctatttatcatgaatgtttgaatctagttctctagttcatatcaacgaacccgtgacaacaaatgatttggattgttatcaaattccattttccatgatcgtaacaatgacaacacttttatctcatatatctacgaaatgcaacattcgaaaaattaacaatctcattgcaaattccaaactttcactcattctagcgacaatctttaacaagcacaaaaagggatgtatatataccttacaagagaagccaaattgttaaaattaaggtttaacatctctagttgaatcattctcatcatcgctatcgcaattctggctttgctcatcgtcagaagacggagacggatcgagacgggctgcgtctatagcccattggatcagcttatccacttcagcatcttctccgatttcatcaccatcttctccgatttcatcctgaagaagaacagaggacgaagaagacgcggaggggagagaagttttcagagccgcgaatctaagcatgagatcttctggtgtttcttcaaccacatcctttgatttcggctgcattctcggccgttgtttctgttgttgctgctgatccttcttcttttgagatttgagagcgagaaatctagagtgaagatctggatctaagtaatcggaagaagatcgagaagtgtgagaatcaacagagagctttagtatcatctcatcttgagctgcttgaagcaactgttcaacttcgtcttcttccttgcctcctctcctcatctctcgaatctgttgatctcaaaatcgattttcaaaaaccgaattgcgactttatgatctctatacaaaaccggtttagtatagggtcgattttaattggaccaacgcctaacttacgggcacacgatgtcgtttcccacgcggtttagattccaaatttccgtgagatgtttatttgatctccaccgtccaatggaaactctgattatttcgttgccgttgatctttgaccaaaaattgccaaccaatcagtttggcccaataagaaaaggaagaaaacctgaatttcacttaatctatcggcccttttttggtatttcccatgtgcgataaatttatacgatcaaatgtgaaccacgatggttcctggaagaaggaagagatttgcagcaacagagcgttataaaaaggcgaagcaagagggaagacaacagataacaaattgtgaagaatgggaagcgaaggaagatcgattgcgaggaagccaaggtttttgtgtctccatggatttcgtacgagcggagagataatgaagatacagcttcataaatggcctaaatctgtaattgatagactcgatctcgtgtttctcgatgcaccttttccttgtcaaggcaaatctgatgtcgaaggcatctttgatcctccttattacgagtggtttcaattcaacaaggtcctttgtttttcttcactttcttctctttattcttttgattcgtatgtgtactaacgttgtaatttggattcaggaattcaccgagtatacgaatttcgagaaatgtttggagtacctggaggatcgtatgatcaagcttggtcctttcgatggtctcattgggttttcccaggtaagttatctacatttgaaattgcatcaacagagtctgatttgtgtactctctttgaaaactctaaatttgattttgcagggtgcaattttgtctgggggtttaccaggactgcaagctaaggtacgtcaatactaatgacactatagtattcatgatcatatttatttacaaattctgtttctgattcatttacaacttttgcagggaattgcatttcagaaagtaccaaagattaagtttgttataatcattggaggagctaagctcaaatccgccaaattggccgagaatgcatattcgtcttccttggaaactctctccctccactttttaggtacattctgcaaaagctgatttgaaaattcttcaaaaccttgttcattgatgatcgagaatctgataaatggcttgtttgttgcaggagagactgattttctgaaaccttacggaactcagctgatagaatcgtacaagaatccggtggttgtccatcatcccaaaggccatactgtcccaaggcttgatgagaaaagcttggagaaagttaccgcatttatcgataccttagagcatctggtgatggaggaagacaagaatggtgaagaaaatactagtaagccaacaaaatagataagcttaaaatgttatgtataacgaataattctttggataataatcgtgcaatgactgtaaataaatctggcaatgtttgcgaaaaaacaattattacaacacaaacaataatagacgattctttcgttcattttcatacattgtcttcctttgagctataatactcttcttggtgtatataacgaatccaaagaagagtgaaaatggcaaaacaaatcatgcagtgtacctgaagcacttacagtttacaaacacattatcttctgcttgctagttttgcttttccccaatcatggcctcatttgcaccaaagtttttctcataaaattgttacaaactttggagcatccttccttgggccatcaagggatcgatacaagtacaatgtctcaacataatccccagtgacagtgtcttcgtcatcatcaccatcggctccaaatacttccacgactacattaggcagagcatgagaaacacccctgcagcctccacgggatatgagacatgacgacaaccaaacaaacctcatattggaataccgatgcataccagagcgcaatccaacatctccaaagggactgtccctgatctcaagcttttgtagtttaggacaaccctcaagaacgtatctcagagccttgtcactgttcccagcaaacgctacagatagcgtacggatcaatttcccatattctcctatatagctaaaagcttcatctgttagtaaccctgatactgcaagtcgggttagcttcttgcagtttttaacaatggcaccaaatccatcgtccattggctttcctgtcacgtggtcaggcctatggcgacccattatgcaaagtctaaacacagtaagctgcgggcagttctccgacatggctgtcacagctccattggtcatattctggcaaaagtacaggatagattccagtttcctacagccctctgaaattgcttggaggcctactcccgagacaggaccttcactgtcttcacgaggatcaaaagggaaaatccgaagctcacggagctccttgcatgtggcagccactgcctgtagtccttcatcacgtatcgagtcaagagcctgcattataaaagtttcaagatacgcatgtaactcaaagtcctcggttaaaggatattacactatactatacaatgagatcaataaagatacatacccagaagactcggatattgtgacagttgcttatgatgggcttgagcatgtgaggagaaatgttagcataactgaagttaagagaggtgagattagcacaaactgaagagatggctaggaggtattccggtctaaattccctgaatcctgagagacaaactatggatttacaagcacgaaaagcagctgcataatccggttgttgttctccctgaggcacattgtctggactaaatgaccccgtcccaagactcgttaactgcggcgctcgaaccattagtcgatgcagctcttcaagggaaacaaacctgttcgttctaagtttcttcaagaatggtgacctaaccacgagctcctccaatgccttgaaattgataggggattcaacacagtcaaaagacaaagactccagatgagtttcaccctcaggaaaacaagaaatccaatccaactcatcatctgtgacttctgactccatcaaatcaaggacctttagctgcctgaaaacaaagtcccacttgataagcatttctagaagactctgagaacaaacaaacaaacaaacaaagagaagagatctacaaagtacctgcatttgttagcaacaatagcaataccactagtcccaaaaccttcacagcagaccaaagtaagctctttgaacccaggaaacgactcagcaagaagagccaaatcatcatccgtaacaaacatacgcttcaaatgaaccttctcgagccaaggataagccttagctgtagcagcaacccaaggagagaattgagctccccaattaggaggcatgagattaaaatcagcaaacctaggtttccctttaagcacaagagacctaacacgcttgaaccggtgaataagccgagcaggagagagcgagtaacagtttccaataaaaacctctaatcgagtctgagcctcgacgcgataccacgatctgcagaccaatgagactgcgttgcgatcgcatctggaagtgaggaactgaagcacgttctctaaaacgttctcaaggacatgatctggacacggcgggggagaagatttgaaatttcgagacttgttcgtgaatgtagcggcggaggaagaagaggaggaggaggagcaaggtggatttaagttgagatatttctcaacatcctctgacattttagctgagctatcttcttctgtcatacaagtaagtgatgaaaaacaagaaagactctgactttgatcttatccagaatttatgagctcaggtgctctctttctgatacaaaatctgattcagatgaagaagagagataggtgaaaaaggagctggtcttggtgtttggactctctctctctctccattttcacctccattatttaggagactatgtaaaagaaaaaaaaacaaatatttttggttttgcacattatttttgttgatgaagaaataaaaagaatcatcaagtattttgtgaccaaacatgatttttaatcctattaaagatttgtacttctattttaaggtgtgacaggtgacatttagagttttatgtaagtggtaatcatgtaaacttgttgaatcttaaccaaaattaaaaggatttaaaagtgttttgtactgtttctttaaatgaataatactaatatctaaagtcactttcatccttttttaagttaatgcattttacatgaatttaatttttatcatacaatcaacttttcgattgtgttctcttaagaaggcctcaaggctttcgtgtaaaggaaaaatgtttgggcttattatatctcataatatggtggccaaaacaagatcaaaggtgattaatggttggtttactgccaataatgggttttgaagataagtgtactgtatgccttattcgattatcttttcaaaaatgtgtttgcttaattttccacaaggcaaattgttatagatatcttcaaatatgcttcttaaaattttcaaaaggcaattatttagaatatggataaatttcaaataagttccctaaaagaagaaatttcgaagtcaagttttatagaataagtcataacgacgttgtatccatagtcttggtcactaactactaataaatgggtcataagtctatagatatttttcaaaagctaggagtcgtattagtgtgaaattatggtataaatatactgaccttccattacaaagaatgacgtgtaaacaaccaaatattagaatgtggcaagtagtcgccgaacacgtctccttcgtcaaagtctccttttctgacttctctttaacccccaaccccttgttactttaatttggctctacatagatttgtaatcaaacacaaatcacaaatctatatattttcccttaattactttggctttctattgattaaagcttctttaattccaatttgcaatttaaacacctatctctttcccaaatttgagactttcctaattaattaaaagctttgctctgtatatttgtcgttataaatttaattttaaaattcgaaactttttttctgcctttcctctttctctctctctatctatcaaacactagacttgaagaaatgcagtgaaattgaaattgagtagaagcagaagagaatatggtggtaaggaaggtgggcaagtatgaattaggtagaacaatcggcgaaggtactttcgctaaagtcaagttcgctcagaatacagagaccggtgagagcgtcgccatgaaaatcgtggatcgtagcacaatcatcaagcgcaagatggtggatcaggtcccgtctctatcttcttactacttactctcttcgatttcattttggctgagatatgattagattgatgacatgtgttagcagattaagagagagatctcgattatgaagcttgttcgtcatccttgtgttgttcgtctttatgaggtaagtgaatgttttgcttcttcttctttgctttataatttactgaaagattcttgctttccatttgggattttgatatttggtcctttttaggttctagcaagccgtacaaagatttatatcatcctggagtacattactggtggtgaactgtttgataagattgtgagtagctcttggtgatgatttttacagcgttttactctgtcagatattgttgaatgattcatttgtttcattgctactataggttcgtaatggacgacttagtgagtcagaagctaggaaatactttcaccagcttattgatggagttgattactgtcatagtaaaggtgtttaccacagagatctaaaggtgaatacttgctaagaattaatacatttctaccacttgttcttgatctgatgattgtcttgtgttaattgcagccggaaaatcttctgttggattctcaaggaaatctcaagatatctgattttggcctcagtgcattacctgaacaagtaatgggggttctcagtgacatcttttctttcaaattttgagaatttagtttgttattggatcattattgactaaattatcttactttgatctgaagggagttaccatcctaaagacaacatgtggaactcccaattacgttgctcctgaggtaaatcaaatatcataatgttttgaaatttaatgtctttcttatcatagcttatgtgttcttctccgttttggtttaggttctcagtcacaagggttacaatggtgccgttgcagatatttggtcctgtggggtcatcctttatgttcttatggcaggatatcttccatttgatgaaatggatctaccaactttatatagtaaggcatgagctctgctgttgttgcctcttgattcttgatattttgttttgtaaagtttcttgttgctgcctagtttaattatcccaattaaacactaggattgaacaagcaatatctgcagaacctgtaatagaaatcgttatggctaaattattttcactgtagtcaagactccctttctctaaaccttccgtgttatgtgcttgtaaggcatctatgtactttctttctgatatggtttccttttcttcttattgtccaacatttttcagatcgacaaagctgagttctcttgcccctcatattttgccctgggggcaaagtccttgattaatagaattttggatccaaatccagaaactgtaagttttgagtttccgtgcagatagctttgtttagatctttttcaatcctggctactgtatttgaaagatgtgttacatgttgaaagaacagcagcttgaaaaagagatatctagattacactataatctttgaccagctccaattgaacatatcattcttttctacacttgaatagaccctagaactagtctaagcattttcttccataactgtctggaccattttggaaggtctatagaatatggataatgtgccaactgaaagaattacaggacatagttgtcgggtcaagttgtcccagttactcttttcgatgcaaagtcttgacaaatctcgccttgcttttgtttttcttcttttcctggcagcggattacaattgcagaaatcaggaaagatgagtggtttctaaaggattacactcctgtacaacttatcgattacgaacatgtaaacctggatgatgtatatgctgcttttgatgatccggaggtaggattcagctagcacaattatttgtttgctgttgagtatttgtgtataaatcatgtgtttccagagttactgttgttctaagcttatgagattattcttctgcctgcactcagcatgatctaataatttgatgttctatttaacattatacgttgcaggaacaaacatatgcacaggatggaacaagagacacaggtccactaactctaaatgcgtttgacctaattattctatctcagggcctgaacctcgcaactctttttgaccgtggaaaggtacaatactgggtgtgaccccactgtgtgcattcctattccttatttaattgttctttctcttttctacatgttatacaactaatacgctaatctttcatgtgtgttgacaggactccatgaagcaccagacaaggttcatctcacacaagccagcaaacgtggttctctcaagcatggaagttgtgtcacagtctatgggctttaagacacacattcgtaattacaaggtgaggtactatagtaagagtttggttaggcattcttatcggttgaaatcgcttcattgttttttgtgatgtgtatcttaacatttcttgagagtttatatatcatatcatcatctcagccttctcaaagcacccaacagctgttaaccgtttccattttcagatgagagtggaaggattatctgcaaataagacatctcatttctccgtcatactagaagtaacttctcttaaaaccagtccaacttttttactttggtctctctatgttcgaagtctcactaatcattttcaaatctgaaggtcttcaaagttgcaccatcaattctcatggtagacattcaaaatgcagcaggagacgcagaagaataccttaaggttagtttcggaaggagaccttagtgttataagttcaccttgagggattgtgtgactccggaatagtaaaaaccagtttatgttttgcagttctacaagactttttgtagtaagcttgatgacatcatttggaagccgccagatgcatctatgagaaatcgagtcaccaaggccaagagtaaaagacgttgaatccacgtgcgtggtattcaagcagagctttcacagaagacagttagaaacaatatttaactctctgtgtttcttaagtgctttagtcgagtgaatatgtacaagcttgttgatttggttttaatttatgaatacatagaagattgtactaaacttatacgatatcaagactaaattgagtgaaaattgctgatagtttctcctgatttgaatacggtctgatgcgatgatccatatgcttccaacataattcatttattctcatacattcaccagtctcgtccttctgagtatatatgtatactggtagggacgtccctatgttaattggctttgttccctgccacgttttgaagtagttgatgcagcatctcaaacacgtttcagtgtcattctattttccctcctttttagggattagataagagttaagactctctattttcacacaagtgtgtggttggtttgctctagaaccaaaagtgatattgagtttgacattcacattattccttaatgaaagaataatattatagtagtagtattcacttaggcttcaatattatgattcgtcaaccctgctgaaatagaatttaaaatgatattgagtttgacattatgttattccttattgttactcaccaactttagcataatgtttttgactctcgaatctaatctttcaacttaccagtcttacaggtgtttatcagatgcatgcgtacaaaatatattgtaatcggaactatttttttatagtctagttgatctatatataatgtttctttcaatatgaaacacattttataatttatgaatgaacttagaaacattataaactcaaacctcccacagaattatctttcctgagccaggacaaatgcacatcttaaaagtttgctgcaatgtattaaaacataaaaagtaaaatcacatcttagttagcttttaacttcttcaaaaacaaaaaagaaaaacagattattgttgttcatgttttacaatgtctaacaatgtcttctataaagtaattaaaaaattattgttgttcatgtttgtatatggaattgatatacgagattttgtatagtttacatgagatttcctaaatttaaacttatataacccatcatattacattcatcgtgatcaccaccatccatcattcgaattgtcaacattttttaatatatatattagtttacggcatggaaaaactacagtggtcgtggcgcttccaacttcacaaatttaaagttgtttatggcaaaagacgagtacaagttggtccataacaccataaacatataaccaagtagctgcaacttggtacttcatgcttagtattatatacgtaaatataattataatttttgtttcctactagtgacgacgaagaaattcgatattagtagtagtttgaacattttcattacttaaactagtgcaagttacaacacatctttctatgattctgttcttttaactaaagtttctatattgcttttgaaaattattatgtattaacaatagtatatttcataaattactaagtttctttacagattgatatgacaagttgcttatatattttgtggcctagtagtagtgtcacatgcaatggatttggttaagtagaagtatagaactatatatagaaagcatgagaactggaaacaaatttgtaatgtatttcgactgaattttttatttgttattcatttggccgaatggttttaatttgctatgattttcgcttatgttcacaaaacgatacacgaggacatttctacaatacataaaccaaaatacagaaactagatgatggtcatattaaattgtcattttgaaaccaaaaccacttcttctttataaaaaaaaagaaaagaaaaaaagaagaagatatgaattttatgcaagtgtaaggacatgcattgcaaaaacatctcttaactatttttataaaactgaattttttgattattaacataaacatggatttatatatataaaacatctataacttattgaattgagttttcaggttcacgttttggtacacattttacgtcaattagttcgactcaactacactgctttaataaaacaattgtattatcaaatcttttgttctagaacctcttaaactttaaataattcttaaaaatctcgaaaaaaattcttttttaatcaaaagaaagaaaacaaaaactggacgagccaaaatgtgacctacgagagctatgatccgtgtggtccttcaaagaataaccagcgaaatctgtatatagattatggcataaatattataggtatcaataaactaggagagaaatgtacgagcctgacagatccggaaagagctagaaaagaaacgtgacacatttgtattcattcaaggagacaagtaaattaaaagcctaacttttattggtccgtttgatcaactcagagctggacatgtgtcttttcctctttttcttcaatctttcgcgactcttctcttcttctcttttctattctacttttatttttaaaaaaaacatttttatttgtttaagatttaggttcacatttaacaaaggagaaaattttatactactagtagaatccactgttcagctaacggcttgcctttgctcagcttgaccgacataccctaacacttatatttttgccttccatagtgggatttgtacaaagttaaatttgcaaagtagccatacttaattataattagttttctgattagttgtatcaaaaatgatctaatagtttgattcgttttctagtggtagaatcacatgtataacatttattgaaaaatcaatctttttacaatgaaaagatgaatttgtatgggtaagaagcatgagcggcttgagcagcggctttatgtgagaaatcgaagccccacatgtccccaaattcaaattatagattaatccaaatgaaatctgattaacgcactaatcgatacttaaggttttaaattactctcattcttcgcttacattacttatataaaaccctctctcgcatccttcctcagttaatcatcactgctctcttctccatctcgctttcactcgctctctctcttgccctagcttcccttttctcctgaatcggcctcacatcacggctttttccgactgttttccgtcgaatttcaatgggatctcgtgacggcgatccgccattttcgaaattcttgagctgactcgtctccaatagttcatcggttagtctgattccgtgtatatctattcttaacctgcaatttgatttgattgtacacattttttgttgagtcgtttttgtgatatttgtttttatccgtgagattagtttcgtagttatggcgtttatcatcgatagatcagctgcatgagctttaagattatataatttctgagctgcggatctaattttagtaatgtatggaatgattttgagtactaatgtatcataatttggttttgcatgtccagatttgtgagagcttttaaaatctttaagtggacctgtctcatgtattgaggtttgttttctcatctatattatttgtgtttgatgcatttacatatatgtatatatcttatgatctgttttattctacaagtattgtgagtgtcatttgttgattgttacttagttagtctatatattccttttacttagttagttatgagcataagataaaaacaaataatagactcgactcaattgatctgaagaaacacagaaaacaaatctatacccagatatttagttactgtggttattgatatctgcaccttctttagttagctactgtgaataagagactcgactcagttgatctgaagaaacatagtttgttactgtggttttttatatctgcaccttctttagttgtaattcctgagaagattttgaaagcatcattagattcttacttgagcccactttaaggtaaaaaggagctcgtggaaagtctatacccaaattatatgaaattaagcaaaatatgcttgttcgttcttcttcttcggcaaactaacactaattcacccactaaagagttttcgagtttgtctgagtatggtctttttttgtttaacatggtctgttaagtaaaaccctcaatatggaaccttctgagaattcaagcgtgatcatgatatccttgtcactcaactttgattcttggtcaaataagacttttcaaaaaactatatgataggctccttttagagaccatttattggatagcttcatctgtgtttgcagtctctaaatgtacaaaaatgcatttgcacaatgtcttcaaagaagagaaagtgaagaaaacttgctttactatgaggagattaagaaaaattttattgattgaatgcaagacaattttgtctcaaatcattaaaataaaaaatactactttgctgttgcataaactagcaatgcataaatatcaggtttatatctgcatatctttgtaattgtatgctgttcgttgtttttataatatgaattttaaatctgaaaattcatcttcccttgttaatgcagtggaaaactgctacagttgactgagataaggttctgacagtccagctgagatgctgagtatcaccatttgtacttgagttgtctctcatgtctagaccatttgtgagaagggagtttttgtttacaccaataccccccagtctctaaatttgtaagaagtattatgctcaattaaggaacatagctagttcgacataccatactaccctttttaaaactatcctatatgtttgatgctagcatagcgtaattttgtgttctcatggtgcagcagggttagtttattgtgtacctctagatatatattctcttgctgcgtagggttcccaagctgccaaaaacttttaaaaattagtgatctgttccccaaacccccattcaataagaaaggtctacctgtagctcacagtcacagctattagagctgtccttgcttctttgggtttactgttttagttaattagttaccctatgaaagtctgatccttcagaagttaggtatagaagtaagtcgattaagttcattcatgacttttccagatgttgcatacataactttttttatttgtattcgaactagtccaagccgattctcaaaatcatataaaatcatttacaccttggtcatggtagctaagaatattgtatctaaaattggggagtggggagatgtttggttatattcccttctcatcgatggtctagatgtgcgaggtgactctcatggaggtaaagaacaatggtgattttgtgaagaacccaacgtaatggtaattcctaaaaaggttagaagttttttcagcttgttgtattgctaaaatggggttgatgtactcaacgacatccaagtgtacttgagtgagcttttttggggttgagtacctcgacccattattcaaactaatgtaaatggtgaatgcagcagtgactttgttgccttttgcaagaactaaagaagacagaaacaggttgtaaaagagagccaagtgtgtgtttatggtagaaagagcaaagtgaacgaaaggtgtacctttttgacttgttgtcactggttttctcccacttcatccgtttcatgctgcatcagaaaacaacataaggaatgaatgacgtaacgcgaagcattaggagttgcttgtaaattaatacattgccattactaacgtaattcagtagattctaactacaaatgaagtcaatgtatctatttgtctactttagccaatgtatgataagaccaaatagtcttctcttttttcagaaactctctaggattaaaaagtttgtgggtgaaagaaatattatcgtgtggatgataagaataattgatcttgtgttagtaaattaggaatagatatacaagtaggtttctctctaaataaaaaataaaagagtttaaattgcatgcgtataaaagaaaaaagtaagaagaaaatatgttccggttaatggttgggtgcatccgaatcgaaccggcgcaaaccaaaaaatctaaaggagatttgaggtgataaaaggaaatcagacattgaaccaaaaaaacaaaagcgagacggtggaaagaaaaaactggaaaagacagttttagcccctcctaaaagcaaagaaaaaaaagataataaatagcttcgtcgtcgtgatcgacctctgaaatccctaaaataggagggaaaatatattgatcgtagctagggttatcgactcttttgtcaacctctccatggactttttcggttttaacagacctcaggtctgcaaagaacacaaagtaatcttcctctccttatccttatggctctctctctgtttatcaattttctacgtatttaagaaaaacatctgattagatcgcttttgtactttttaggtgctgaacctgtttgctgataatcctgagatgaaagcctttttcgagaagatgctttgatttttttttgtttttggagatttgtagatgtaaagatattttcttcatcatgtgttgattgaataattattattattattatagttggtatatcgacgttgaaggattcgacacttcgcttcctgaggatgagatgaaggaggccttgactaatcatttcaagtcatgtggagtaatcgctatggtttctttccggagacaccctgaaaccgatgttgtcaacggccttgctactattaccatgatgggaaatgacgctgatgagaaggtgatgctacttaatggaagtgaattgggaggaaggaaacttgttgtcaaggccaaccctactcccagactgaaacttgaccatcttaaccttccctttggcggctcctctgtcccaggtacatcataagtttggagtctctttggtgttttcagatccagatacaatgcaacctgctttcttttcatcactcgttgggtccttatgaactgtgagacaatgaaaccccctttgggtctttctttctttgccatgtttaaatgtaagctccatatgtatgacgtttgtgtgtggatgattaaagtaagctctattatcattatctagtttgacatttgtgtgtggatcattaagtaaagctctattatcattgtctagtttcacatttgtgtgtggttgatttagtaaagtttttcaattatttatccagctctttgattcggttgtcaaaatctgctcagatttagtatctcgacttggttgtcttatgtgaaccaccagtttactgtgttactcaagacagactgagactttagcttgaggacctcactgcacatatccaaattcttagtctcttccttaggctctcagtgagggagatgcgaacttccgagttgtagctgtgtcctcctcattgtttcctttgcttctgcttcggtctttgtgtagtcttcttcctcgtagacagattttccggaattgttgcaccgtttcctctattttctacacaaggttttaggtgcgcagtctcagggttgtgtcttcttgaaaatgattccatgtactgcgtaactctcttctacttgtgccgctgcaaccgcctacttgttcccttgtttggacattgctaaataaacgcatacatacaattttggttaagagatatctaaaaatgtgttcctatcaacctttgtaataactcttctagattcttttcgaacccatgaatgcccatctcaacctcctcaagtttcttttgaagatcatcacaaaagcagcataatatcgtgaatccaaactctccaacatgttctcctaaggttttaagttcttcttaaaatctgtttcatcagcccgatggtagtcttgcttttgttcacttacctacaaaaatcacgcctaaatgccaaggttttttgcttgacacctttgcatatatctcatctaacaatctcattatcatagctttaaataaagaggtttccgtgaatacatactttaaaaatcctaaaatcatactcttaacatattgataaaggtaccataagtcatcacaagtaataacaaaagatcacaacaaatggcaaaatgtttaaaagatctgaagagatgttttcatgtccatgtccttcaatcctctttatgatctgaaaaaatgtattttgaaatatgaattacaaatctgttgagacaaaaacaaaccaagaaaccatatatacaatgctcaactgggctgagaatttaacttttaaaaccaagaaaccacaaacataccacactacccttttaaaaactatcctatatgttagatgcttattgcatagcctaattttgttttctcatggtgcagcaggttagtttcttgtgtacctctagatatatattctcttgctgcctagggttcccaagctgcccatttttttttttaaactgttccccaaacacccatccaataagaaaggtctactttgtagctcaaagctattagagttgtgctcgcgtcttggttttactgttttagttaccccatcgatggtctagaatatgcgaggtgactctcatggaggtaaagtgaattggtaattttgtgaagcacccaacataatggtaattccttacaaggttaattaaaagttttttcagcttgttgttttgctagatttattctagaccaatggatctgccaatgcaacttaggtgatgcttccaagtatacttgtgtgagcttttttcgtaaactaataatgtaaatggaagtgatttgttgcaaaggtgaataagtgttgttgccttagcaagaactaaagaagacagaaacaggttttgaaagagagccaagtgtgtgtttatggtagaaagagcaaagtagacgaaaggtgtacctttttgacttcttgtcactgattctctctcactcatccatttcatgctgcatcagaaaacaacataaggaatggttgacgtaacgccaagcattaggcgttgcttataaattaatacattcattccattactaacgtaattcagtagattctgactacatatgaagtcaatgtatgtatgtatctatctaatttagccaatgtatactctcttttaagtactttcataaatatggatacaactacttttttttatacatacatggactatatatcaaacaagtgaccataaatgatcctattctttttaacaaagtgtgaccatggttttcaataatatgtgacatgagaaaaatctgattcaaatgaacgatgttaaacatatttatttcaccttttcaattaactttgccggggatagatttatgggtaacaaatgtaacttcttgcgtgagaatccatcaacaaatggaataatatgttggatatacagtacttacccaaaaagtaaataaaagaagctcaaagcttaaagataccacttgtccaatcttgaagaagaatcaaacgatctctacaaattgaagatgaatcaaacttatccacagattgtttctctacaaaagcttcaacctcatatctctgaaaacaacacaattagaaagaaagattgtgagagaaagagatgtcgaaccaagattctgttcagttggatgtccaagaaagccatgtaatatccctctccctcacacatagctgcttcatctatatgtttttgtccatatcaccatatgtatatacatgaatatggtaaatgcaggtggtcatgggaaatggtaaagtgaaagtgaccatatcaaaaccagatggttttgttaccggaatctcttaccagggcgtcgacaatctactagaaactcacaacgaagatttcaatcgagggtacttagtgtagaatgtttgcttatacatgcaccagtctattactaaacttattacaacatatgaaatgttgtgtccaaactcaggtactgggaccttgtttggagcgatgaagggacgcctggaaccacagggaaatccgagcggtaagtatagatcgttccatcgagcttataacagatcaagtctttatataaatgtttataaacttggctgaggcaggatcaaaggcacaagttttgaagtagtagtggaaaatgaagagctggtagaaatttccttctcaaggaaatgggattcttctctccaagacagtattgctcctattaatgttgacaagaggtatgtcattttaatacaacatgcatttatgtgtgagtgtgacagagagtttgatttggatattgtatcattcaggttcataatgcgtaaagatgtaactggattctactcatatgcgatatttgagcatctagcggaatggccagcttttaacttgcctcagacaaggattgtctacaagcttcgtaaagacaagtaactaaagttcaatatcaatctttcccttaaaaccaatattagtatatactcatgtggaaagaaaacttgcaggtttaaatatatggcgattgctgataacaggcagaggaaaatgccacttccagaggatagattggggaaaagaggaagacctttggcttatcctgaagctgttcttcttgttcatcctgttgaagacgagtttaaaggagaggttgatgacaagtatgagtattcaagtgagaacaaagatctgaaagtgcatggatggatctcacataacttggatttgggttgctggcaaatcattcctagcaatgagttcagatcaggtggcttgtccaaacagaaccttacttctcatgttggtcccatcagtcttgctgtatgtttcttttctctcttcctccttgaaacatgttctcttatctatgatgatgggttcttacttaatgattgtgtaaacacagatgtttttgagtgctcactacgcgggtgaggatatggtgatgaaggtgaaagcaggggactcatggaagaaagtgtttggtcctgtctttacttacctcaattgcttgcctgacaaaacctctgaccctctttcgctatggcaagacgctaaaaaccaggtttatccattaaccaaccttctaccttttgtgcatattataaaaaacttatctaacattgtaggaagtggtgtttgattagatgttaactgaagtccaaagctggccttacgatttccctgcttcagaagactttccagtgtccgataagcgcggttgcatcagcggtagattactagtatgcgacaagtaagcctcacattccaccatttgctctgcttttcttcgttttactatcattcactcaccgttgttttcttatgtttttttgttaaaattccttcagatttcttagtgatgattttttaccagcaaatggtgctttcgtagggttggctccaccaggagaggttggatcctggcaattagaatctaaggtcagccatgcaaattatactcttagaccatataagaatatacatgtaaacaatgaacttatgcttgcatgaatttaacttatatacatagggatatcaattctggacagaagcagattctgatggttatttcgcgataaatgatatccgagaaggcgagtataatctcaatggttatgtgacaggatggataggagactatcaatacgaacaattgattaacattactgcaggttatattttctttaacttacaatgtaatcaagatttatattaggctgtatcaagaagtgcaagttaacttaacattagctacactctgcacacaaaaaccaggctgcgacattgacgttggcaatatcgtgtatgaaccgccccgagatgggccaacagtgtgggaaatagggatacctgaccggtctgcagctgagttctttgttccagacccaaatcccaaatacatcaacaaactatatattggtcatcctgataggtatgtccatgatcaaagatatcacaacattaaggtttcagattgttaaaacagtagagagctaaagtatggttgtacgtaagcaggtttaggcaatacgggctatgggaaagatacacagaactatatcctaaggaagatttggtgttcaccattggcgtcagtgattacaaaaaagattggttctttgcacacgttaccaggtaacaaatatttcacattttctaagaagagtaaaacaaagaagcctcacatttattttaaatgatgataggaaaatgggagatgatacatatcagaaaacaacatggcaaatcaagttcaagctagagaatgtacagaaaagttgcacatacaaaatccggatcgcgctagcaactgcaaatgtagcagaattacaggtgaggatgaatgatgatgacacagaaaagactactcctatattcacaacgggtgtaatcgggcacgataacgcgattgcaagacatgggatacatggaatctataggctttataatgtggatgtaccaagtgagaagcttgtggaaggagacaacactttgttcttgacacaaaccatgaccaccactggagcctttaatggtctcatgtatgactatatccgcctcgaaggacctcctttagattcatactctcactaggacttttagtcacattattgtatacgcaattttgtattgcgggttactttactaataaaaaaaaagacattatatgggccttgtgttgggccttctttctaatctcagatttgactttattacaaacgaaagggtaagaatgtaatttttcgccgactcgatctatcgctgcctatatatacagttacctgcaaaatctagggtataaaagcccctaattttttctccgcccaagagacaaaaatccttcgcaatcgagcaacggaagctcctgcatccaccgtccaaatctcttctaacgtcgccggagatcggtaaaccggttcttcatcccgtattcatctcttattgaggtcttagattcatctagcaccttttttttggcgtcgaaactttcagattccctatttgtaattagttgcgaattttgattcgacgatttgttgctcgaatttgaatcaacagatcgttggggaagtagagaatggcgacgtttgagctgtacaggagatcgacgatcgggatgtgtctgacggagactttggacgagatggttcagagcggtacgctgagccctgagctagctatccaagtccttgttcaatttgacaaggtttcaatttaacttttatttgactgatcttggcgtcttgattcgtttttgtggttttttttttctttcctctttttgatatctgtatgcttgttgtagtccatgactgaagctctggagagccaagtgaagaccaaggtgtccatcaaggtgattttcagttcttttaatctcttagtcagcgtaattgggtagaagaaaatatccagttcgtgaattgggtggaagacgattaagagtttctaaactatcttgctctattcggttatcgttaagagtttctgtgagtaatgggttgaagctggatatcaaataatttagtgttaaaaagttcaacttgatagtaagatgtggattcagttatctgcctgataaggttattagatttgctagcacaggaaatactaacactgtcatggattcaatcaagttcatagtttctttggatgtcatatatgaataataggttgcagattcccattcctagagttaagtgtcaaccttagattaagctgtatggatttcagttatctggctaggagcttatatctgttttacctcaagaaatacttgcaattttatgaatactctcgagtgttgtagactcgtagtttatttgtctggacgttgtatgttcttttggaagctgactgatcaattgtttttggtgttcatcactaatctggatagtcaaaaattgagcttattctttgctccgaagacacttttttttaaaaaaatcatatctggatctcaaaataagagaaaactttggcagatgaaacaatcagattcttactatcgtttcttatttattatttcagggacacctgcacacttacaggttctgtgacaatgtctggaccttcatattacaggacgcaatgttcaagagtgacgatcgtcaagagaatgtgagccgggtgaagatagtggcatgtgattccaagctgctcacacagtgagatgcaaattgtctgcagggaatttactttcctttgtactagattttgagttttttcactttgtaaactcagcacttgctatatatgttgagcacttgctatatgttgagctccatctgcagccatcaatttagcctatatgtaaattctcggcccaaggacataaggatacattctgttgctatgagaaagttcttgagcttcatcttgagttttttttttttttttttttttgtcaagagtgttacttttatatatataagccagtacaaaccgagtcagtacaaaagtggaggaaacaaccatgaacaaaagcatggactaaagcctaacctatcaactattacagatatgattaacaagaacaaacttgacaaacactagagaaggttaaacttgtatcataaacgaaactagtctaaaacagaatccaaaaggtgacctaatctgttcttatgaccttttatctgtaaaattccgaaccacttgatattgatttggacaaaactttgtctcatggaactgattggtctcaaagccattggttaatcttagactctttctttctcttggctcacttcactctcctttttttaggtgagagtgagttattatatgtatgtgtcatttttgccttttcagatgccttacttaaccaacgcagaagagaataggattcctgcaagattgtttctgtgagggttcttgtctgattctggaactttgaagcatagcggttgatgtcccttttttctctcctctgtttcaaagccacacggcacttttggcacctttatcctgtgagaaccaagtgagtataatcctttggtttataatggaacagagtctttgcttttctcgagttctctcttatgctgtacctgtgtaattgatgctgtttacaaaaagttttttctttgatgcaggaaactacttgtgtgtattttgaagagcttctatagatttgatacgtttaacgcataaaaacagctcaagtttgtgaagtggaacaaggtaaacatatggaaataagttggctggactatacagtaaatgatgttgttgttactccgattctgttccaagatgacagtaatgatcagtggtccatcaactagaacttaaattttattttttggaactatctgagatccttcataagtttagttgaggctcacctgttacctcttttttatgaatagctgccatggcaacctctaaatcccaacaattccagctaattgaagggatggagcttcaggtctgttctttcttctgtcctcctggaatttaaaatatcagattctggacttaatcttacgtatcgataatagatcaccgtcactggattgccgaatgggagcagtgtaagagctgagtttcacctgaagaactgcactcgcgcatggattcttcattggggttgtatttaccaaggaaataagtgagtaatggatgatctataagatagaatttatacttcaaaaatatctgtttgttttgacttatgttatctacagccattggtatatcccatctgaacattcctcgaagcaaggtgcattgcagactacctttgtgaaggtccctttcatttcttgtttatctacaaggtttttctagaagtccatatttttctgcaaagtgtttcttcccaactgcagagtggggatgcatatgtagtgatccttgagttgcgggatccaagggtacgcgcaattgaatttgttttgaaagatggtagccataacagatggtgcgtatttccttcttttctataacagagtcatgcttgtgacttgtgagggatgaacgggaatgcaccttgttgcctaatggaaattttaggttgagacagcataatggaaacttccgtgttgagattccctggaatgatctgcatgctcatcatcggataccgaagactctgatagaaagaagagcacataagatatgggaccggaagggacgaccacaaagctctgcacgtgaacaacaggtaaaaattgctttaatgtgtgctttagattagctcatctatgtgtttatgatttgtaaaggctgtctctcttttcttgcatgtgtcatttcagatagactatgacaatgcagtaagagagctccacgccgagctcgctagaggaatatctttagacgaacttcaggctaactctacagtaccagtggagaaagaagaaaccagtgagccacatcacacaatgatccaatcatatcgccggaagcatgatgttcagaaatggttacagaaatatacggaaccaatcaacagaagtggaagtgtgaaaagttcagcccttgcagaactctccaagagatctgtgggccaagaaaatctagtttcacagaaaagctttcatgtcagaaactacgagatcacggttcgttttattatattttttgttcaacaagattttgtaaatattgttactctccaacaagattttataatacaactacttcgtacagtcattttcattattggtagttttttaacaacttctagataatatctaggtcctccaaagggatgttaagggagattgtcgcttatggattgccacgaacatggcaggtccaacagttctccattggggagtcgcaaagtcatctgcaggagagtggttggtaagatgttcttgcttctgtagatattccttaatagaatcttctcaatcagagaatgatttttataactctaaatagataccaccacctgacgtgttacctgagaaatcaaaatttgttcacggagcatgtcaaacacaatttaccgatatgtcgagcagagaacactcttatcaggtgaagcaatatttttacaaagattaccatattttgttgtaaagtacttttatcctaatttatctgaatttactaacgcatcaaatctttttcacattggaaaagtttattgatataaatttaaaacgaggtggttttgttggtatccaatttgtaatatggtcgggaggctactgggtgaacaataacggagccaacttcgttgtaaacctgaagtcagcagacagtaccagtggtaaggtgagtaaagtcatcacaccatcagtggaatggtaatgttggaatgctctaatcactaggggagttcgcttctaaacatgcttattctcctcagcttgacgtggatgaaaagtatgttctcaaatggttacttgatgaaatatctgagcgagagaaagaggctgagagatcattgatgcacaggtaagtcaaagtatctagatcgttatgaatctgtataaactagttttcctttttaataatgtcagtgaagtttcttataagcatagcttggcaggttcaacattgcaacagagttgaccgagcgttgtaaggatgaaggagaaggtggatgtattggtataatggtgtggatgagattcatggccaccagacatctcacctggaataagaactataacgtgaaacctcggtagagctattgttccattggctacttttgatagttgatcctttttgttctttcttttaatcagaccttttctgcagggaaattagtgaagcactagaaagattcaccaatttgatggagaaaatatatttgcagcaaccaaataagagagaaattgtgagactaactatggcacttgtgggtcgtggaggtcaaggtgatgttgggcagagaatccgtgacgaaatccttgttattcaggtatatagttcaaaatctctgcaactaaaacttttccttgtcttgttagagtagtttgtctttgtactttctttcttttttgttttaacattttcttgtctttattatcttttgttagagaaataaccactgcaaatccggcatgatggaagagtggcaccaaaagttgcacaacaacagtagcgcagatgatgtgataatttgtgaggtaaagatgcttccatttgaagtaagatactcacatttagtgattggtaaataagaggaagaataacatctcagataaagttgaaactccattctaaaactcgctacttcttaaaaagcagctaactagctagttcagaagtttagtttcctgttgtaaatatctgatgagtttatttcttctgccataggctctcttgaactatgtgagatctgacttcaggatcgatgcatactggcaaacactacagaccaatggtctcacaaaagaaaggcttgcaagttatgaccgccccatagtatcagagcctcgtttcagaagtgattctaaagaaggactcatccgtgaccttacaatgtacttgaaaacattaaaggtataccacttgcagcctagtttcgtttcctgatccattgaagaattcttaggagcaaactgtaatggttagttagcttagtaatgatgagaatatttatacctctggcctctattagataataattgctttgcaatttcgacctacattacagaacaatattttgctccattttctactttcagtatcttgaatttctaaacaaactgtttgtacctgcctctgtaggcagttcattcaggtgcagaccttgagtctgctattgatacgttcctttctccatctaaggtaattagttcatgattcaaaccgtcactttgattttcttgggacacatatcatcatcaagaacggtatttatgttaagagtaatacctcatcctttcattttcttttccagggtcatcatgtctttgctgtcaatggtttatcaccaaaattgcaggttcgattttctcataccatcttcctaataacatattttcatactattatacattatatataaagacatcaaaatgtctaacagagtggcaaattccattgtatggtaggatctactgaatttagttaagaggcttgttcgcgaagagaacactgagcccctaatagaggttttaatagcacatcttcttcatattgccagtcttcttcctcttattgttgatttattttatccttatgcttgctttgtttttatgtacttctgcagaagttagttgatgctcgcattcagttacaccctgcactacgagcacctcgcacgagggcaaaagatttactatttttggacattgcgttggagtcatgttttaaaacaacaatagagaagagactcatctctttaaacttcaataacccaccggtaactgttatctctgtagtttttaactatttactttcctttgtagccaaatattagtctttacaccaaagagtaaggtatggattgatctgctttccgtgaacaggaaattatatatgtcatctgcgtggtgcttgagaatctgtgcttatctatagttaacaatgaagaaatcatattctgtacaaaggcatgttatttcttctcccttcgtttctctttcaaagtttgactctcaatgttcttgtatgaatattaattgttattctcttttgcgcccaggattggtaccgtgtcagcgaggcttacagacctcatgatgttcagtgggcattgcaaacaaaagcggtccttgaccgtttacaactagtacttgctgatagatgtcagcattattttacaataatacagcctactgcaaaatatcttggtcaactgttacgtgttgacaagcatggggtacattgcagttaaactccaacttcttctttatgtaagaaagtctaaaagatatatttattcatttgggtttcttattttttacagattgatgttttcactgaagaggttataagagcagggccaggagccgttttatcaactcttgtaaacagatttgatccttctctaaggaaaatcgcgaatttaggctggtaagatatgttttaccatgaatttgaactaaagaactatatttagatttgttccttgtagaaggtgattactgaaccctttatcgtatttttgctctaaaccaaaatggttctggttgagaagttggcaggttatcagctcggctgatgcatatgggtttgtggtttgtgtgaatgagttaattgttgttcagaacaaattctactcgaagccaactgtaattattgcaagtaaagtcacaggagaagaggagatccctgctggtgttgtagccgtgctgactcctagtatgattgatgtcttgtctcatgtatctattagagcaagaaacagcaaggcatgttatcatcagacaatgctgcaaaaagaagaactaggatcttcacaattttttcagggaactcatcttaagttcgtctgatgcagatatgctttgctacatgcttcgatcagaatgttctcagcaatctgaagtcgaaggaagggagagcaatatctattcatacaaagtctactggtttagttatcaggtaatcgaactcttattatgtcactgttctttacgcttagagaaggagtttctaataactctgaaattatatcacttgcagtgatggcaacaactctgatgtctctgttcgtcatatttttatttcctctgttccacggggagtgatctctaaggggaagaagttttgtggccactatgtgatttcatctaaggaattcactgatgaaagggtaaataagaatcaaatacatgaagataaaagttttcattttgagaataccatttggattttcatttctatgagatattttaggttggctcaaaatcatacaatataaaatttctacgtgaaagagttccatcatggatcaagatacctacctcagctgctcttccattcggaacatttgagaatatactctcagatgattccaataaggtataacctttaatcatttgcttctttctggaactctctaaaagtaatccaagggacggctcctcactgagcttgcgatccagaagtctcttaaatagatttggtgatccatcgcttttcaggatgtagcacgcaggatttctgtccttaaagattctcttaacagaggagacctgacaaaacttaagtccattcaagaagctatcttacaaatgagtgctccaatggctctggtaataactgggcatataattgtctttctttctctctgttcatgttccatgtgaatctcatgttgggttttgaactctttggtagagaaatgaactgatcacaaaattgagaagtgaaagaatgccttatcttggtgatgaatcaggctggaaccgctcctgggtggcaattaagaaggtaagaatctctttgaacgtttgtgtacttatagttaaaggaaccaagtgtttccctgatctccacatctgcataggtctgggcttcaaagtggaacgagagagcttatgtcagttgcaaaaaaaataagcttgatcatgatgcggtctgcatggctgtgctgattcaagaagtcatttgtggcgattatgctttcgtcattcacacaaacaatccggtctctggtgactcttcagaaatatacacagaggttaaagaactatctccagtttccacacttttgagtaaataatatcaataactcagttatcaagaaactggcgttctcagattgtgaagggtttgggagagaccttggttggagcatatccaggacgagcaatgagcttcatcaccaagaaaacaaacctcaagtctccaaccgtaagaaacaaacagatcctagttggctcttaagttgagttatatattaaccgagtgagtggggaatttgggttgtacaggtgatcagttacccaagtaagaggataggtctgtattctaaaccctcaatcatattcagatcagattcaaacaacgaggatctcgaaggcaacgcaggcgctggactttacgacaggtttgttttgtgtgtttctctctgtttccgtcttttatttcggaactcagaagctgaaagggttaagtgctgcagtgtgataatggatgaagcagaggaagtagtggtggattactcaagggagccactaataatggacaaatcctttcgagtgcgtctattctcagcgattgcagaagctggaaatgtgatagagtcaatctatggttgtcctcaagacattgaaggtgttgtcaaaggtggacatatctacatcgtccaagctagaccccaagtttaagctctctttttctacttgtaccattccctaagttttcaatcaaatcttataattacaagctaatcttttatatgtttgctattacacatgtaatatttctacatcatggcacactcctgatacaaacaaacatgattcaaagtttcataataaatgattgtgtgataaaaatccaaaactcgtttaaacgacatcgtatgaagggtcgcataagcgaagaaggatataaaaacagtcgccgagaaagtctcccgctatggataccgttctcatggctacaacaccaccaatcagatgtcttcatgcttcaattcctacggtgttccgttcgccggcgatttatcaggtcagctgccggagctcccaactgttttcctaccgttcgacgactatgatgagcatgtgttttctcagacggtccgatttgagatctcgctttcttagtactccgaaaaccacttctccgatgagacgacctcgcttttccgtcggtgcttctacggaggagtcttcaattccttctaatcggaaccttatcgtggctaactccgtcgtaatcgtagctttagctgtagctaatcgcgtgctctacaaactcgctttggttcccatgaaacagtacccttttttcatggctcagctcaccactttcgggtaacttaaacaagagtggctatgaaagaaattgggcagtgaaggagcctagcttagattatgataaatgaatggtttttggcagctacgtcttgatttatttcaccattctgtatacgaggcgccgtctaggcattgtgacgaatgaaatgatggatgtacccaaatggagattcgcaatcattggttttctcgaagctcttggtgttgccactggcatggctgcagcaggtatcccatttatagcatgattgaaactttacatatttataaggttacatatggagtgattccactctctgttgcagcaatgcttcctggaccagttatacccattttgaatcaggtcttttggttttatgattatcttcttgctcatttgttctcatgggggtgttgaactcatgcctcccaatgtttggcagacatatttggtgtggcagctgctttttgctcttcttattttaggcaggaggtttttgcttaaccaaattgctggttgtctccttgtggctgtgggggttgtggtggctgtttcaaggtattccttcctccctcttctcttcttctaaagttacttttatcttcttggatctggatgcttgatcttggggtagagaaatgtttgtgtatccgtggtcatttacagattatatcaagagagtgctttcagctcttacaatctagaaaactagttttcatggaccagagtcacacctatcaaattcaccatgctaaatgaatggagacggctctactttagtatttatcatccacatagcaaatagaaggccctgattctagagaagcttgtgtgatagtgatactttcatttttgtgaatgctgactgtaactcatctgcagtggatctggtgcagatactacgctatctggaatcggtttcttatggcctgctgtattggtagcatccgctgcttttcaagctggtgcatctatcataaaggtgaaggtcgctctctcttatgagttgtgaacatttctattttattttcttttgccaagacccaagttgttaagtgttttgtctgttaacaggaatttgttttcaatgatgctgcaaagcgtcttgaggtatctcccttatcccctgcatcaaacaggaatgcttttctttcgaaactttgctgaattaactctaagattaactggtggatgcagggaaagtcactggatatatttgtggtaaattcatttggatctggatttcaggtatctactactacaatatcatgttgtaaatgtatttgttacagccaaaacaattagacatgcttctccattacatcaagagtacgtgaagaaaacatttgaaagctgctttcctctgttattcacttattatctctctcctacttgagaagagtttttgttttttggtttagtgttacggatcactgaagctgtgcttgtgcaggctctttttgtgttcctgttgttgccttttctctcaaacttgaaaggcattccattcgccagccttccttcatatctaaaagatggtgccggatgcttcttcaacactggagctaagatttctggttagagaccattcgacacttgtttttttttccttcattgaattttattcactgctaaaactttgtgattatccatttgagaatttcaggctgtgatggtgcccctatactcccactgctctatatatccaccaatctcgctttcaacatctcattgctccatctggtgaaaatatcttcagcaatcgtttcctctcttaccatgatgctctcaggtccatatttctatccttccatgcaacgcctcttaagtgtcaccaaatactcaaacccatatgagataatacttttggtgttgttgtagtgccattagcggtgtacataatgtcaaaaccattgccgtatctaccgggaggatcaagcttgagctcaaattttacgatggggtgtatagttcttgtcctaggtcttcttctctacaacattcccactactccaactaaacaacacaccaagacctcctaacacactcactcaccattcatcctttttgtgcattacttttttttttgttgataaaccaaattcgtgtaatttcccaattttttttcctttgaccatcaaagatacatagaatattctcagatattttttttacgtgaaaaactagcttaaagaaaaaaaaaaaaaaaaaagaataacaagaagagaaatttgtgattggttaaaaatccagtaaagtagagtcgtcgggtcgtctcggaagcagtgctgcgattttacctaaagtcaccttttttttttaccgtcgggtgaattcgacgacggtcctaatctcgcctcctccacacgcgccgatcaccatctctctctgtaatcgctcttctcgatgtcaactatttccttcttcctttgctcttagggttagggtttattttgttctttctctatatccttcaatcaatgtgaaaaaaaagctctcccttttggcagtttccgatgtttggtcgccattcgattatcccaaataaccagattggtaccgcctctgcttccgctggtgaagaccatgtctctgcctccgctacgtctggtcacattccttacgacgatatggaagaaatccctcatcctgactctatctatggtgctgcctccgatttgattcccgatggctctcaattggttgctcaccgatccgatggctctgaattacttgtttctcggccaccggaaggggcgaatcagcttacgatctcgttccgtggacaagtttacgtttttgatgccgttggtgctgacaaggtaattctactctgtccctcttttgttatttgtgtgaagtctcgatggatgcatctgaaacataacatctgatggcttagggcacgtaacgattgcctcttttgcacctttgtgcttttgctagtcttaaccaaactttggaaattgatttcgtaggtggatgctgtgttgtcgctgttgggtggttctactgagcttgctcctggtccgcaggtgatggaactagctcaacagcagaatcatatggtaactttgttatttgtgttcaaattctgcttaaattgtcacttcatctcgattccacctttttcagtttggtgttatttttagcctgttgtagaatatcagagccgctgtagccttccgcaacgggcacaatccttggataggtttcggaagaagaggaatgctagatgtttcgagaagaaagtaagatacggtgttcgccaagaagttgccttaaggtcagtgtgtcagtcttgagttttaccaatttatgccaaaagctgttactctgaacaaaattctttcaccttttctgggataaaaatttagtattcttgtatagctaaactaaaaattttctactcttctggctatgctctggttgcttaactacttcctcactttcgtgtgctatggattgaaaggaaatctgttcatattcaactagtttactatctagctagttttcttttatttgtttcaagaagtttggtgaccatgtaggtgtttatgtagagtagtaggcttcattgtccatggcttgctgtagtatttgacaatatggttgtagttgagcaggatagacatctgagtctttgttagtgtgataagtagcttttactggaaataatcgacatgtctatttcaataataagggataggatttgtcaccttctctgcctctctgacctttgttagtgtttatcagaatggcacgtaataaaggtcaattcacctcttcaaagatgacagatggggcttataactctggcacagatcaagattctgcccaagatgatgcccatccagaaatatcgtgagttctttctcttctctgccaattaactgttcctgcaatttttgttttccactaatgtgggacattttgtttgcacttattttaaacgtgagtgtgtcttatgtaggtgtactcattgcggcattagttccaaatgtacaccaatgatgcgacgtggcccttccggccccaggactctctgcaatgcctgtggacttttttgggctaacagggtacgtatgaaagacaaagtgatgataaagacatatataatatgttcactatgttcagttcataagatactgatatagccaagaagtttgacatttagaattgttcaattcttgtagggtacattgagggatctctcaaagaaaacagaagagaatcagttggctttaatgaaaccggtaagctcttataaatatcaccctgtgtttctggttggtttatccacataaggcggagcttgaatcatcatcgcttatttgtaggatgatggtgggagtgttgctgatgctgctaacaacttaaacactgaagctgcaagtgttgaagaacacacttccatggtttctcttgccaatggggataattctaatctgttaggtgatcactaaatactgtgataagaatcagaagatagaaatctttgtagaatcagatggtcttctctatgaatttatcttttcaccatcacatgtattatagaaaccgtaaccgaacctcaaatcaaataccatatcagatgtctttggtttcagagtttgttactatgcttgcaaccatacccattgacatggtgtggttaaaaacgttaaagtcgattctgaggggaaaaaagtttacttattacgttacatcctcaaaagatatgatcagattaaaaagacttatcaatgtctcatacataaatcaaatactaatctactcaaaacttgaaaggtgatttcttcttctttttggttgtattgaccaactaacaacactacgtatcaaaatatccgaaaagattttaaaagtttcattggaatgggacaatgcatcttagatctcaatcctagtttacaagattagtttattagaggatgtatgcatacgcatcatataccaaaaccatgtggattactaaatcgggctcaggaccactaaatagattagattatctacaaatcacattattgtgtacataacaaatagaatacattatataaatcacacaaaaatgtatcgaagaaaagagaaccgtcgaaccagtttgatggtaatcaactaagataatgtttttttttctgatgtcaatagtgtttgtttatgaaggaatttatgatgagattattcgagaaggagtcgctttaagtgacccgatcctcgtgacgactcgttgctctttctttctttattatagattatagttgttcaaacaaatgaaaagtatctgagacgaataaattaatgggtggtctgtttctgtactataaagaggtccatgcatgtaccatatcatcttattatgtactattaaacaaatagattaatgattatataatgttttccgatatattgaaattagtttatgagtcacgagttaaatctgaaggcttcaccaaacctaaagttaaaagtctcaaaacagttaaacactcttgtgatatcatccctgtatataatctttaatgaaaacgtagaaaaaaagattatttgcaaccagaaaacatctgaacaaatatccatttctcgtggttttatgttaaaacatttgtcgtgttgggaaataattgaaacttttattttccaacattgaatttttctttatgttaaaagtgatgtgaactttgtataaaatgaaggaaaatttaaaagcactcccctatatgcgatgcgagaaaagggagagaagatatgtatgcacttgtttcttgtcacgttccgtttccacaaaatcagtagatatgccagtaactgtgttatcttcttcttttcgtgcgtctgtatccaggagacatataaatgatgctgaatttcctaactatttttaatttataaacatgagaagcgttaaatgggtagcagcaatcaaacgtttggtgcttaaaagcgcttatttgaagtataaacaatttgatatttataagataaaacagcattacatatgaaatatcatgattcataactatatatgcaaaatttgaaaacttctaaatcccaaaattacacaaagattaactaaactacattataatttataaataaataaaaagattagtatcaaaactaaaacgttaagaaatatcataagtgatgattagacgacagtcaaaatgttaaatttcatgatgaaaaaacaaaaaaaaaagagtaatttgtccaaatacaatcagctgactatatattttgtcaaatcatatatcatatatactaaaactaagaaaaagataaccatcaaaccaattcaatttatatccacctacatatgactttgatacattttttgtgtagtttgatcagtgataagattttcaatcctctatagtaataaaaattgctaatttcgataatttaagagataattacaaaaccaacaagcacctagacacccctaagatctaggagaatgcatcctccttagtcatcacttccttataaagtaaaactataaaaactgagatcacgagagaaaccgagaaagagagccaagaaatgcatgagttaggatgataatccacgtgtcactatcctattgcatgaagagtatacgtgtaagctcgtcacataaagtttccctcttcttcttcctcagagtttttaattggccattttattacttttccataaataataatataaaaattcaaaatatttaattccccatttgctgttgtctttccttttcttcttcttcttcttccttccttttctcgtgcaatctccaacaccttgactacgcttcttcatcccaccaacaaaaaccctttctctatcaaaaccaaaccaccgttagtttttctttcccggtgatacgtttagatagcttctttttttttccggtggttaacgttgacgattgactacttcaattctaaacggataagtattagatagcttcctcttcttcttctccagtatctggcgacgaattcaactagagattattttctctttttcttgtctcctcttgatcgtttgtttttgtttgtatctggattcaatgacgggatttggttaaacgaagaagattcatttctctgttcgttcgatctgtaaatttttgctttcagagtgagattttaacgaaatgcctcaccggactacttacttctttccgcggcagtttcccgatcgtggattcgattcgttttcgcttaagaatgatcacgacaagaagaaatcgtcgtctaacgttggagagagttttggatttcaaagagataataaatctaatggagtcggagaagattctaacaaggagaaggagagtactgtgttctcctctaatcctctgctttctaaaagctcagccgtttcagatctctttagcgatgatcgcaagtcggagaagaagcatcagcagcaactagccgctttctatgagtggttggcggagaagaaggctaatctctctaggtcatcatctactactactactcatggacgcggggtgaagcccacgcgcttctctatgtctagcgacgccgatgaggagagagagcttctgttgtcttctccggctgatcccgctccgcttcctgctacttcttcgccggattctatcattgattcggctaggacggttaacatacatgaacgaaacattgatcggagctttgacagagaggtttcgcttccccgaatgtcgagtgagagcagcttcgctggaagcttcttctccgggacgacggtggacgggaatttctccaatttctcaagtcatacagacgcaagggaaacttcgaccaccacgcttgtctcagtgaacaaagaggaagaagaagttgaggttagggaacagggcaaagagcaaagcttagcgcagaagtcaagagaaggctattacttgcaggtcacgcttgctaagtggctaagttctcaagcaaacctagcatgtgagtctgttcatatacagagcacagaatctatctcctaccgtttttgggtatgtagtcgtacgtatgtctcttttaacttttgtctcaaatctaggtcggaattgtgatttttattctgtttttttttttctttcaggtaagtggttgtttatcatacagtgacaagatatcagatggattttacagtatattaggaatggatccgtatctttggttgatgtgtaacaattctgaggatggcaaacgaattccatctcttttgttactcaaggagactgagccgaatgatacatcaatggaagtggttttgatagatagacgtgaggactcacgtcttaaagaactggaggataaggcacatgagctgtattgttcttcagacaacatgttagtgctcgtcgagaaacttggcagacttgttgcggtctatatggggtacgtacacttcttgttcttgtttccacaagtattcttcatagttgtgcatatatatataagatgtgtatgctgaggttatggagcttttagggggaatttccaggtggagcaaggtgatctccagaaacgatggaaactggtcagcaatagactcaaggaatttcggaaatgtatcattcttcctataggtagtctaacaatgggcctttgccggcatcgtgccatcctatttaaggtgagccatgaacttacatagtaaaagagaaagctagactgttttaaacaagaaacatttgtccaaaatattggatattgacttgcttaccatgactatgcagaaattggctgattacataggtttaccatgtcggatagctcgaggttgcagatactgtaaagagagccaccaatcttcttgccttgtcaagattgacgatgacaggaagctttcaaggtttgatagtgttaaacctttaaagccttcccattggccgtttttttgtctccctctctatgtacttaactacagccagattcctcagtgggtttacataagtagactctcaggttgttagcaaatcactatttgatgcctccacttgtggactttcagggcatggtatttaggaagtctatacctgcttctatttaaaacacctattgattctttatgttttactaacagatgggtatctactctccagggggtctacttgtgtatgtccttgattctgtgctttacaaatagttgctagctctggagtaccattgagttgttttgagcttatgttccacattttgagtaatacttgatatcatttctcaacagggaatatgtagttgacctcatcggggaaccaggaaatgtccatgatccggattcctctatcaacggtgaaacacagtgtcagattccttcacctcttcaaatgagtcatcttacagatttttccaggccttgcgtgcatagtacatctccttgtcagactgtagagtcaaagacttcacgcactctttctgaaaacattcaacgttcaggtaggctgcacttagctgaatatgtaatgtcataattatacgaaattgtcggtccatagtttgtaatacaatcagctaactgaattcttgtagggagtcaaggccaagtacacaaagaatttgagttgcctgataacgcagggacagtatgttgtgctcatattgatcaaacttgctgtgcaaaagtatcatcaatggttttgacagaatctgttcttcgagctctaccacttgatataccaaaccttagtgaagaaaagattgccccacaagaaacctgcaaagaagaaaccgttctattagaagatccaacagctatgaagcagccaaacttatcagttgaaccagagatagtagaggctgacactcgaaaagataaaaaaggaaggttacctgttgacgccatctcaccttacttgactattgaaccttctttggcatcagattggctggaggtctcatggaatgaattacatatcaaagagcgtgtgggtgctggtatgtccttctatgacttttgagtgtacaaaagattttctgatgtagcaccatgttaacaaagtctcttatgaaattttctctattatttttttcaggatcatttggaactgttcatcgtgctgagtggcatggatcagtaggtttcaactctaaaaaagatcatcatttaagcttggagtagttttgcatgcacaaatgctaattatgtttttgtttatgaaggatgttgctgtcaagattttgtctattcaagatttccatgatgaccaattcagagaatttctcagagaggtatgtaagcaagcggttttctctctttttataactaacttcacttggaacctctctgaaatatctcaatcctgtgattttgattgaaggttgctataatgaaacgtgttcgtcacccaaatgttgttctcttcatgggtgctgtgacagagcgaccccggttatcaataataacagaatatttgccaaggtaaacctatctcacatagattttcttgaaacgcttacattactaagtagcttatgtttccatcttactccttgagacagaggcagtctttttcgccttatccataggccagcttctggggagttgctagatcagaggaggaggctacgtatggcattggatgtggtttgtgctattccccattatgttaatgttttgatatatttctaagttaaaacatataaaaaatatatgtgtcctttcttggaacaggccaaggggctcaactacctacactgtcttaatcctcctgtagtgcattgggacctgaaatctccaaatctactggttgataagaactggacagtgaaggtaacgatgttaaaccaataaaaaaaatggactgctacaaagccttccatcgtctgtttctgtaacatatcaaacttgaccttgctcctgtctcaggtttgcgattttggactttcaagattcaaggcaaacactttcataccatcaaaatctgttgcaggaacagtaagctctcttaaaatttaactactggggatatgatggaaaaatatgttctgacatgtgaacttcttctctttgatatgttttaacagcctgagtggatggctccagagtttcttagaggggaaccgacaaacgagaaatcagatgtttacagtttcggagtagtcttatgggagttgattactttgcaacagccttggaatggactcagtcctgctcaggtaaccaacaatctctcccctttggttttcacacatgagttatagtacaccattagtattagagttttagttttagtattatcttttgagtcttgcatggtctggtgattaggtggttggagcagttgcattccagaacaggcggcttataattcctcccaacacctctccggttttggtatctctaatggaagcttgctgggcagatgagccgtctcagcggccagcatttggtagtatagtggacacattgaagaagctactaaagtctccggtgcagctgatccaaatgggtggagacaaaggggtaattccaactaaatcagctcccatactatagtataaatacttaacttttacggtgctaacagaaacactgtaggtgctttgcgttgattagctcctgaattcgattttaaattagaaaaatcaatgagacgagagaagccttacctggaagaatggaaggcttttttatttttattttggtttttgtttgtatagtataggttttatatgctgttacttacttgcgagacaataaataaataaaatatgagatttggtttcttgctgttccagactgttgcatttgttgtaaattttgtaatccttgtatgttgttgtatgccatcaaaagttcaattaaaagttgattggtaaaacaagaggaacaaagatcaagttgtttacatgttacttgttatcgaaccaaaaccaatatttatataggtagattcagtctgaagaaaaatattcagatttttaggaaatatcaacccaaatttggtaaataaaggtcatcaataagattgctaagaaatatcacaacaacaaagatcatcaagataacctaaattgctttgggaatttgatgatcgaaaggtaaagtaaacaaaaacttggcctatgatctaattcccaagtttcttctggccatcgagccatacaagctttgggacaacctggaggacaaaagagctgaattcctcccctgcaatttcatttcctgctatatctaactgtttcagattcaaatctgttaacacgcaatacgcatcccagtacttcgtaaccaatccaggattctgttttcctacatcatcctgacccaactctgaattagagagcggtgaagaacaaaggtatctagttgtgtccactgagtgcttgccaatgtggttatgtgaaacatccaacactttcagctgcttcacatgtcttagagagtccagcgctgaaaaactccggattctgttgtgactcagatttagacaagagagaagttgcattgcctccaatcctgcaagaccaacatacaccatttagtcacatttaccacacagatgcaacatctgaaatcgagaaacttaccttcagtggaatgaagctcattgtgactaaggtctaacatttggacaaacagcaacttctcaacagaggctatccgagatagtgataagttatttagccgtagacatacaagattgttcatatccctatatcgcaaaaggtgtcttgacaaagattcactgcttgaagtcacctgcatgaacattctctttatgagtagtaggcatgatgaaacagaattaaggaaaaaatctagaatcgaacaatcaactttatactgtagacgagaatcggggaaaatcataactccgatgaaaattttaatagcaaaagtttaacataagattcacagcaacaaggaagactaagtaccttgtggagaaaagctttgctgtgctcatccttgtagtactggtagtgtgaagaatccagcgccatcaaatcgttatacagctgaaggatttcttcatagtgaacacccttgacagcatcatccgataccatagcttcacgagccatcaaaagccttgcaagagtgagctttccaattttgctataaaggaaaaaataacacaacgtttaagactacaatttctctttccaatcaaagagagaaagtatataggatatatacctgtcaggcagtataccgaaacattcaacctcagaatctatagcttcctgacgccatttaaaatccatctcagcatttaaccgatccaaggtgacaagagaattcaaatcctttgacttcgcatcccaaatatcaaatccatccgtccatgaaacaatgccttcttgagaatcttcgacggtatcatgaacatgggctgtaaagacaaactcataaggtgcgttgaagttatatcctctggaagaaacgattcctggagagttcccaactctgatcttcactttgtattcgcaaggatctgaactgacatatttcagacgagcaacccatacacaggacacctgagaatttttgttcggaattggttcccaaacaaggccctcgtttccttttagttcagaatcaattgtaacagtagatgagcttactccaccaacagcttggtcaaagtagagaatcagtggaaaagaacccgactcagaacaaaaagtagtgaacatagatgaagagccactcaagcacccagctccagacagaatgatacttgaaccatgtgaaggccatgaggaagtgagaagaggagtctccacattaagagtttggtcaagaagccaaagatgataaaaccagccactttggtcatctggttccgtaaaaatagccgaatgtacaaagtcatattcctcaggaatctttatatttggcataaacccatcagcattttgtgccaacaaacttgatagaagtacactgcagaatgtgaacaaaaatatatagtaaagaatatgcatacctacgattatgctaaaaaactatttctgaacatgtaaatcagtaaagtataatatatactaaagaatatgcatacctacgattatgccatgcagaatagttgctgaaattgttattgatcatatcatctgtatactgcaactcatcctgttctgatctgttggttagctctacaacaaacctggaaaggaacaacacattaatatgcaagctt

SEQ ID NO: 621 - DNA, 125803 bp, Arabidopsis thaliana
gaattcttaggcatagtcgagatgtttaccttgcctaggggagtcttcttccaacacaacacatcagtgtcatcttctggcctgcacaaagtcagaggcagagtatacttgagtagctagccaaatcacaaaacaacttacttttgaaatgaataaatatgaaccatgttttaccttttttcacccggaggaatgtgtggagtacacatagcagaagttgcatcgccttgatcactggaacagctcatacgcgatgatgcattggctgaagaacgaacacttcgagccctcaagacatttccttggcaacttctcagagaatttgtaactgcaggcttttcagatgcgcagtcagagtcggttcttgtagtcaaatacgacttgtgaagcattctacgagaacaactgaaaagtccaaagaaaagacttgctgctgctttagcactctttggtggagaacacgcagagataacaagattcatttggatctcaacgttgcatcctaacacagattggaacgagtctgcaatcaatttccatgatttctcggctcttgctacatgttgaggtgtgtagaattctaactcagctattgccacacctgaaaagaaaaaagaatatgcatttacttatctgagacacaagccaaagtaaaactttcagaccatctttgggaaatataagttacctttgtcaacagtaagtgaagtcaaccttcctcgtttccacagaaatctctttagtgaatcagaacaacacaaatctgtaaccgttttccacacagattcaactgtttcattacagtttctctcttgacccttctcggcatctgatttaataacatcaccaggacaacctgatgatgtgctggagagctcaacgtctagatacatgaccaagggtaagttatatatagttagtaaccaagacaacacgaaaaagaagcatgaaataaaggaaacgagaatttatgaattaggacctttgtttatttggtttcttccattttcatctgttgcaaaagatgatgagtcggtgttactaagttgcaaaagtgccacagtgagccaagttgtctggtttttcgatgctctcaagtgtttctcagcatcagatagtatcttcaatgcatttctcaatttctgcatttcttcttcagctatatatagtagaacagtatatgataaagagtgagatcaggttttaatttgaagctgatattcaaagtaatcatcactggggtgcttacatgtatgccttgtaagaaaccgaagtctggttgctgaactactttcttgagagtttccagcaatgatgtccataatgacattagctagctgtgaaataagctgcattggatctattttggatctcataagttccctcgcccttataaccgtgtttgaagtatcagaagacatggcaagatcaagcagatcaagcaattcatcatcagaaacaaccccaatctgcagaatcaaagaaatgttgatctttcacttctaaactatctaatgtttccaagacaaatatgaagaaagaagtgtaaacttacaagcttgtaggccaaagatgttgttattcttttaccgagcaaacttaactgatcaagcattatctcagcatcccgaagtgaaccatcagatttagaagcaatgaaatcaactgccccttgatcaaaatcaatgccttcttcaatacaaatcttagccagcttagttgatatatccgcatcacatactttagagaaatgatatttctgagaccgtgagagaacgttacgcggtaacttctctagctctgatgtaaccagtataaaaaccgaatgctgagagaaattgtccaaactgttcaaaagagtaccccaagtttcttgacataataactgacactcatcgattataaaaaccttaaatcttgatgaaacaggaggaagagatgcactcttgatgagagatcttaggtagctaggtcggtttagtttacccgaatcggtttccattacgtccctgcctcttcctgagaagtatgatttgcattcactacacaagccacatggtctactatgtgcagcctgtgaaaggcagtttaaagcagcagcaaatatcttagacgttgatgttttaccagtcccacgaggaccatgaaaaaggtatacagaagtaatccttcctcttaatatggtgctcaagagacatttcaccacaacttcttgtccaactagctcatcaaaagattttggcctgaatttctgactcaaactcctcgacaacacttcatgactcggtgtcaccacatcactctcaccatttccatttccaggtagtaaaggatactcttctacatctgaggattggtttgatcctctgtacctcggcgttcttgaccagcaatacgttatcccgcaaccacggttagattgactatcaaaatcaacatcttcatctccataataactatgatttgttgagttcatcggactacctaaacggcttccatattcaccaaccgagctagctaacttagtggaataatgagttctatatcttccccctgaaccagcctcctcaacatgactgattgaaggcgcattacatgctaagtccctacctttaaccgataaatcactgcaagatctttcactactcctagagcaggcgtctccttcaacatttatcaccttgctactcaacttgtgaagatcacaaccactctcaagctcctccattatagagtatgaaccaaaaggaatcaaacccacaggagcatcagcagcagccttacaagcatcatcagcatgttccacaaactgaagtgagatcccattgttggaaccagtttcccatttgacattgtcaagcaaagaagcaaacttgctcattgaagtagtacatggatctctcagtgaccgaacccttctaagagcaacaagtgttcttgtgatgggaacatcaacagagtgcctcctagtctcccccattttccaaaacagatcaaaacaatcctaaacctttctctctatctcctaaaacttcaagattcaacactcatcatcacttacctaataatgaatgtaagcaattagtgataaacaatgaaaatgtggtaacacagagacatatgagagaaaagttattaaatttaacaatcacagagctcaaaaaacagagacccagataagctatggacaaaacaaaaaaaacttgggaacgatttaaataaggtttaagataaggaaacgacaaactgaaaatacaaaacgtcaaagattggggaataccaaggtgtattgaacagagtggcgtacaatgcggagaatcctaaaccctaaaatcccttgtcgaaagaagaagaagaagaagaagaagaagtagttggtaaagtggtaaataagggaagttattatggtgagaggtaaaaatagaaaaagggtcgttgttgtttgagtgaatagagagagataagggacagaggagaaggggagacatgttagagtaggagggcagagatttttgcagagaaaggtggagtctttggacagagagcccaaccagtaagagagagagagagagagaaagagttaagactactatttggtgttccttcttcgcttcatttaagattcgttcgacggtttcagtttcaagtttggatttctttatggcaacaaataataaaaacaggacttcgtgtggtccgcttctctgccacgtttggggactctactcacgtgttcgttcattctaccaacatattctgattcaactatctcaattatttcttatttggaattctagatgcaacaattatttgttgtttggaattcaacatgagttattgagtctcatctccttgaccagacccccacaaaaaaaaatccttcaatttgcatgtctgatatcctctttcaaattgtgattagactagtgtgtctattgaaccatgttagtttttcgagtcaaattttagtttttccatgttatattggtatggacgttacaaaagcatcaaaaagtatttagagaagtgtgaatcgctaatggttttggtttggaaggaaaactaattttattttattgttgaaatatacatttttattgttaagaaactatacaaatcgagacgagaagagaaatgaggaaatcataagaaaaaagtaataaaactaaagcatgatagagtgtgagccaatttattttcgacccaaaaaccagggctctacatgcatcaaatcttacgagagtatacaaccgacaataataccaatttgatcatttaatcacattagtatgcaacgcaaattgaactcctattcaaagagtcttacgataatatttatggaaaatcgtactccaactacaccaattatcagtggcttaagtgtaatgtggggttttcgtggtcaaagagaaacaatctagctggtgcggcttgggtggttagagatagtaaagggctggttttcattcatggaagaagatcctttgtcaatattaaggatgcttggtgtagttggagtacgattttaaggatgcttttgataaattccaactacaccaattaagggctggtgcactgaagaattcttaaatcaaactttatgggtggagtaaggaaattttttgatgaattgttttgtccaatttatcaactattagtaggttttagttttaggttgttactagcatatcctgttcttgacaagtgtccaaggtgcaaatgaacaaaatctatagtaatatttttgcgcaaacaaaaaaataataatctaattttaggtccaaatagaacttttatagcaccagggccaagtgttataatgagctgaacctactgacccgttttcgagtctattaactaaaccataatatgcggccatgtgtaggttattcttctattagagagagaagtgtccgtgtggtgacaaagatttgaatgtaacccgaaagcgcactggtaaacccaaaataccttaaatgaaaacaatattcttgtatataaatcaagatggcagaaaagtgttggactcatgagaagaagattcaaccccgttaattactagttacgtttattggatgcctagggatgattcctctctagttagaaagttctttcgcggattagaactaataattcatcccctttctcaccgtttcgaaactgttggaactaaagttctatttcaaatgacatcaagaaatctttaaacacctttcaaaaggagatgtaaacaaagtttttatgttttgcttcagagtatatagggtttattgacattggaatccttctaagttccatgtcaccaaaattacgttcattcaatcaatgagtagagaggatagcatgaaatgtgccacgtatgatatatggttggatagcataagattacttatttttcgaattctcggcgaactttacggacaggaaaaagaataaacaaaagaaaaaggatacgtcgcatgatagagttgcctactttacccttcatcatcaacaataatcagttttgggatgcatgtgctacaattactcaaatcttcgttgtcgttatcacatttatcttatagatcaaatcttgttggtggagtggagtgaaggtgaagacttgttgatatgagcggccctagctctctccttgattgattcctactactccatcaattaaatgttattcactttcatatttatttatctgtgttttgaataggggttgttgtaaatattgagtatcctaaccctcaagtcaaagaataataataaatatttgcacatttcctttttaatttgtgacaacccgtaaatagccaaaaataacctttggaaaattttggggaagaggaagaatttgtccgttcatggaacacactatatgaccgccgagatcaaagtaaagtaattatcttccttgaacagagttctatgtcgaacttgattgtttgctttgaagtttcttatcgataaagcaaaagatattgacaaaacacatatgttggtttagaaaaacttcaagttgcatttcttcttttagccaatcgcactatcttccgtgaaaaggtaaataatatatagctttatgacaatttcacaaaaatggttcgttagttttgacttagcattaagatttttttccagaaatctaagtattggtaaaataattctatatctactactaggtcaaaatacaattctatattatttaaaaaattgtaactgaggtaattgatcaaattaccaaaatgatgaaagagctagttaagaatttaacaatgtacaagttttagtgaaatggtcaaaactaaatatccattcttttggcccgttagcatcattaaaccaaccactcaatggagacatggaagatcaaaattcgtcaaccctagcgctttgtttctctacaaggatcaagtatggaacaacaacaaccacaagaaatcgaaatgtgctaaggtcgcatgagttcgctaggaataagtctataacatttcgttttgtcaacaaaataagattttagtatatatattatttacaattttaccagacttccattgtcaacaaatgacattattgttgttgtcgaagaaaaaacaaaggtgacactatttgctgttttactttttatttcatgaggacggaggacccatttttttaatttagtttaaaagagcaaccgtatcagttgattacggagtccagcagagaaaagcatgctcaactgtcaaaaacaacctaacaattagggaatcccgtaaaaccggcaaatcacgagggcagcattacattacattacattacatgtcccacaaatcactttccctcccatgcttttccacttccacctatcattaccaacacctattacctaaaggactttaagccagagagttttcaaatcccgtaccgtgattggtgcactatgaagtggaaaggaatacgatgaaaaacaaactgttttctcaatacattttcaccgacaccaatcatgaagcaaatagctgcaattaattttttctacgttttaagacaagaatatatattaaactacttattttcttctacatcttaattaagtagttagtattcttacaaacacttctgattatcatttttgtgttcaatatataaactcctttctatttaaaaaattccctcaacactataatatcattcagtccctatctaaaagttaggtgtccatagagatatacggatattgaaatttaaatgatatatggcggagatcatgcaaggacaattatcttcaatagaatcattacgacttattaaatgtgtgttcccgacattttattacatgattctactgttttctttctcatcatctcattccattatttgtttttctatttgtgtttctagattacttgacatgtacgttaaatcatttatcttccttttcccttgatatcccactcgaatgacatgttgctgtagtactattactatggttggaaatcttatttctctgaataataaaagtttatattcagataactgctatgatacgtaaactttccaatggttatttaattttgttttgcaattaatatatgcaactataagtaaagcctagtgaattctttggatcggagttatatgctatgtgctaataatacaaggaaccccgcaatattgatataaaatttaccaaactgtatcccacactttaaaagttgtcatcatactttatgtgaatgcaataggatccaaatcgtttggggaagattttacattttaaattcttatattccgcaagtgcccaatggtgccgcacgaattatttagtgtatcaaactattggtaggagcaattagtaaagcatatacagtgcaacaatctatttaaaagtatagaaatatctaactaaaacatattttgaagattccctcgtcctccaatcgtcttccatcatcgaaatatccctttgaagagctaagaaacttggtgggaacaaatgatgctattcgataattttcttcgattctatggtatatttggaaagattggaacataattaatatatatatcccacttgatgcataaagaatgttgtttaagaaacggagttctgaggtaactgactgacaagtgcttcgactcaaccattactacttaccaaatccacggctcttggcataccccatacacgcttagtggatatggttgaatcgctagttcccaccaccagcttctttatcttgacttaaaagagggcacgtcgatgtcttcctcccctacacgacaatgtagaacatgcatgttcaaacaatttgcaaatggaagatatattggaaatttgtgaaaggccatgaggtagatacacaattaaattcatgagttcataggtcagaacaaagctgaagcatgttctacatgcccaatcaagaaaaagtcaaacttttctcaatgccgactttactgttctaaaatgtatgaaaatacacattaatatacaattataaatacatgcaaatatatattgttataaactatataatggttacttgatatggatccttatacttaactaacttaacaccaactccctggatctataatgtatatattgggctaaacaggtcatgtggaagttatttgaaaagtacaccatatcgacctaattagattggaggctttttatttagttttttgtcaacaattagatttgagtaacggatgtaaccatattatttgttcctacctcctaggcattattatagtataaggtttttttttaactaaagatgatttaaaaaaaaaaaagtgggacctaaaccttaaaaattccaataacaaatagtatagaggtcctttttctctttatataaacccccaaaatttcctcttctctgtattctccactcaatacttatttcctctgtcttccttcgcttccctcttctctcaccacaatccgagagagagacagtactgtaatccaagtgagagagagagagaaatgaaaatgcagacgaagaagctctttatcaccattgtctcctttcttctctatgctccattgttcttatcttcaccagttcctgaccctgaatctgtcgttgaagaagttcacaagtatgaatctttcatcttttttccttaacccttccttcacatttacttgaaacccacttctcctttaaatttctgctttttatggaaacccaatttgagcctagcgttacaaagttgtcgcctttacaaaccaatttgagcatagtgttacaaagttctcacctttacaaaccaatttgagcatagtgttacaaagttctcgcctttacaaaaatgggaccattttgaaaagtctctgtttttctaacaaaagtttgcaatgtgtttgtgttgttgcaggagcattaatgcgtcggttgcaggaagaaggaagttaggttacctctcatgtacgaccggtaacccaatcgacgactgttggcgttgtgaccctcactgggagcaacaccgtcaacgtctcgctgactgcgccattggattcggcaaaaacgccatcggtggccgtgacggtcggatctacgtggtcaccgactcaggaaacgacaacccagttagccccaagcccggaactttaagacacgccgtggtccaagacgagccactctggatcatcttccaacgagacatgacgattcagctcaaagaagagctaatcatgaactcattcaagaccatcgatggccgtggtgcttccgtacacatctctggtgggccttgtataacgatccagtacgtgaccaacattatcatccatgggattcatatccatgattgcaagcaaggtggcaacgctatggtgcggagctctccacggcatttcgggtggagaacgatatcggacggtgatggtgtctctatctttggaggaagtcatgtttgggttgaccattgttcgttctctaactgtgaagatggacttattgatgctatcatgggctcgacggctatcactttgtctaacaatcatatgacacatcatgataaggtcatgttgcttggtcatagtgatacttacagtcgtgacaagaatatgcaagttaccattgcttttaaccattttggtgaaggccttgtccaaagaatgcccaggtaaataaaaaatcactttgtgttagtagttaatgtgattgtgaccatggatatagattaattttgggaccattgtattgttgttgtgtaggtgtagacatggatacttccatgtggtgaacaatgactacacacattgggagatgtatgcgattggtggaagtgctaatcctacaatcaatagtcaagggaacagatttttggcacccaatatcagatttagcaaagaagtgactaagcatgaggacgcgcctgagagcgagtggaagagatggaattggagatcttccggagatttgttgctaaacggtgcgttttttactccgtctggtggtgcagcctcgtctagctatgcaaaggcttcgagccttggggctaaaccgtcttctctagttggaccattgacgtctacttctggtgcactgaattgccgtaaaggttcccgttgctgattgtggcttagtggtcacacttaagtttttaccccattattatataggaaaaggcaattaaagccaccaattaagggggattaagtagtgtagtaagactttcttaatcccttgatttactcttttttttgtttgtttattcgggtaaaattgaaggagaatacaacctctggctagctgctctctaggacccttcttaaggattctctgttttaaggaatctttaaattaggttaaagtgtgggaacaagtgcagatgtgttgatcttgatattaatataaatatgattttgtgtctttatcttttactagtattattttcttatgagcattgcaatgcaaagacatagattagtcacaaaaattagtttgaagtataaatttgcgtacacacatgatggagaggttagttaaaagtgtgcccatttggcaagtcaataatggctctttgattttccaaataaaatgactttttattcggaagtttgtaatgttatgtaaaatggtaacttttgggtcaaagatgttggagccagtcaatgtttgaccaactgccgcgacttttttttcctctggccaatgcatcgattccggtaaattaaaagaaaaattacccttaaaaataggaaaagaaaatcctaggcatgacaatgagagaagagaaaagtgaagttgatagattttgaatagaaaaaagaaatactaaaattttcaaaagaaagataattggagcagtcaataccacagtagctctacttttgatgggtttgtctcatattcgtgttttgactactgtccactgattatgggatttatttaaaatttgaaagtaactaattaaacaactaaccaactttctttgtggccatgtgcacattttcttttgttaaagatggccatgtgcaacatgataatacatctaggaacgaaaggaagaagaaaactttgaaagtaacaagtggtcgcaactaatgatgtgatgtagttggtgtgattagtatgtggctggtttgatttggtcagtcagtgagtattaaatgttagtttgccaagaaagattttttttttttttggtcatactgtatatagcataaaactaggtagagaatttccttgttatgaaaaaaaaaatctttacatttgagttattggggaacgaaagaaattcctatggagcaagaaggtttaagtggccatgttatgagttgtgtgcggtcacgtgtactggtcagttaatttagttgtaacaatcgattatatttgttctattattctttatatttcagtgatgccgtaacagtaagaaattatagttaactgaaaccaacaaaaagattcagaattactggtgttattcaattatggagttaaagttaattctttaaactttagatttgttttctgatattgcttttaagaatatgtttgtatgaatttcaaaatctctgcaatatatcttggattttgattctaatgatttactcatgaaactccaaagaggtttcatttcaaatcaattaatatacaaagattttacaagacttttagttttgaacaacattggattttaatgaaatatttaaaatcttaattgaataacaccaaactttaaaatctattaagcatgatttacaaatatgagttccaataacactagattttaaagctggatttagaatcattagttgaataacattggattagtgttggatttcaattctattaaaattcattaacgaataacacccccttaaagttaactctttcaaaaccgatcataacgcacacaagcctccaccgaaatgtttgacaccataatattttactaccgagttcgcaaggctaatatgtatttccttttgtaatttttctctttattcgtattcgagaataagtggattgttcttccgaaagttagatagatcattatgaggttgttcttagagagctagaaaactcaaaacaagtttatcaagtcgatcaactctttgataaactcaacaaatagttatcattgctcattataagattgaaaatgagactttgtattgtggaaaataaaatgcttacctcaagtgaaattttaaagtttatgctatgatgtttgtgatttcgcaattatatgatttaatgatattaaataatcaaataaataataattcattaaaattcacatatggtttaaataggtctaaatgagtttatatgggtcaaaataattttgatggttctaaatgggcttcaaatttaagtgggtttatatttacatgagtgtgtgtgtttacatgtagaggggcttacccaaattaacatccaaattaacatagagtaatttccaaaatgaagtaagattaacattcaaattgtgactagaactttgatttgagttatatagactttgtgtattatttttttataatataaacttcgttttgataagtttatataaaccttgttttcgtaagagattgtgaaattttctttgcagagggacatggttattttttgtctttggttcttgtaatgagattttaactatggtaaatctaagagcccatttgaagatgatgtctcggccctccttatccttatctcgcccaccgttctaaaacccttcccttcctcttcttttctcttctccttccacttccacttcttctatctctcacaattcagcaatggcttcttctatagttacctctagcttgaagcctttagccatggccgattcttcctcttctaccattttctcccatccttccatctcctctaccatctcttcctccagaattcgcagctccagtgtttccctccttaccggacgcattaacctgcccctctctttctctcgcgtctctctatctcttaaaaccaaaacccaccttaaaaaatccccctttgtctccttcgttgcccagacttcggattgggctgaagaaggtggagaaggaagcgtcgctgttgaggagaccgagaacagtttagagtcacaagatgtgagcgaaggagatgagagcgaaggagatgcgagcgaaggagatgtgagcgaaggagatgagagcgaaggagatgtgagcgaaggagctgtgagcgaaagagctgagttcccggagccatcggaagaagccaagcttttcgtcggaaatttggcttatgatgttaatagccaagctttggctatgctctttgagcaagccggtactgttgaaatcgccgaggtgaatttagctgctttcttcttgtgctcatatggtcgtcttgatgcgtttatatgttgttcattatgcattgcttaaggttatttatgtgtgttttgtgcattgcaatttgcatcaactatgagtctaatggatgagaaaagtagaattctttggcctgatgactgtgtttggagcatctctgctttgagagttagaattccgtggattgaattcatatctgttgacattatacttttggttctctcttttttatttagttcaagagataatgttgttagtcctgacttgttctttgaattcttgtggttgtaaggttatatacaatagggaaactgaccagagtcgtgggtttggatttgtgacaatgagttctgtggacgaagctgagacagctgtggagaagttcaaccgttatgtaagtttatatggttcaaactttcaatcatttctgtttctgagttattagcatgtattgtgatgggatattgctcctttgatttcgtcctttctgctctaagaaaacagttttctattgtctatggaatgctgttatccaaaactttctatgttactatttgtcacactttctctgtttctatttgtcaatcgaatatggaagctttggcattttatgtgtggaattgtttttgggaaatgagttgagttggggattctctaacatttgattctgtctgtgagaacattgctgaatatctgtgttggtattttcattgtgtttcaggatcttaacggacgtctactaactgtaaacaaggcagctccaagaggatcacgtccagaacgtgcgcctcgggtatatgaacctgcattcagagtatatgtagggaatctaccatgggatgtggacaatggccgtctagaacagcttttcagtgagcatggtaaagttgtggaagctagggtggtttacgaccgtgagacaggtcgttcacgtggattcgggtttgtcacaatgtctgacgtggatgaactcaacgaagccatctctgccctcgatggacaggtaccctactcttcctcatatatggttatgctaatgcagtcaacatgattttgtgatgtatctcttaatcgacctttcattgtctcttgatttacagaacttggagggtagagcaatcagagtgaatgtagcggaagagcgtcctccaaggcgtggatattaaagctgagatctagctgtgccctctctctctccctatcttgcattttgtttagacgagattcttacactcttcaacgattgtttttggctgaactctgaatgtgaaagttaagctgcttctaaagtaatttgtatcgcttgtttttgatgatctcttattcatagtttaattcctaattgttggagtttcattccctcaatcgcatcgggggatacgacacatttctgggacatgccttgtcggtgacctttagatattagcaactacgaggtttaccccaaaatcggctgagaatgaaaggcttctatagcaaagcacaagttggtcgaggcctaagggaagaagactagaaaggtggtgtcatatggtgagttagtctctgccagtctagaggttcctaaagaagaggattgggatcttcattgtgttcgtaaagggatccactattttaatctcttgattggccactctctaatccaacacttaaacaaaccacacatgaaaaataagtctaaatttaaagcttattaatatggcttacttatttggcttaagaggcctaaactcatgtgatgtatcctagaaaaattatagatatacaaaattatgtatatcacctacgtctagctgaaatcttacccaccaatgccaataaaaagtttgccggagagaatacaagaaattcgtgtacaaatatacacgctccctctttatctttctttcccttgttagctaagaacaaatgataaaaagcttacaccttttatgaaatgctctctcactctcttaccctttcacccatgcccggttcttagtactgggagtgctatggcacatgacccactatgtttttttgtaaagaaaaaatcatttatattctagctccagcttacagtcctgaacttaattgatatgactcgttgaattcactaatctgaatgaaagactcttcttcgagttctgtttgtagcaagtatgtataactccaagccaaatatgaaatcatggtttcacattattagagggtacgtaatacaaactgagacaagcaaaacatgtaatgtaacaatcaaattctaaaacatatagaattagattcaactgatgatggcagagtgaaatatgcatttaaaagacaaaacaataagcaaaaagtctcgatcgtgctcgttgagtcgctttatcaaaatatggaaatgcaacatttgttgggatacacgagattaaatggtccatatattcatgcatgtgtagcaaacagcgtaagaaataatagacgcaatatataaaaccaattaaaaagagaggaaacaaagtgtatgagaatagagcgacactgatgattcattttctaggccagatcttgtcttggaactctcttatcgcccaaccttagccttagcttctcgaccagtcattccaataatttccacacttgtctctttgcttacctctattaattatttttggatccatcgttcaacgttttataaataaaataacattatttaattttcattattgtcactatcattctgcaaaaaagtgtaaaaatgtactaatatttttcttaaacaaaatgataagaatgaagtcgtccaaaatgtgttttaacctattttagtaaacctggacaaaactgacgaaaaaaaaaaaaagtaattggacaaaacaaaaatagtcatttaaaaaaattatatatcatgatatagagctacctaatgcagatacttagaaaactaagattcattattctctgataaagaaaataatcacccacgaaactactcaattataaaaaaactagtccattattaattggaatatacttaagtgtagtttttgttaacataaatggaggtgtatatatagttggtgccggcaagaaaagatggaggaaggattgtatcggtcccctaccccatgatcccgccagtaaattctttctagggcacccaaccatccacgtgtatccctcaaaccctacaacctgtaaatgtaaatccattacattacattgtatcttatttaatactgtacttacccaaaaagtttcttttaaattcaatcttaaatcatgttatagcaaacaaatctagctacacaccaacttgtggtttttagaatcttttaacttgtaatggacttttatgatgatatccatgtgaatcacacatgcatgctatgatttatcatgtgtagtaatatagtatgagaggccaatcacataaactcttaaatacaatgatattggacatgttatgttttgcatttcaaacaaaacaaagaaagaagaaatgtcgttttttgtttgtataaatccaggaataatggttttggtttttagacgcaatagagacagtatcaccattttcgttctggacaaacaaataaaattaaaattttgatacattaaaatatggttagaacttagaaaacaaatttatttaggttcataggccagtgagtctctctctctctatctctaaaagaaagagaagcaaaaaagtaaggaatgtttcctcgcaatcatcatcatcatcaccatcttcgtcttcttctttgaaacctccagcgacttcctcgtagttctctcacttatacacttactaatacagagtaacagagagagacagagtggactcttcttagagtaagatgggaggtgtgacttcttcaatggcggcgaagttggcgttttttcctccgaatccgccgtcgtacaagctggtcagagatgaaacaacggagctttttctaatgagcccttttccccatcgagaaaatgtcgacattttgcggctgcccacgcgccgaggcaccgaaatcgtggccatgtacatcagatacccaatggccgtcaccacccttctctactctcatggaaatgctgccgacatcggtcagatgtatgagctcttcatcgagctcagtattcacctccgcgtcaatttgatggggttagtaaatctcccagatcagatttttctttctatatttagctcaggatcttgctcagaaagtcctcgccttttttggttttgctctgttttctggatttgtgcaagtagatttgaagcttctagatgcagaattttggtcttagtgttagagagaagtggactttattaagctgtggatttgtgattcacaaagcttttgaaagtttaagttgcagactcataaaatcttggatttttgctggaagagtttgtctttagggtttgtctgaatcaggatctctactgatcctttatcaaagagacaaaaagtagttttgaggttgagatgtttgagtttgattgttgacacttgacaacaagtggtcttgggcaaacattaccatttctagaaattcaagatctgttattgtttctgtttctaaaggcaagtactgaatacccaaaatgtagttctttgatgtaacaactttttggctcattcaggtataacttgggattctgggatagattggtttctcaaattagtacgctatttttttctgtcgtatcttcaagtgaacctgaaattagtagaatttacttctgtaaggttatgatttccatcttatgacattggaaaatcctctaaatatgttgtggtgtttataggtatgactattcagggtatggccaatcatcagggaaggtgagtaaccacagatcctaaagctctcttagttctgagattcaaatgttggtccatttacactgtgaacaactgaacataaatctccattttgttgcagcccacagaacaaaacacttatgctgatatcgaggctgcttacaaatgtctggaagagaattatggggctaagcaggagaacattattctctatggtcaatctgttggtagtggtccaaccgtggacctagctgctcgtttgcctcgactaagagcttccattcttcatagtccaattctttctgggcttagagttatgtatcccgttaagcgaacttattggtttgacatatacaaggtgaacataatacccttttgatttctctacatgatgttgctgataaacattcctccttcttgacaccgttttgtttgatcttcttcagaacattgacaaaattacgctggtgaggtgtcctgtcctcgtgattcatgtaagtttccgtgatcaaagattattgattggaagaattgaagttaataaagttgaacagatttgcaagatccgttcattcttgtatgaatccttgtctaataatcctcagtgttagcttaaaggtgaaagcttttcgatttgcagggaacagcggatgatgtggttgacttctctcatgggaagcagctttgggaactctgccaagagaaatatgaaccgctatggctcaaaggtggaaaccattgtgatcttgaactctttcccgaatacataggccatctcaagaagtttgtgagcgctgtggagaaatctgcatcgaaaagaaacagttctttctcaagaagaagcatggaagggtgtgaacaacctcctcgtcatagtgtagatgctccaaggaagagtaaggacggacgagaaaaaccgaggaaaagcatagacagactaaggttccagggatacaagttgagccacatagagaaaccggagaagctgaaggttccatttgaagaaatggagaggtcaaggagaagcgtggacatatacagagataagtctcagccgatggagagagcacgtaagagtgtggattggttggacagaagtcgagctaccgaatgaaaatggagggtttgatgtcaaaagattgtatttgagtgtcgttcaatttattggggtatgtgtttgtattgtagtttgtatgccaagttaaaatacaacaggaagatagatttaaacaaagtatgataacttgtctgactgtttcccacacgacacttttgactggtttttagtttatttgacaagattcgtgtgctgtcgtcttgctgttgttgttgttcatgtgcaaacttgaagtgtaatagcctgcaaacagaatctccgatctaggaaccaactaacaataatcaacaaaaactctcgatccaacctagcacagaagcttgcactcgatttgctatagtgggtggaagttgtattgtacttgtatttgtaagaactaagaaggatccatagttttttgatcaaaaagaaaaaggaaaaagaaggatcaataggcttgatgattactgattatgtagatgggtatttttattggctttcttaggcccaaacaagggatctttatgggcttttattacattggtactgtcagagtcggataagactccgaccgaattttctaaccaaagtgagtctggttcgaaaagactgcttcaatgaagccaaaactatccaataactcgaaattgactactcttttcttttgtctctgttgttgattcgcaaaggcgaagattatccatcttctcagttactcctactggaaccaaaagctcagaaccttaaaacatggagtctctatctcttcccgttctaaatcctctgttagcttctggttctaatctttttagaaaccagcactcgaggatgacctcttcaatggtatcttcacttaaatcccccattggaggcacatcgctctccactgttcgtcgctttgtaagttgattctctattttggttttatggccttatctcgttttctccattcgatttttttgattggaagcgaaagtaaaattttgacactctttgttgttgaatagggagtaggtgttgttaggatgcaagctgttgatgaagatattgatttgaagcaaatgagagacatagctgctgctaaaaagcgttgggatggtttggtaaccatcacttacatcttaaaattggaacattggagtgattatggttcatgtttttattttcattgttattcaactgttctcactattaacaaatttattgtttgcatagttaagggaaggaaaagtgaagcttcttacaccaagagaagcaggctatgctatttctctttcaaacaaacctctccttgatgttcgtccctctagcgagcgcaacaaggtacattcttgttttttaagttattaggctgcttgtttacttatccatagatgatgattgtcttgtctaaattcacccttgaacgttattgcatagaatttggttcatgtatctcacctttgcatgacatgttagtaagttagttcaaactcttggcgactgtaatgttattatgaaatcaaaactatagtgtgttactgatgtagtcttctccttcgatttttttcttttcttttctataaaggcatggattaaaggctccacttgggttcctatcttcgacaatgatgacaaccttgacgctggaactctttccaaaaaagtcactagttttgctatgggtacttctccaccattataagttataacctgttgactatagtgacattggatcaattcattattattccctactattatctatatttctattgtatatcattgactaatcccatctaggatagagactagaacacttgaatacacgcatttattaaattctttttggttcttgtaaaaaattttggttttgatttcaccatgtttccacttgtacagggggatggtggagtggagcacctacactatcttttaataggtatgtctgcgagagtaagctgaccttcttctttgccttttggcatacttacttgcttcttggttttctacttcgtttgcaggctcttcttgtcaaaggttgaggagaaattcccaaaagactcagagctgattgttgcttgccaaaaaggattgaggtacttgaaatatagatagataatgagtgactaaccatgcttgaaatatgtggttactttatattataatgagtaagtggctggttaggttctctgcctatatattatatattcatagaattgcatggtgatttatccaggttttgggttgaagaagtatcattatcaaatggtctcggttcttgtggaatgaaaattagtcttatattgaaagttagtatgttgatagtataactgtgaatcacagggttcatattgttggatgatcctcaaatttatgcttgactcgtaaatattgtcagatccttagctgcttgcgagctactatataatgcagggtatgagaatctgttctgggtacaaggtggtttagaatctgctcaagacgaggttatacgattgttttaaactttcggttttgtgctttatactttttcagtttcgtttctgaattgcaagattctacaacatcgataactaattcattcattatgtgatagcaggatctagtgacagaaggtgtccaacccttgaagcttgctggtattggaggtttttcagagttcctcgggtaattctctcttttgctactcagactttctcatagcttgaaaagtaaaagtctcaaaagacaatgaggagaataatggataggcctgtatttatttataatgactgtaagtcaatagcctagctctatcttgtacatcattagcagcatttggtattatgctcatacatctttttacttgcagttggacagaccagcaaagagctcaagctgcgaaagaaggttgggggtaccgtttggtatatactgctcgtctggtgagtttttttaatcaaaatctcttgtagcttctttcttttgtgaatcatgttcctcatgactgcttctctcatgtcatgtttgtagtttggagttgttctggctgctgatgctttgttcgttggggctcagcaactaggccattatattcaggagttaagaggccattaggatctctctttaaccacgctccaagtggctatatttctcttcaacaaaaaaaaattgaaaagttttggaaggtagagtagttgaaatagatcaaaaatacatctttgaatcctgaaattccaatggcaaacttaccctttgctttataccaagatccgtattatccaaagaataatttgcttatataaaaaagaaaattcgttgacgaaaaaaaaaagaaaaaaaaaagaaaaaaagaaaagaaaattcggcttaaacttctagtagacaaagttaaataatctaggacaaaaattgcgactattcgagtttggtccgaaatcgtaagtaagagagtttggtcgggacgaaaaaaagaagaagagagtttggtccgaaaaaaaagttaattagagagtggaatattcgacccgcggaaaaaaaaatctttatccaatttaaatgcgtgtcgttttactagaaatatgaagcacttcttgttgtttcatcgtctggaaagtggaagcatattctctctcccatcaattattgagccaacccaactatggttaaatccagcacagttccaactaacccaggttataccggttgattacacgtggacggtggagatttttctgactgcttctctatcgcaatttgctattcctctgcttaaaaactagggttaggctacgattctgtttacaccaaaaaagcttttcgtcatcgccgtttggctttctgaaacaaatcacaccgtttaagattttctctgattctgagattatggagatggagcgtgtgcatgaattccctcatactcacatggatcgtcgtcccagaaagagagcgcgtctcggttgggatgtgttgcctcaggcaaccaaggtataaattctcttcacctcgttatttatgattccaatttgagtttttgtgtttgattcctttgaaaatttgatttttatttaaaatttaggatcggtttaatttttgtgttgattcttctggatctgcagttttctcaatgtttttgtttttgtcaattattcaatttgaagaaaccaaattctgtatgattaggtgaagtttgtgattgaattaggtggtgttttagatctatttaaatttggtctgtccttgaaatattttagatgttcagtgttgttaggttcaatttctgtggtatgttttgtttttagtatttgtttgtagatggtgaaccaaatttgatctgatgcatgatttgtgaattttgagctgagcaagattttgtgttggctgattcgcctttccctctccaattctataagttaaagataatcgtgacttcgtgattttttctgaagaacaatagataatagatgcacgttgaatacaaaaaaagttgtttggatttggatttacccttaaggttttaagatagtaaatgactctgaacgagtcggcgtagaaggatagtggcaggttttcatctgtctgttatggtacatgaatatgtgtaggctcaggtaggaatgttttgtgggcaagagattggaaatatatcaagctttgcatcttccggagctccttcagacaatagtagctctctttgtgttaagggtgtggctcgaaatggttctcccccatggcgagaagatgataaggatggacattacatatttgaactgggagatgacttaactccacgctgtaatcccacttttctattaccaaaaaactgttttgataaaatcctgaagataccttttaaatttctctagatttttttgtcaatggctttgaacaaactctaggtgttgtggtggaccttgtgtatattgttttgatttcagtattctgatttctctatgctcttcttgttttgcagataaaatttatagcaaaatgggggaaggtatgaatttatggttgttgtacaagttattttcataggtccggtgtagttatcgtatctgatttcctaaattttccttgtaggtacttttggtcaagtgctagaatgttgggatagggagaggaaggaaatggtggcagtaaaaattgtccgtggtgtgaagaaataccgtgaggctgctatgattgaaattgaaatgctgcaacagcttggtaaacatgacaaaggtggcaatcggtaagtactgtctgttgactttttcttcatgcatcactaatctgatgaagtcaagcatagttttccaagattcttttttgcaaaggttaaatcattgtattccttgcagttgtgtacaaattcggaactggtttgactatcgtaaccatatctgtattgtaagtatttagtcaattttgtgatgtctatgattttccccggtttgggaaatagttggggttgaattttgtggatgaacttaaaatggttgctacaggtatttgagaagcttggatcgagtttatacgattttcttcggaaaaacaattatcgctcctttcccattgatcttgtccgtgagattggctggcaactcttggaatgtgtagcatgtgtgtagtctttgcagtcttttcattctacatgctcgtgcatttttatctgagttttgcttgtcactgagatggttacatcattagtttttgaatttcagctcttttcatttcttatggcaattttcttgtctatttttgttttgcagttatgcatgacttgcgcatgattcatacggaccttaaaccagaaaatattctgttagtctcctcagactatgtgaagattcccgagtacaaggtatatctcgaatgcaactgtgtgtgaccttaatgtggccaactatttaagtgctgaaggaatttggttgtgtttcctgatgcaggggtcccgattacaaagggatgtatgctataaaagagtgcctaaatcaagtgcaataaaggtgattgattttggtagcacaacttatgagcgccaggaccaaacctacattgtatcaaccagacattatagggcaccagaagtcattttaggtgagtagctcttgttataaaaactcattaaaatttttagatatcacaaacttatggagaaacattgccttgtgtgcaggtcttggctggagttatccgtgtgatgtttggagcgttggatgtatcatagtggagttgtgcacggtgtgtgtctgaagtagttgattgttaatgaatgtttgggagtcttttattgaaagatttgagatttgtagggtgaagcattgttccaaacacatgaaaacctggagcatctagcgatgatggagcgtgttcttgggccgtttcctcaacaaatgctgaagaaagtggagtgagttgaataaaacacacggtctgaattctgaagtgattgtatatattgttgggtgtttaactggatttatttttgggttgtttggtaaagccggcactcagagaaatatgtgagaagaggtcgtttggattggccagatggggcaacctcaagagatagcctgaaggcagtattgaagcttcctcggcttcaggttggtcaagtgttgatattttgagtttgggtggagtgttatggtagtttgtaaaataatggtgatgcctgtattgcagaatttaataatgcaacatgtggaccactcagccggggagttaataaatatggtgcaaggacttctgcgatttgatccgtcagagagaataaccgctcgtgaagctctgaggcatccgtttttcgcaaggagaagatagcgggacttgaatttgacgagtgtaaatagggatgaaatatgtatgatttgtagcaagtctttaccccacaaccccacgaattctgatataaattaacaaatatgctaagatcactctttttttaaccgtgataggcgattgtttgtctatctttgtaaactggatcgtttcaattcaaaagagttttagttttggattctatctacaagtagaggtatatgcataaagagaaagtgctgctacaagtagaggtatatgcataaagagaaaatgctgctactcattactgaatgatttcataacaccaagctaagagaatggattttataacgcatttacattggattatatattgaagaagaaatggtataataagagataagttgcaaagaaaatatgaaaggccaaaactaaaatataaactaaagaaactcctccattgatgagcccatcataagaattagtgatacaataacccaaaccaaattaacggggcgtttttttttttctcttcttggcattcgtcggaaagaaacagcatgtagtttaaccagcgtaaagaaaaactacacgatttgtaagaaaattctccagtttcacttgagtttccgtgtttagctatcttctctggaatttacccagaacttcttccgccttgtccgattctgcttcacctctgcgcattccttgtctgatcctcgcaggaaactctactgtcgtaagtctgtcttttaccaaaatgtcgttgattttccatacgactttcgttttattttcacgatctacgccgatatcgaccattgagtctacgatttctctattacaatggatttaagaaaacaattctgacgaatgggattagattcttacaaatatacctgcaattgcattgttccaccctttcttttgtgattttttcaactactgtttaataaaaggttcagctcaaatttgtgagatcagaaacttgttcatgtgccagttttcaaaaatcgtggctttttagtcctgagggtttatatgtgaagctaaactatgttattcattgtgaaagttttttctaacataacttttgatgttcacagagcaataggttgatgggttctgcagccagacagcctctcttctcatttggtgttattgctgatgttcagtatgctgatatttctgatggccgctcttttttaggtgttcctaggtattacagaaacagcatccttgtccttcaaagagctgttgaaacttggaaccaacatggtaacctcaaatttgttattaacatgggtgacattgttgatggcttttgtcccaaagatcaatccttggctgccactaagaaactagtccatgaattcgagaaattcaacggtcctgtgtatcatatgattggtaatcactgcctctacaatctcccccgcgaagagttgcttccgttgctgaagatcccaggtcgtgatggcaatgcttattatgatttctcaccaaccccggagtatagagttgtggtgttagatggttatgacatcagtgctgttggatggcctcaggaacatcctaatactatcgctgcattgaaaatacttgaagaaaagaacccaaacacagacaaaaacagccccgcagggcttgaggatgttgcaaggagatttgtgaagtataatggtggtgttggggagaaacagctgcaatggctagacagtgttcttcaggatgcatcgaattcaaaccagagagttatcgtatgtgggcatgtgcctatgagccctggtgtggcatccaaagcagctttgttatggaattttgatgaagtgatgaacattatacacaagtatgactctgttaaagtttgtttgtccggacatgatcataaaggaggatactttgttgattctcatggggttcaccatagatccttggaagctgccttggagtgtcccccaggtacgtattcgtttggatatatcgatgtatatgataacaagctgtctcttgttggtactgatcggatgcaaagcaccgattttgagaactagagttttcctgaatgatcaattatttgaaatgcagagtttgtaatcacaaccatatttctatgtatttggtgctttgtgaataagatgattataagtttcagttgattggattactagttatttgtatgaacttccatatgttcttaacaaggaatctatatcagatggatctgttttggatttagttgtgcaataaaggaaatctctagctaaatttatctctttgtagtgtctagctgaatttttaggtgtacgtctgtgttaaggtgatgaatataggttttcaagtcatgttccttcatagatttagtgcagattattttaagaaacatagataagatttgtgttaattgtagtttagatgtattagtaacagttagaccttgattagcagaacaatagatcaagttttcagcagaaactagattgttttctgtatactggaagtctgaaactgctcgagggttttgaaagaactccatttcgtggaggcaaatgatgttaagggagctaaatggaaggagaatattgattttcgtttatgattaactgcttggactatgagatagtcatcaactatcagagagaagactcttcctccaacagacatttttttgatgagaagctgaattggtgatgtgggcagtagctcctgtgtctggaagactgactttgatctgacaccctcatagcagccagagcattatgtagattttcaggctggtagtcatgttttaaacctgttgtgacacttgaatgcagagtgcccatatctaccacatatctgacttgtaggtttttgtccagatccagaacctgtgcttgaacctgatccaaactgttgctggaaacctctaccacgggaatcattatagcctccacgagtatagtatgctttctcaatgtgatatgccatgtgaggagtgacttcagagggagaattagcataggctattaacttataatcaaaggctgtgagtttatgcaccacatcatcaaaacaaggaccaggatagagatttagatagtgctctatcacagttgccacagactcatgttccgtgcctaatccgtttagaaccccataaaaattctcttgtacttgttctcttgataaaaccttctgtcggaggaagagtcttccctctgatatcaacaaggcttatgagttcgattgcaaagcaaatactgtagcccgttttatgtagcaattactaatttgattccaaatttagtaattccctaggaagtaaggaaagtgtaactgtcttgctgaatccttttggtgagtctacacttcacagaagttcggggttgaatcgaagcagttgcaatcctgtttgtaatattcactaataattcacaagtgcgtgattcaaaaatgctgcataagccaacatcataaagagaatttattgggagactgctttagctagcaaacttagtgcatacttgttctagagatatttaaactagcacataattttttttgatggaccaacaatcaatctcagcaaaagaaactcaaaaccggatttcctgaattagatgtcttcctgaatgatcaattattagatttccggattgggatctaagtaagtccaattggtatgatgaggagtttttttttttttttttttttttttcattcttgggcattgtttttcgtgactgaacattattcgatagatcaactatgttcgtgtcgactaccgagtaatggcgcccgaaaattcccttaaattcttcgcactaaatgatcgccggttcaaatattggcgtctagtggcgtttatgtatttaaagatgggcattctataaatatgagacacatgtgtgacacacatttagtcgtcctcccttaccaagatcacattctcattcggatcatggccatccacactctcctcttcgtatcacttctcatattctcactcatcgagtcgagtagtggaggaaagaaagatagactcttcaccgatctccaaaactcaattgaggtcaccgctaaacccgttaaagatagcggaggtttgtgaaccgtcttaccttctttataattcaaagattttgtaccttatctattatcttttcaaatccgcgactaaagtgtgtattcataagtagtgaagttgcccactaggctctaactgtaggttaagtataaagatatattacctattttaatacggaaaaaatagttattttcgtttatacatctctagactctttttttggaatatacatgatttatgattcatctccatacttgtattattattatttttataaatctatatactcaaatttgcacatggatgatctttagttttagaggctggaaaagatatggtgacaattacatggaagctaaagtcgtcgtcagccaaggtcgacacggatactgccttcaagacaatccaagtcaagctttgttatgcaccgatcagccaagttgatagaccgtggcgtaagactgataacaagctcttcaaggacagaagttgccctcatgagattgtgtccaaggcatacgacaagaccccccaatcactcgattggacaatcggacttgatatccccactggaacctacttcgtacgtgcctatggaatcgatggagatggccacgaagttgcatacggacagagcacggatgagggaaggacgacaaatctcttcagtgttcatgccataagtggtcatcacgtggggctagacatagcatccacatttttcagcgtcttctccgttgtttctctgtttgtcttctttgtcatggagaagaggaaggccaagttagagcaaagggagtgagttggattaactatgaggtcttttgttaagtcgaataaaaaagcgtttacgtcataattgttcgtgtttgtcgttgtgaagaaaatatatcctttcactttcccaaaatcaatgttaaaatgcaataatcctccatatacatctcatataaactaaatcttacttatagaaaaccttttcacataaacaaaaagtgaaaagatatgatattcaaaacagtactaagttctcctacgttttgtcacactttaatatttacatatatctagataaataaaattttatcatcttttgaacaataactaaaaaatgtatttcaatttatcgtaaattttctcatcttggagagattccactgatttgtggtcatctgatctctcagtcacaagtcttttattgactgaaagtttgaccttacttaatctttgtagaaccaagccgtatactcacagagtctgcttaaaactatttcaaatttcactaaacaaatacaaatactaatagctaagtgatttgcctaatctaaagaaaataataaaatcaaacatataaccatcatttttttttcgagcttagtcttcaacaccatatctcctatttatgtttttaaaattttctcatacattattttgctagctagattatattaattttctttttgaggttaatattattaattttaattgttactttcttacaaatttacctgaaatttcagtgcattgccaaacagtaaacaccaataaaagctgcaaaacacccaaaaaaaagaaaaaagcccgcctattcccggagaaaagagaaaatctgaaaattgaaattgacaactttttctcggccttggtgttgttcccaaatccagagacacaccatgagcactcccatggagattgccgagcaaaaacctatggtggaggacccgattcctcttccaaacgcttccatggaggtctcttaccaaaaccccattgaagcagcgactattccagtgcaaatagccgtcgctgagccagtcgctacacccaatcctcctccttgcctccacgagaacaaattcctcgtatctggtacttcaattctccttcctttcgattctggatttcaattatagagcttctctttatgatttccattttctgtggtttctagtggaggtctgcttaaagccttcaagcacggctcgtctagaggatgtccagagagctgtagaacggtttgtatcacattttctcatctattatagtggagctctgcttaaattaactctgtgtttgttttctttttgataatgggatagttttgtattttgctctaggatgctggaaaataggagcatgagctatgcagatggactggttttgattcctgcagacgacttgttcctagttgataatgtgcaaaggatatgcatttgtgatacaggtattataatattaaaccttatcaatttcaccaaacttttccttttgtaatcagtgtttaggtttcatgctagcatacttgtgggtttgatgttactgatatcttctttgcttctgtatatagaggaatgggtgaaaaataatgatgttctcttgttctggcaagtgaagccagttgtgcacacctttcaggtaaatgcaaatcttattaagttaaaatagccagtcagccttgttttctctaggtgtacgtgacttgtttgtaattcacatccagctcattgaagaaggaccatgtgaggacttgtgtgcagatggacaacctgctagctttaacgaatggattctacccgcaaaggagtttgatggcttatgggaaaggtctgtctggaattactatcttgacgtggttataaagcagtaatgactcttgacacaatttgttctgtggtctggatctttttgtttgtgtagcctaatatatgaatctggacttaagcaaaggttactacgttatgctgcgagtgcattgctgttcacccagaagggtgttaacccaaatctcgtttcatggaacaggtgaggaaagttggcataaatccagtatatactgttcttctcctaacttacctagcaattcttatatatgtctccttctattctacagcatgagattgttattaaaaacttcagataactgagttgcttatgagctaaatttgtttcctgcccttttgtttgttctttggtgtctaagtctgatattttcttttcttgtgcctgatttcaactaattagccttcatgatttgttgaatctttctgcaggattattcttttgcacggaccaccagggactggcaaaacatccctttgcaaagcgttggctcaaaagctttcaatccggtgcaactccaggtcctcttctggacaaaatgttattctgtcagattaatctatactgactgtattatctcgatcatctttctattttgattttgatttatgtttccttcatcagatatccacattgccaattgattgaagtcaatgctcactctctatttagtaaatggttctctgaaagtggcaagctggtatgatatacacttttcctttctttaactcttctcttaagttatccctttagcatgcattttaatgcggtagatttgccaacaagctgactttgtactcatgtattattggacttcaaccagatttgtggctaccttgtagttgttggttcaactaacgtaaagaagtaacaacttataactgccactttatcttccaaggaaaaatagctaatctactttatttattgatcagttgattacagccagtgaaattttcaatactcattctactttattcgctgatcacagtccgttaatttctgggatttcatagtaggctgattgggaatccatttcgtgtctagtagtgatagcacaaacttcaccaatagttgtgaagtgatcggacctatcttagaagaaaagctttattggaattttctgttattctcaacatttctactaattccacaatataggttgccaagcttttccaaaaaatccaagagatggtggaggaagatggaaatctggtatttgttttgatcggtgagttatgattttttcataactttttatatttgcatgcttatttcttgtgtaggcctgagattgttttgcctgcagatgaagtagaaagtcttgctgctgctcgaaaagctgcattgtctggctcagaaccgtcagattctatccgggtagaccaactagcttctaaatttcgtatacacctagaatttgtgaaaagatcaattcttaacccttgaaaaccaaatccccctattcatatgttgcaggttgtgaatgcactactcacccaaatggacaaattgaaatcagcaccgaatgtgataatccttacaacatcaaacataactactgctattggtagcctattttgatcctgtcctcagcctcatgactttttctctaatataatagatctttgttcttccgcataatattcacgttttgtgagatgtcacagatcaagatatttgttgcagatgttgctttcgtggatcgagctgacataaaagcttatgttggccctccaactcttcatgttcgttatgaaatattaaggtcttgtgttgaggaattaataagtaaagggatcatatcaagtttccaggtactatataagagcatatcatataggtttcgaattccatattttcctgttaataccactgaaggaggagcaattatatcttataagctccataaatcttggtatagggctgtgatggactctctattccaagcttttcaagtttgaaagaaaagttaagtgaaagtgaggttcatgatacaaatacagttccttggttctgcaaacagttgatagaagctgcaaaagggtgcgaggttagtctttgggaatacttttatactgattgtagagcagtgagtcagtgaaaataaaactgagaatactcttaaaaaaagcaagtatgaattgggatcaacttcttgatgtacagggtttaagtgggagatcattgaggaagcttccgtttttagcgcacgcagcacttgcagatccatatagccatgatccaagtaatttcttgtgtacaatgatagaaacagctaagagagagaagtctgaacaacctgaatgaccatttttgtgaggtcataaacaaataacaatgaagttgtgttgttcagaaaaatgttatgctaattgttgattaaacatcacttcatcatctacagctatgatgaaggggaaaatgctcattttattattttgtgataaagaaacgcagatcacgggttgagtattaaacatgggcttcagatgcccaatgggttattaccatctttaacatctctaaattgttgacaataaacgaatcgatgataaattgataatgaacaattgtcagcaaccaagtcatctgatctgttttttttttatttttgtttttgtcatctgaaaatctaaaggctaagaaaaaacgaggcatgaaaataaataataaacaaagaaagatgaaaaggaagagacaagacagaagacaagacagaagtgagtagattcgaacaagaaacttaaggctgacattaaaccttacataataagacttggatccccaaaagtcccaaaatggagaagaagaagaagagagatgaggaagaaacgagaggctaaagatgaaaatgaagaagaagaagaggagaagaagaagagactagagttgatgaaggcagctgcgcaggcttggctcagccactcccaaacctcaaaacatactgttttagagttcgatgcgcagagaaagcatgcttttgtcaaagggaaggcatcacgtttcaaaacggaagccttgtccgcaaagcatcatccgtcgtttttggattgggaattcggacagtcgctgtgggatccctacgagattctttcggtctctaagaaactggaacgcgaactcactttagaagaacaaaccttctcttcttcagataatgatggcctcaagaagatgaagaagaagaaaactagagacagcagaaacagccttaggagtttgttcactcgttcgtcttcaaagagattctaacaaactcatcatgttactacttcaaacttgtaaatttttctcaaaaagtgaaatcaattatgaatgtcttttattggtctattcaaaaacttttattggtttttgaatggtttctatggatagaataacaaagttttgtcagttgtaaacagtttaatgaagccgaccaccatgactaattgcaactgccatgccgatgattcgaccacgtgaaaatgtcacctgattgagagagatgagagggtaaatgtgaattaaaacagtacgttgtttcaaggaaagctcttctcacaaactcacattaagccaaatacagctgagaaatggagaccaaaaaggcctaaagtgatgaaatcaataaaaaagactcaaccattcatttgacccgaggagcagaacgacataaactaaactgaaataagaaagaaaccatccatgtcttagatagagttaacatagtaacatcatcccaacacaaagcaaaggaacagaccatgtgacgcagcacgaaaccaaactaagagatcaggttttatttataaaacataattattcctgatagataagagagatagagaagagttgccagaaaccaaagagctcatcaagcctccttctcccctgtgaggagatccattaccacgcctttgatgcttccattgttcttcttcagcagtctcttgttcgtcacatcatcacagaagccctgcaaaatcacaatattttcaacattccaatctgcaaagtaagatttaataaattcaccaagtgcagacacacttaccatctcctgaagctcctctaggattggatcccactcgctaactccacaaagagcatcaacagactgctccaggttgtactcgttatccctcaagatctccttgttcaaatctatctccttgaaacccatttcctcgagctccttgagcatggttatctccacgtcattcttttctatatcctcctgaagaggaactggcacgtcttttgtagtagatgaagaaccaccagacaagacctcaacagcaggcatgcttgggaagtcgaccatgttaaatgaagaagatgaagatgaaggagaatgaccgtgagggatagcaggatgagcttcaccaaccaaaaggttttctttttccacggcctgtgtttcaccaacttcgccctctagatcagtacctttcacggtcccaggattgacactggagctgccaggttgagctgactcataattcataatccctagaaattcgcttggaaaattctcatcaagggagggggaggcattaaggttcagtccatgaaactcattcacaacagaattcttcagagatgcatcaacctaaccatgcaaaaagaaaaaatgtatcaaacacatatgatagaaagagacaaagaattaaaggacagaagctgcacaaatctagtaagtacatgtatcaacacccaaacacgttgcccaaacttagcaccgtcagaggtagccatcctccaataagaaatgtatcgaccaggtaactctggtgcaacaaaatcaactttgacgtcaagttcactatagataggcacaccctcctttggaatctgccatgtgtaaagagagaaaaaaacagttagtattatataatcaagcagctatagtcacttcgtgaagaaaacaacctaactcaagccatcgagtgtaaattcaaacaacataattgctctgttagtggtaagaatcgagctaaaagagtgaaaactaaggaaattgtttctaacctgtaaatcaactgacaaggagttgcagaacctgtccccaccgatccagacaatctgtgtgccctgtggccacaccagcgaaccactgttcctcattttccaaatcttagtaaatggggcggatggagcaacaacggttccatcaattacattcacatcaaggacaaaccgactgtctagtttagggcgagtacacctgagaggtgcacctccattggttgctcgtggcacagggtggctcaaccaaggattaggaaactataccaaaaaaaaaagggtaagaattcctcatagctatcagagaagacacatagaataaacaagaagaaaagtaattataaacttagaagaagagcaatacttgggtaaacggtcctctaaaaggatgcagatgttgaacggatacaggcttatccattcttgtgtaatccccctcgttacccatcaccgaatagcagatggtgcacagatcatagtcttctttactgcacaatattcacaagcgaaacatataagcacaataagttctagcatgtttatagtttctaaagtagtaagtagaaggcatccttacactttcgacttaaatctaggcccagtaattggaagaactccacatccgtcacaacggatgcccttatggaatacacccaatgaagtccagtaatcaccattggtgctctttttggaatgacaaacacgacgaggatgcttgttgaggttaactggatttggacaggagtaattcatggtactgccactaaagggacactcgttgaaattagcacccagtccagacgagtttggtacatgaccagaagtctttgaatgagcgccagtgggttcattcagattaacaggtttccttccggtctgggtcctctcagagatatccttctttccaccagcggaaggaacatccctgctcagggaagcacctgaagaaccaggcttggtaacaggtgagcaaggactactttcctgaggaattgagagctgccctagcttggaaatgcaatcaagcatctcaccaactacaggactagaagttgaggccttggatgcaaggtccatgtacacctttgatatggtatcacgcatcgggttaggtacagccatcagaacatcatttatacccttctggattttggaaaccgggttaggcatacccgcaggtgtggaactcccactactctctggagcagcagagttagtggacacgccagcgttcacattgatctttaagaacttaagacgctgattagtaacatcaaagagatcgttgtcatcaacaagggcaaccacatccccatcctcatcagagtaagtcagactcaattcagcatccgcagagaggttaaagagagcagcgatcttttccttaagaccagccatttcaagatcaagctgtccattagctttaacaggcaccctgaaacgcctaagcacacctccatagctcacctacataatcacaaacaaaattagtatcacttcaatgaaaaaaatgaaaaaaaattgtcgaagaaatagattacgattctaattacgataacttatagttttaatcattgttcgggtataagattcaagcagatactgctaagtatgtctggaaaattttcgaattacacttaagattataatacagagacagagagagagagagtcgatccatagcgaaattcaaaaggaaaggaccgattacaagcaacaaaatcaacagaaacgagacgatcgccacgaaaacccagaatcaccgacaattactgtgagaaaactgacgattcgcaaataaagaaaggaaggttgtatctctaaccttgacgacgagtgcgttagcagtagactccatcggtaacggagatcagatcagctggagagaattaaaaggcaagcgagaagaaaccctaattgaagaaaaagagtatctagcgagaaaaagagagaatcggggagagatttatcttagaagaagcgtacccgtaatccgcttttctcgtaaacaaccaagaatttagacggtcgcgttttatactatatatcattacacagaatatttattaaaataattaatttaatgggcccttttgtttatttaattaatttctgacttagccaacaagattttgacttttttggttactactggcttatccagaaagacaaatcaaactaacatccctaagttaaagccaaaaatatcaagagatacgagtacatataactagatattttatttttcatactaacattttgaaaattgaccaattcgagttcttataaaatactacatcttttatgttttctccaataaaatgatcagatactattttattttattaaaacttcaactcttatgccgaccacaaaaaataaaaaaacattttaaactctaatttatgaagtttgagaaacaaacaccaccaattccaaaatccaaactcttaaaactcttatgtttgctacctaacctcatataaatttagtaaatttaattagatattttcttattattacgttttgtgaatataatttatcatatgaactttttctgtacattttggtgcgttctaataacttagtaacattgatatacaattttataatataatagtcatttgagacattcgacattcgacatacaaaaaaaaaaatatgagattctatatggctatatgcaagtgaaaagaattaaagtgtgacttgaattactagcatatcatgatgtgattgtgtagttgatgacaagagaatatatggaataaataattgtttgtacaattaatttagacaagtttcaaaacgcatacattgtatcaatatatcatatattgtttttatatgtgatcatgacaataaaatattagaataatagatataaatatatatattatactagaattgatatttcgagttatagataaatctaatcataaaataaaaaaattatattaaatagataggaatttatcaaaatgaacatcaaaatcaaccaaaaaacataatcatatttttttaagcaactttaaaaacaaaaatactcatgagtattcatctagtgtatacaaaaggctactacagtagttataatcatattcaaacaagtgactgaaacatataataataaactctcaagacaaagactttttttttttaatctgccaatacctcctcggataggtctcctctcagcaatctcccaagctatgtgcctacgaattagcttcctcaatcgccatatctcaaaatgcaagtatcctcagcatggcagctcttactacctaaataacaataagaggccaatcttagtttctatcaccagtgaatccatgaccaccgtttctcccactagtacccctttgctgttggtatccaccctgcctttgctgcccctgtcccttctctctgtatcttggaccttctgtctgagaactctctttcgattgttctcgactacgttctccatcataagtatgagacccaacaggtttgtattcataatgcagattttgcttctgtctatctctgtttgaaggtggcctctgatggtgatggtgcatattctcttgcgccggtaaaccccaacctccttgtgactcctgccctcttccaaaccgtcgaccctgccctgtgttcttttggaacatactattcggattttgctcaacctggacctccttattggtagatcggttttgcaactgggcttgtgtatcagctgatgtcgttttttgttctgtagtaaacccttgatgctcgtatccaacaacatttttttcctgagatccataaggtttgtcccttgtactttcacgaccaccatacttacctgtcctattagctgtatgccacacatgatctccagggacacgaccttcttttgaagcagcaggcaaatctggttggctaaacccatggccagagtgctgcgtatgagctttattgaaatccctcttattgccttttttagggtcaccatagttgcttcctccatccttgttgcttcttgaagcatgctgcctgccgtgcatgctcattccttgatcttttccaacagcactggattccatttcttcggcagcagagtaatgcgtttcaggagtcatataccagccatcgttccatccatccttattacatgtggtttgatccttggcagcaatttgttcggtttgcttactagagtgatagttcactgttcctcggatgggctgatttgaggttacaaattgtccatcctccaaagctttagtaggtgctccagaacctctctggtgccatgatgcatgttctctaccatgctttccctgcctaccattcccatgtcttgactttgaaggagacccagatttccctgcagttgaaccagaaggttggagaattcctgtaccctcacctccacgattttctttctggtttacattctccgacatatctggagcagaggttactagatttttactgacgatttgctcagccatttcctttactataggcttcggtacatatctttcaatttccactcttttgcttttagaactagtctgtccttgatgctgactttttgaagaggtgccaaactcagggacagtagtctgactccctccaccagtggaaacatcagctttttgctgtggatgtactggagcccaaataacagcattgttgccagaaaatttctctgcaggcttatttaccagtgagtttctttgagtcctacgcacatgttgagatttccagttgtttttagctctgttttgagactcttcattagtgaaggaactgatttgttcagacgaatcaccagacactttgatatccaggcttggaactgaaacagaccccaactcaatttcagctgcccttgccctagcagtctcaattgactcatctcccgattttgtttcttttccaacggcaactcttgtagtattcatagttgctgtctcctcagccttgtgttttttcttaccattcctgttattttttcttttcgggaaagttgactcagctgaaacggttgacgtcgctggcatgtctgagttattgcttgagacaccttcattaacaacctcaggagacgggacaacatcaaacacctctgcagtagcaacagagctccctgtcggttttttctcaaatataatattttgcttctgcttataacccaagcgcttctgttttgaggcaccgccatcacgtggaagattatcctgttgggaagggcccacattatttgcatattctgttgaagtcctcgtgttttgcgttgtgttttttcctgatcctccagtaggttctacggaatttgtagcattagatgaatgagatccaggatctgttggcatgtcagccggagaagcattagatgcagcttccatgttcttaactgaaccctcctcatatatttgggaacgtctatttaactcttctagttttgcaagagccttagcccgctgatctctcgctctttcttcctcctctttctgcctctgttgagcacgctgcctggctaactctctcatcgtagaacgcttttaagggaacatggcaaacactcagtcaaaccaaaaaaggatgactacaaacaagagatacataaaagtataaataacaaccagaatcatatgaactagtttatacctggttatcctttgggtctgctgatattcccgacccaggcctcctgatggactcggtatccaaagagtcatcgacattaacctcgcgaaagctttctgtgtttgtagctaaagttgtatgggaggagcctgacataacagttgtcttctgccaagcatcattgccttcactgttcactattcgtttggtctgcggatctgctctgccttgagtctgttgagtaggtctcctgtaggtactaacatcaaaactttcccgacataaaggatggcataactggccgaaacacaattgaaaaatgataactgacctgaatatgctagttccacccatagctgcgggttcagcattcttgtttgtggcagaatcaccttgattatagtgtgatgagttcttactgtcacttgcatgaccagttcgatgatttctggctgaaactttatttgcagagttcccagaattgagtgtacgtggttggctttcctgctcatctctattaacaacagatgacgaattttgccaaccatcattagttctagtttttgcatttaagccctcgattttctgaatcaaactaggatctccaggggcagcaagttctgctttgactggttgtacttcaccacttgcgtcatttctgatttctctcctctcgtttcttgaagtttgcatctgttgagctatcttctctgcattcgggagcctatttccaagaaattcttcccgctttgcattatcttccccaaacctcccatcttggtgctttaggagaaccttgtatggcctttgtgtttcttgagaatgtgatgactcgttccgttccaaagacactgaacttccaggcgtatcatatccaccttgaccagaatgattgttataagcatgcggaccagtaggcctacctgcaaaaggtaggtctctgttgctgggactgccataccccatgggaggaccatagtagccttcgtgtggcgctggaccaacataaaacccaggcctagtctgcatccttgggtggacataagagtcaagcattggaggtctgaacattctttcattattagcgtgattacccctaggaccagccccatgtccaggagcaggtggaacttgcgtaggataaaatggaaaaggatccatgtgaaaacccccaggacccattggggcaccatacgggtggttccctccgtaccagccacctccttgatgattatttactggaggaccacgccaagcatcataccgaggaggaaaattagcattaggataagattgtgaaccacgtgagtccaattgcccttcctctctacaatgtctaggtgcatcttcactgtatggttgattctctcttctccaggaattggcatccccaatccggtcattagcttctgcaaataaaagacaagatatggtcaaatatagtgtccgcgagaacatccactaaaaagatgtacggggaataaagcagtaagaagaattcacatgaacacctgtgagggtaacatggccctctcataagagatgattataaacataagtaactctcgaaatgagatgccaacatctgttgtatatccccaaaacatagaaaaataggtttgaaagtaagaaccttctgtgcaatctacaccttgcccttccacagatcttccagacgaagatggaggacgagcgtgaggtccagcatctgcaaatttgtagtttctaagagccatgtctaacgtatctccttcatataagcacatcacattctatctaggtaatcctaaaattctcagtggcacatattaggaggtcatctaagatcgaaaaagtggtcaaccaacagcaagccaaaaaaaaaggtcattcccgaaagttttaactttgctgaatatccgtgtagataaacttctcaacagaattacatttagaagtaccaactttcaaaatgaacccgtctgtgctaacgtcactcccttgaaggcaaggacgacgagtataagattgaattgtgtacaagttgaaacaatttttttttcctagtttacatgctgatcgtactttttgaaaagagcaaagagaactattcttaaatcaaagtactgtaatgcatggatgacacaataatttttactgttaatagatggtaccttgtggccttgtactcttttcagaagtgtccttttcagcaccaagggaaggaaaatctccagaagtcaaagaaaacccatcattctttgatggagcaactccctgtagaaaacaatgagaagtctaagaatgaagataaatttcatggtagataatgcaaaggtgggtaaattgtacacaactattcttcaaaaaaaaccttgaagattgaagtttgccaaataataatacaaaaacccttccatcaaattctatttgcccaaccagaactcgagacttattggagaccatgtgccactcagttgtcagattatcttacgcactacaaagcatttctctaagagaaataagtgccctataatttgacaaatttagcatcctaatcttgttcccatagcaaacacgaatgatgtatccagctattaaagttctatctagattgaatatcaatcattaatcccaaaaagtaattaccattcacagtcccaaaaacataagaacttgctgtgtgtttgttgtaactaagcacaagtgaagtaagagaagagtgacatggagcttcacagatgtaaggataaaaaaagatgcttagcagagtcccgataaatattagagacgactttaaagggaagaaccataccaacttctctggcgccacatgttgaccccatgttgcagaagtctctgacacgggttcagcaaatcgggataactgggaacttcctggtcttgtgtctgcactatgtggacgctgtagtgcaactgatggctgattagatggaaacaccccagatgctgatgaaggccgcgagttcgaatcccatgcaacagaagaagaagagtcatgtgctttgttactatcggcagttgaaggtcgagtgacacttccaccagaagaaggtcgattactgaggtggcttggtgaaccagggccactttcagttcgtggtgacaaggatgatgtcccccaagcattcagtgatgatttactgccccaactaagtgttcccctaaaatagatgtccagaagaaaattaaaccatctaaaatttgaggacgaaaaagaatgagggaaatagcatctcaaacaggtacaaacttactttggaacaatttctacatttgggtcaaggccttggttctctaaccttaaattcagaagagaagtgttcagggaacgagattatacatatatatgaagtctaaatgtgatcatgcgctcatcaaatacctttggcttggtaagttaatcggttttggaacagcaacctttcccaatatagtcatgccacttcttcttgtagtaccccatctgctaatatccagcacatgtaatttctcatcatcaccacagaggatacaaagctctttaagtgtaaatgagcaaagtataaatgattatacaatttattaaaaaaacgatcagctctttacatatgttttctacacacattttacaactttcccttcttttaatctaaatggtgatgttggcatgttgcaaatcaataataatgttgaataaaattattacaaatacatggtgaatgtctatcatgcaagcaagctctttcaaagaaagaaaaaccacaccctgagtttccttctataccccaggcacatatagtgattctatattttaacaacagttggaatatacagcacaacgaaaacaagtaattcatatgaagaaaaggccaaatcaaaagaaaaatcatgcaagtaacgtgcaaagaggccaatatataacccataatccagtataaaaacatagaaaagttcatgacaaagataaagttgaaagaagagaaaccttcgatctcctgtcgtgctagaggtcattataaaagcagctacacgatccaattacaccacttgaaacctgtaagtcacatacagaatcagattcacaaatgaaatttgaagctcaaatcccaaagaatcaaacaagaccgacactgaagaactattgctataacactgctaccgtgaaatgtgttgcagaatcagactgcctatacaaattctccaacatgaattgaaatactttctaaaattcaccatcataacagaaagacaatgttcgacaatcaaattggtacagaaacctaaaagtatgaaagatcgtcaaactgcggaatcaaaagaggttccagactaaatgaccgcaatactaaaaaaacaattgacgtattcccagaatgttgacaatttcgcaatcaacttgctagaacaacaacagcaacaaaaaaagagctctgaaacatacaaatgtctccagaaatgtcaatcaagctctacaaaaggacccaaattacttcaaaatgcgataattctataaactcatcactcgattcctctggaatacaaaggggaaaaaaaggtagagaagaaactgaccaaaggggattatagagaaaatctgctctctttttttgaatagagagggggggtcctcgcaaaccctagatattaattgtgagaatcgaacgaagagggtgcagatcggatgtgttcctgggcgatgagggaaaaggaagaaggggaagatgaaggagaaaaggaaggatctgtgggagaaagaagaaagtgatgatgattgatgaagatgaagcttattacgacgacgttcaacggattggttgaaagaggagaaagcgtcgaagttcagggctgcacggttttactcagcttttcctctctctctttttttttttcctgtgaattgtaaaatgaatgccgattaaaataaaatagagcgaataaaggatcacctatctccaaaaaacaaaaatatatatataaattaaaagagtagtattattcattaacatcatttatatatttacctacccattttaaaagatagccatagtttgacaaaaaaaaaaaaaaaaaggatagccataaaaacaatacttaacaaaatagtttcctttcttttacattttacgaatgttaaaaatgggggagaaattgaattatgtggtaggttcacttcttcattttaaggacatgtttagggaagtaagacgatggcaggcatgatcaaatgaataaggttttttgggtaatgcttatgtttatcttccaaacctctcatgtttctttgtggagtacactcattctaaggaaagatcatatattaatccggtgttttgtaatcgagggttggaagtgttcgtacatgcactgtgtacatggtgctagaggatgatcttgagcggatttgagctcaacgctagcttattttttttcaaattttaaaattttgtgtaaattttatatacagaagattttagataatgcatagtttgatttttattaatttattacgagtagtcttagcatattttaaattttcgtgcttttctccaaattgatacttaagagttagagagaaagccaacaaacttaagaaagttagagaacgagacacttgaatgcttacaaatgatgatcccaccccattttatacaacttcacctttgatagaatcatattcaataaacagtaatgtatgaaaagaaaacaaaaaaacaaatatacttgaacaatgaccaaatataataaacctcttggatccagcccatatgatctttgctaaactcttgaacaatttgggccgtggcaatatgtagattttggtccatggatcatttatctattttaatgttacccttgcagagattattttcttctctttgttactttcacaatcaacaccccaaaatatgttattacaacaatttcaccctaaatcgttttgtccaaatgtgtaaattacactaaacatatatagggcaaaatattacatagtcaatataatgagccttaagctaatctaattagatgtgaaaacagagaagtgacgtaaatctagaaaatattgttacacataaagcattcaccagtcttgtactagtaaacagagatcctgaataaattcagtgtctcactcggttcatgtactgtcgtttccaaggtctgccattgacaaaccgaaaagctgaaactcttcacgccaaagccaaaatacaataactttttcccaatgggaaatatcttttatcgtggagagaaacaaacaaagagcttcgacctaattacacattcttctttttcagtttacatataaaaagccttctagcgatcctttcactgtggccaatttgttctgtgaccttttgatcctctgcctgcaattctacaggtattttgataggtagtctcagtttagaatttgtctactaggattaaaaattcaatttcttaaaatcgtgattggtaatatttatgagttaagtacatgagttaggttcgtaatccaatataaacacattgttatacatacctttatctcttgagattcttcaagggttattttaatctcttacaaaaatcataacttcgaatatcagccaaaaaaaggatcagtctcgttggacaccacttgtttgtttcctttgttttttttaaaagaggtctttatccagctatcccactctgctcttcttctttaagcattttgcattcttgtttcttggttttgtgttttagttttgagagaaaatgggacagattccgaggtttctttcttggaggaatatgttggtcctctcgttggccatcaacttcagcttgattctaaagattttgaagggtgatagagaacgaggagattcatgggacagaacagcgtatgttagcatatggcccgtggtatccaccacggcttcagaatcttcttcgttgtcttcagcatcttgcaactatagcaagattgaagaagacgatgatagaattatcaatctcaaattgtaagtttctacttactctcttccatgtgctagattacaattttctaaagaaagttctgttcttgtcactatagtggaatttttgattgcttgtttattttttcttggtgttcagaataataaatgtgtattaatggcgtatcctctagaatctttagagaaatttctcccttatcctatacttgattatatagcaaggaatctaagattatcctttaagcacgcaagtgaagctccaagcttttatgcaataatcaccattcgattttaaatgcaaacattgaaagagggataaaatagtcaatctaaaggttttgattctattttcctaatgatctttcattgacttgcctatattttctaacaagttttctatagttctgtcttggttctgcgtatgcttgttttccttaacgtgcgccgctagtttgaatatttggttctgttatttactttgttatgagtcttatgactcatcaaacacacaaaaaaactttgcaaattgatcatggtggtccatttgttttctttttagggaatttagatatatttgtcataaatgtcaactgttaagtattaaaacttaaattggaaatgggccattcttcttgttaatgaaagtaaagaagagagtgacttttttttttataataaggatttggtatgttagaggaaaggatggtagtgagtgatgtttctttttggatgctcgcaattaatctagtgtagtgatagccaatgggtttcaagtttgaaaaatttaggttgaggagacacttggtacatcagaatataaaactcttttgattctttccaattccattgtcaagtaaaaacttttaaatagggaatagtaaagagagcccacattgtggtgacatgattctgaatacataaatatttcatgtcctttgagggaatctaaaggactagtctggtgatctagtacttgaccatgtttttcactgttgcagaaataagaaggtgatgttttatgttctccattaaataaaaggacccactaattctttacctctatgctcagctctcgttgactcaaagattaactcctgtcacacggtagaatgtatatatatgctaatcttgatgtgtatatctctatgcagtggtgatccaacggtgtatgagagatattggcaggaaaatggagaggtgacaacaatggtgatacctggatggcaatctcttagctatttttcagatgaaaacaacctctgttggtttcttgagccagagcttgccaaagagattgtgagggtgcataaggttgttgggaatgctgtaacgcaagaccgcttcattgttgttggcactggctcaacacaattgtatcaggctgctctctatgctctctccccacatgatgactccggtcccattaatgtcgtgtcagccacaccctattatagtgtgagtcatatttatagccatctcaaaactatctgtatgtcttgttagacacgccattttgctggatactagtttttttttatagttattttagcacatatatgtgtcaatctaacatgtataaccggtttggttgcagacatacccgttgattacagactgcctcaaatcaggtttatatcgatggggtggagatgcaaagacgtacaaagaagatggtccatacattgaacttgttacatctccaaacaaccctgatgggttcttgagagaatcagtagtgaacagtactgaaggtatattgatccatgatttggcttactattggccacagtatacaccgataacatcaccagctgatcacgatgttatgctcttcactgcttcaaagagcactggccatgcagggatacggattgggtaagtacaatcttttgcttttgtgggagcaaaacagagaacaagtctcttaaacgttacattcttgttcatttaatttgcagatgggctttggtgaaagacagagagacggctaggaaaatgatagagtacattgaactcaacacgattggggtttcaaaggactcacagcttagagtagccaaggttcttaaggttgtgtcagacagttgtgggaatgtaacgggcaaatctttctttgaccatagttatgatgctatgtatgagaggtggaaactattgaaacaagcagcaaaggatactaaacgtttcagtgttcctgatttcgtctctcaacgttgcaatttctttggcagggtctttgagccacaaccaggtacgtataaagaaaaacaaaagtagaaatgattgtagaaccacttcttttgtttttcatttggtttggtgtgttttgtgcagcatttgcatggtttaagtgtgaagaagggatagtggattgtgagaagtttcttagagaggagaagaagattctaactaaaagtggaaagtacttcggagatgagctaagtaatgtgaggataagcatgttggatagagatactaactttaatattttccttcacaggattacatcttcctttaattcaactttgtaagtgcatatgcatgtgattatgatcgattgtcataacttgcaacaagtgttttgctccataaatattattggaaatttgaataatgtgaaggatcaatcaaagacctattcatcaaaccatctctgatgatatgaatgagcaaacattcattcactacgacacaaccgagagtttgttcaagcgttgtcagcattttggtctggaactttgtaatctcgaaggatcagatccaacatctcatagctttttcagtattaaattccagccttaggtaatccttcagagtcatatcaacatttttgctacggaaggatcattgtcgctaccttccattttacatttgtgtcagctttattcacagcaccgttttttagccgcatcaactttctttctttgtataattcagaagaatgaaatcatccaaaatcatttatatttcataacaaaaatgttttaaaaaagttgaacataaaaaaaaaaaaaaaaaattccaaaacaccaactaaactctcaaaaataccaaattgtgaaagttttcaaaatataatctcttgtcactcattcatcatactctaaaagtttaactttcatggtttgtatgtgaaaaaataaattaaaacattaaaataaagcttttagaaactaatatgtatccacaatatacatatggatgaggacaatggtggatgtgcacaaccacacaaaaaccattcacgtgattgtatctgcaaaattcatcatcaactttctcctgactacgccacatcatatttgtttgtggaactattccatcgtcaaacggccgttcgtcttttgtctttttccacaaatctactagctcccttctctatcaacttgatcgtctacataactctacttgtctttttccctattcacaaattagtctttttcttgagattagtaattattttgaggccaacttgatcagaatctgagtttgaattccaattatacccattcttgaatcttaattgcatgttatatttgtttccaaacctattcatatccttactcaaaacaccatgtttgttgttttcactttgtttgatgcatagctcataaaacatcagcgacacaatttcttcacacaaaaagataaaagggtttataaccaagatataagtttcaaaaccttcaccataagcaagaagcataacaacttcaacttgtatacatttttttctagttttgtactaactagatatagagacacaaaaagagagaaaacatgattaagagttggaattaatgataagttgtaaatatatctcacataaaacgtgtttgaattccattttaaggataaatgatagtacttcagatcttaaatgaatttgttgcaacttgcaccatgatttctttcaaaccaaaaaacaggtctagaccgggtggtccacagatttttggctcacaggaatattcctacatataacactacaactgtacaacatacatatagagcagtagatagtaaattataccgaataaaaaaatctagttacatttcaagtcacacgaactgttagaacggttcatgttaggctcagcatatttctaagtaataaattttgaaatcgaaaaggcttttctaagtatagccggactgaattactatatgagtcgtggacttaccggtccgacggtgaacaactattggttccgagaatggtatttctgcgttcagaattctgtgagtacggattaataatatatttatactgtcaattgtcaaagagccgatttccgatttaagaaactaatttgtttgataatgaacacaaacaagaaaccaaaattaaggccggatttatacccatgacacgttatctctacgtccaatgctcttgccatttgctgtgatccgtaagttcccaaagacactttttctttcaccacagtcccacttttgatctttttttttacagtaaagtcagaactcagaagtaccttgaacaaaaccctaaacgcacttttaatattaatcactctcaaaccaccatttaattattgtaaatcatatactccaatggaacatactttttttactgtacttttcatcaaactctaaaaaggttatggcttatgggtgttctttttggatgaaactatctatatatgaatattattctaaaacaaacaaaaaaaaacgtaaaaagttgagactcccttttattaagcggcagggtttgttgaccacactctcatcatctatctctttcttatcttcactgttttatcttttctttcggattaaattaaataattttttcctccataatttatactcttaactctcatgaattattggtctctctattatagttttttaagtaacaatctaattgtagtacggatgtctcttgagatgttcaagaattaagaaataaagaaagagggatcggagaatgaattttgaggatcaagaagaagatatggagatgtcaggtgttaatcccccctgcggttacgactctctaagcggtgagggagccacatctagtggtggtggaggagtaggaaggagtaaaggagttggagcgaagataaggtatagagagtgcttgaagaaccatgctgttaacataggtggccacgccgtggacggttgttgcgagtttatgccttccggtgaagatggaacgctcgacgctcttaagtgtgcagcttgcggctgccaccgcaacttccaccgcaaggaaaccgaaagcatcggcggtagagcccacagagttcccacgtactacaaccgcccgccgcagccgcatcagccgcctggatatcttcatctaacatctcccgcggcgccttacaggccacccgcggcatcgggggacgaggaggatacatcaaatcctagcagcagcggcgggaccacgaagaggtttagaacgaagttcacggcggaacagaaagagaagatgttagcctttgcggagaggttggggtggagaattcagaagcatgatgacgtggcggttgagcagttctgtgcggagactggtgttaggagacaagtgcttaaaatctggatgcataacaacaagaactctcttggtaagaaaccctaattttgctcgagacatgatttaaaacactagaggatcataattgtttctttttttggtatgactcttctgtaactacttctgcttattagttatgttattttttcctggacatacagtttcttcttctagttaataatcgtatctggtcgtttcggacagtttaggagacattgtgattaatctttattaactttggttcgactagttaattccataaatttactgaggatgcaattgaatgatgaaccaaactatccaaatttaaagtacagtgattaaaccaacattggtaaacaatataaaagtatactctctgttattttcctatattagtattgccatatacctatgttaattagatgattattaaagatccgttgatcaagatatgtagccttgtaatttgtgatagttacatattgttgacaaacaaataaaatgataaggaggattagagctaggaatcagctatagtctacgtaagttatctcttatagggcggttaaaatgaactaatctaagattatctgtaaaactgaagaaaaagttcaaaaaagcaagaaaataagatctgggaccggtgagcatgtgcaacaatgagaagccatggacgattgtagtcgtataggtgtctaagcataacatgccattgcgggataatacactcgtaattaaaaacaacaaaacatgttgtttaaataggtaaatgtttaaataacatgttatttatttgcttattacgcgtgtgatatccataaatagcatatgatatacgaactgacgcaaaacacacatatgaataaaacaaaacgcagttaaggaacatttttctgttgtaatatccaagttttgcaagggtctcatttgacctattttttctaaataaattttacattaactgaatatttccttagttcattaaacgtattttgattttgttcaaaaagacttcgaaccgttaaatccggattttatatatcatgtgaacagaaggaattgaaataattaaactaatgatgatttccgaaggatgtcagacgatagatttccatcttgatgaagaaaatgacgagagaattcacatttgtcacattcctctcgctatcttaccaaaactcaccgcttatcacattaactctctcctctcttttttcttcttatataaatgtgctttgcttttgtgttgagcttgctttgaaacttctcactcttttgtctctttcacagcacgacacaatcacacaacccaattattaaattaagcatcaattaattaacgtaacgttttgatgtaaacatatcaaatgtagaaaacatggtgaaatgcttaattgcataatataagccacgtgtgtgaaagtgtgtttggggttattgggccgaatattgatgggcttaacaaaacgaaaaagcttatctcaaaatttctcctttcaatcaacaaacttccatgcattttcctctcgtcgatcttcctctcgtctgttcgtgtttctaatacttgttgacttgttgtgaattgtttaaccgaggatgtctcgattcgatttgattgataaaccctagtttctttcgctctaagattggagaaatgaaaatctattgtcgtttttaggttgcggaatcatatatattgaaaaccgcacaccctaattgtgagaatcgatcttttttattaaatcaagctcgaattctaaattttgttgatttcattctaagattcgagaaatggaaatttattgtggttgcaaaacctagattttgataattgcacagtctacgaaccctaattttaaggaatcggccttgtataagttattttttttgtctccatgatcttctgaaagcaataaatattgacgtttaggattatgtttttttatcttcttcagatggctatcaagttttcaaacgatacgaagcgacttcagctcattaacagcattagagaagctcatgttggagctcactcaaatcaagcatgtcattgatcttctcattgatgtttatgtttgtgtcccctctttttggtcttcgtatgaaagctataaatcatcgtttatttaatgaagctgatttgtttgttatttaacttcaatcttgtagagaaggctagccttaacacccgagcatataaatgaagagtgattatatatgttgatatgcattccaataaggctgtttttgatagtttgaggaagaatccgatattgcattatgacggaacaagattctcttacaaggtaactaaacatttcattcaaggtagatatgtttctcattttctctttgaaaaaaagtttcacgtgtttacaattttgctttgccgccatcacaggctacttaacgatgtcaaggacaagagacaggttctttcgttggtgggtgaatacactgatgggattgtggtagttgttctcaaagacgcttagccgaatgtcatggaggatttgaaggtatgcattgttataaacttataattaatgagagagacacaaaacaacagttttggaaatataactccatataaatatactttattaatgtatcgcatgtatagattcttggtagcaaatctgaaatcaacggtgacatgagaaatggtcgccttgaatcccctatgttttaaagacttatttctactttgagtatgactgaatacaaaaccggtttcaatcttgaattgtgttttctatacggcgtcaaaagttgtaggatccatctactgttagcagatgggggaaatatatgatgtttcttgatagcaagaaggtaacggatgtcttgtattttgcaggctcttcaggcttcaggagacatctggatgtcttatcaaattcacgagaggtcattgcgtacccaaatgatttaaagagtgagaatcctattccgttttggattattttaattgatgtcaaggattcaaggaaataattagatgagaacctttacatagaaatctcttcatctcatttagaagttacaaatccgtccacatttttttctaccatcccaccggccatttttgtttgttgatagaaattgttttaatcgtcttcaacctatacattatgtacaatagtaaactcaaaaacctcataaattacgaccttaaattatatactttttttgtatcataatctttgaaaaataatccatatagatttatacatttctagatatacatttctctaaatcatattgtacgtaaaaatccacatatctttaaccatgcatgttttacgtacacatttataaatgaaaatttttaatctacgatattatgtttactatttcgcgagggaatgagtccttgttaaaactataaatagaaatcaatatcagtaaaaatgtattatattaaaatatttataaagctaatatgaaatttttttatgacatttgttttgcggtgatattagtccaaactagttaagacttaaaaatctttttagtaaataaaagtaataataataatagttgatcggttggtccaagtggctcctgacaatcttcacacacggttccaacacttccttgttccatatctttctctgcatctcggctacaccttcgccttccttggctgccctaattgcctctcgaaacgatgctgtagcatccaccttctttatgtcccacccggcatttctcagcttgttgatcttcgtgatttgatcctttgtgagctgaaatgtgttttctttgatggctctcaccgccttctcataagcctcctttctcatagggtcccatttatccatgtcattgtcccacttgtacattttgaggtagtcatcaaactcttgcactcctatagccttccatatccccaatggctctttcggggccttcttagagcggtggaactcagcgatctcctcgaacatacctgacttcatcataagatccaaacgtaaagaaagatactcgaataacacagactgatccacatctatccaaatgaaacaacaatcatatttcaactcggagcagattgagcccttgtgatcagaaaacggatagttttcagggtcataagattttgcaaggagagcatgaatgtatgagttggatccaccggcaaggattgggagctttttacgttgagtaatctcggagatggcttcagccgccataacgcgaaattctgccgctgtgacttctccagcctccgggtttagttcaccgagaaggtgatgtggcactccacgtcgatcttcaatggtcgattgattcgtggtgatcttcaagccatcgtagaactgcattttgtcagagttgatgatctcggctttaaaatgtaaagcgagatcaacagagagtgatgacttgccagaaccggtggcacccatgatcacaaccattttgtcattacacttcatgtcgtaaattgagattgagaaacacgaatatacacaaacaatgttgctatgctaatatcatattttggttaccccatgcatacatatatatactgtaggaatgtgtttatgaatgaaaggaaagcttaaaattgatcacataagtctattataactctatattaaagttttcttgattcgttagttttgttcattcattattttgtaaatatctatattaacatttttgaagatatttttatctaaaataagaatgtaaatattcaattttacaaacatagaaataaacataaatataagagattttgtctaaaaacatatttatcattttaatttgaaatgtctttttattgataggtgtttacttgccaaaaaaataataactcctatatgattttaaaagacagaagttcattcattcaacaatacatagataaaaataaatattctagtcttgtatagataaatatttataactagtcataagttatagcagcttgatccaataaaaaaataatagccaagttattttttttgtttttgacatttatagatcgacatgtttgatccataaccaatttcctactacgagtggtaacgcgacttagtggaatcgaattccggtgaagaaagcaaagtcaaatgaactcctaattattgtgtagcttttgaaacactttattttaataaatggctaactcacataataaaacgattttggattatacatgtagaaagaccaaagtaaaagcagtcttgcaccgcaaccttcttctccaccaacacgattacacgatactatgaatccttgtgccgtcgttagccacaaaatcaacttatgccaacgatatttttccatactaaggctaaatacagacccgactcacatcaaaagctaatgaatcaatgaataatggcatccaaatttgtggggtgaattttaggcaaaaagaaatgaaattatatgctaaatatacgaatactgtaacttacatagcaattgaagttactacgtatgtagattttttttgtctgggcatgagatatttatgtcaaacacgaaatgcttcaacaaaacataatgtattcttttataatatcattttatctcaatgttttggcgacatttacaatgagcctcatcaaggcaatctttgttataaacagaattcattttttccttttttcttatttctcatattataaaacgtagacatgttgtcatcttatataagtcttaagcctgatattattatcgaaaatattcatcatgtgacattcttctgaatcttcaaatatatacggctcgattaaccatgcataattttaagtcaactacaagtctacaacacttgtaaatcttcttaattcgttgctctcgtcttgttttgttaacaattgacaccgagcacactactactctggtagtctggttaattaagtatacctttttaaaaaaaaaaaatcggagtcattttcctgctccagaaattagatagatacaaaattagtaagagatgcaaaacttaaccacattatttcaaaaactgaattactaatttaccataacacagtttctatgtgatgtatacatattcatttacttatttccatttgtattatgaaccaaaaaaaacgaaacccgctcggtttaacatccattagacgcgaaggcgcatgttctcatcgtcgtcatcaacggcatcggcggctccagctgcaagatcaagtagtttctccatctgcactgtcatttccttgagcgtggttgaagccttgtcagtgtttttcccaaccaattcattcacgcgcctcatgctgtcactggaagccctgacgtcgtagttagccgtgtcgggggatgccttgagcttcacatttgcactcttgagatcagctgccacggccaagtaggccttgtggcactctgtaaatgcaaccttcaccgttggatctttcttcgcagtctcatctacgaaaatcgctgtcttctccgcgtgggatatggccaagttgatcacagcctccgacaatggaagctgtataagatttcattttttagcataaactacgataatgatcattcccattaaggattgagatgtcaaagaaaaaacaattcgtttacaataaacaacatatgtttagagatgttaatgtttgtattgtttcaaacccttaatctttttggcttccaactaaaaaataaactggtaataagtggaccagatcagaattcttatacgttactctaagtatcttttaatttacaatgtgtgattctaaacacgtcaatttctgttttaggtgaaataatttaacctaaagaaaatgaaacatttcaactttttcatatataaaaatatttgtgttgctgatttgaaaacaagcaggaataagaaaatgcaaacaaataatagagatcataccaggccaatgggagcagctgtagggggattggtagtcaaagttttaacgcagaaagcttggtcatgggaacgatcgcagatggcgtcaatgtatttcatgtgaggggaagctgaagcaggagataagagtagttgcaacgtaattgccgccgcagcgaaggtggacagaacagaggacgttgccatttctcttagcgtcggaagttttgttgctcaagtttccggttgttattcagttttgtgttgtttggcttttggttcaaggcggatatatatgtatgcttagggtttcatctagggctggataactttagaatgtgctatattataactggtatcaaataacgttaaactttagtaacttttttcttatgttttctaaatttggccaatgtaaataattcgtggtttgtacaaatttagtcaaagacaacgtccagtatcgtcttactttgtttagaaaatggatgtcgtgactcgtgatcataactcataagtgttgagcaaaattagacaagtaaatgccctagggattactttaaaaaataactatttattagtttttagatttaaatagtacgaaaaacttattttagtcataaaatacaaattttgttagatttgatatttcctttaatcgcagtgctgctaattgcatgtaagagaagattataaattggattttggccgagctaaaagacagcatgacaatgtttaaggtagatgtcatggacgcaaatacagaatggaatatccacataatattaataaaatagcacaatacacattgtagaaaacgaaaagaagatagaagaactactactcttggtatagtacactcaagattacattaactgatccccaaatccctgaaaccaattcacatctaccgacttctgtcctaaaagagaaaccccacaaacccttatccccttccatcctttgctgttgcgtagcttcgactttccctcacatctgttgctgctacatcccagctcccacttcttcttccccagctttcatgtcttgcttctgtccttatcgagcctgctctctcatggtctatgtccaatgtgtgatgaggctgattgttgttggcatcttctgcattacaacgccgtgagagattcattagatcgtctccaatgtctagatcgtcttccactttctgtcgccgggtcacattttcgtcttctgcttcccctgattccctggtggtgctaggcagagtaataactcttgggggttcttcttcgatgaaggctctaaagttgttcctcgagggcttcacctttgagcaaaaaacttccaggaaattgtttggacagccacggttatagacaatgctcctgctgtgtgatgacctgtaccggagtttctcataggttgtctgaaaaacttgcacggtgttgctatcagttgacttacaatttgcatacaatattaatatgtatatacgggaaggtaataacagggataacaagtagaaaacagaattttaaaacaatagagaccaactgacctggtttgtacttatgaggtacaagtgaaacgctgtgagccctccaacaaaccacagggcaataaagcaatatatcatcaacacaacagcccaaggtgattctttcattgccctccacacagttgcttgttgatgatccatcagaatcttgatgtataccgccgacatcgagaaaatatagatgcagagaagtgttgacgaagaaacaaacataaagaaatacctatagtttctctgccaatggacagaactttcccagtcagaatcacaggacaaaatggcagacaacagattggccaatcggcagataaaacagatcttggcctttcagataacagaaacagaaacctcacacttttttgggagataaaaatttacgaactttatatttttcaaagtcaatatgcttttgattgagcttaccagtccaatgcattgtcccacccatgggcaatgatgatcaaagcgctcaacacagttgttgcatatggagcaatgagagcagcgaggaggcctgtaaagcatgcatgtatcacagtatttcactctaacagaaacgccattaacaatgacttctttcgtcctgggaatttgaacactcggtgtttgtcttccatcagctgatacagttgtctcataacgtaggtcttcctctggtggatgcgaatttcgaggaacaataccaggatctcgtgcagatgtgaagaagaggaggatcaatacctatcaaacccaaattcgtgattcagaaaagcaaaaaataacaacgcctgaatgccacacaacaagtgacagaacaggaggacagggtttaagcttctaagccgggtaagaaacaaacaatgaaatagctgataaatgttgttgattacccgattaggcagtaagcaaacaggaaacaaacataaaatcagaaatcaaatatttacaacaatgagatatataggactatcagattgggtatcggagaagacttacataaatagtgaaaagaattgctaccaccatgatagcatatcccgcattgtagggagagaactcatggcgaaggtgccttgctacaaatacacagaacaaaacaaccggaactatgatcaatagcaaggtaagaggcagtgacctagcatctggtccaaatatcaatctcccacccaggatgaatttctgcaaaagagagagggaccatttattggtatcaccatactgaatttaaaacatgtgaagagtcaagcattgaagatacttccaattgttaataaattacaaggaacattcaacttgatacaaggttatgcaaaaatgcatggtcatgctttgagagtgaatcaagagatacttcaacgattcagctcaacaacattagtttacacgtaccaaagtaaaccaattgcgtaactaagattatgctacacaggtgaaactcgagaaaaaacgaattccaaatcatattcataccagagaacagaattcagagaatattcatctcccaacaaagagaaaacacacaaaaaaccaataaaattccaggctcaatcattcgatgaaaaaaggacttacattgcttcctttccagacttggaatacccgttgtgtcatggagagaagaagattaaagcgacagaatcagaaagtcctaagctaaccagcgacggaattcgaaggatagctgtgtaattctcgccgtgttctccctccggcgaagaagagggtttttatcccgacgaagaaatcgacggaaacctaatagtaccagaaatcgcgagcaaaaccctaaggattacacaattataaggctcgcgtgcgacttctggtctgacctccttcaatgggcgacgaagacgaacgagcgaataacctgagttttttttttatttttatttttttatgtttaaacgtttttgtctgcctttctcttgttttaaattatgacgtaatcatgtttatctcctaaaccacaaattacaattagtgtcctcaatttttctgcgcattttgtgtcagatttcattcctcgtgcaaactatacaatttcagttggtgatttttttgtttttgggatacattatttttttgtaggaaaacaaccaaataccatttatttgagtcattgtccattttgtctttcaattgactatcaattacaattgattatgatcgcaaatcaactggttttgactaattctattgaattgtttgaacctgttccttctcaatgagccaagaatttgacatgtttgaatagacacttaataaaactttgaaagtttgtaatttaaaaataaattgtagagatgaggaaaattccatttaatgttaaaattttacaaacgaattctcgattatttaaagatgatgacatgtataccttgcaaacataaatccctttattattaaaagggaagtacaaattgaatttttttctaatttggcctcaattttgatttcaattttggattttattctttgctattcaaaattattaaggctaatttggtcttaacaatctcctaaactttatatgatccgattcaatctaaaccgtttaataaaattaatttctttcaatctaaaccgttcaacaaaaataaggaatctatgtcgtttttgaaatcaaaatataatcacatttcatctctaaaaacagtatattcaatcacgaaatcaataatcaataatatccaaaccatttattacgattcttcactaatcactagaaatttatatttataagtttaagatatcaaatttattcaaatatttagtataagaaccaaataaattgattgcccgcggtaaaccgcgagttaaaacctagtttatatgtaaatgggtggaaacaataaacaaaaagcagctgaattgtttttaattttagcgtaattatttacttatttttctaggttttgcacgtaaaatgaaaggaatataatctctatttttcatcatgattagtagaaactttaacaggatccgacgtaattacatttttatctttttgtttgcgttaactaagttatccagtcaaacccttaaaatgtctcggcgacataaaaatattcgaaaagctaccatcgtatcatttctatagatctccctaatctatatgatatatcacatttctttcaaaattctttttttttttttttttaacaatttattgagatctatcatgtagattagggagaactatagaaatgtcaataagcacaaaagttatctttatcatcaaaagctatgcgacaacgctcaacaatcgacatccacgcatctagcatatgttgaacacataaagcaacccgactaaatcagcatactccatggatattactctttagatcaccaagaatggtagtctcgtttgtcctttagatgtcgaatctttttttcgaaagcttgtaaactcgaagttctttgaagaacaaccctactcccaatcaacattttaacatacgcataatttcatccaaaacacatacaaattgtttaaaaccacattaccattcattttatagcatatacggttggaagtgctagtttatgttcttcagctcaaaagagtggtagttattctgaatagaaaacaaaacatctgaaaatggcgggccacgtgaaataaaatagaatatgatgccaattgagacaataatatatatacatagtcgtaataagagtgataaaagctttgtgaagcctacctaatctaagcagggccgctcgctcccaccaaaggacaaatctctctcccgcactcatctctgttcattggttcctcccaaaaaatatcaatcaaatcggaataaactatacgaatcctccaatataaagctccaccctttctctttctatctctctctctccattgttgactgtctctcttccctcgtaaacatcgctgtctctaaagatggcctctctctcaggcctatactcttcttctccatctctcaaacctgccaaaaaccattcctttaaagcattgccggcgcaatctcgagattccttctctttcccacatacctccaaacccaccaatctaccgttgactctctcctcggctcgttctgtggcacgcgacatttctcatgcggattcgaagaaagagcttcttaaggatccggatgcgttgtggaagcgatacctcgattggttttatcagcagaaagagcttgggttgtatctggatattagtcgggtcggatttaccgatgagtttgtggctgaaatggagccaaggtttcaagctgcgtttaaggctatggaggatcttgaaaaagggtctatagcgaatcctgatgaaggaagaatggttggacattactggcttaggaactctaagctcgcacctaagcctactttaaagaccttgatcgagaacacacttgattctatttgcgctttctccgacgacataatctctggaaaggtcagtttttgatcccaccggccttgtttggcattatgatcgtaatggaaaagatagttttatgcagagtgtcttacttagatcaccttttgagtgttgtttggaaatttctgatgctggaaagatagttgtatgcagagtcttacttagctcacctttttgaatcttgtttgtttgttactcccactcaattttgtttgtatgttgcagataaagccaccatcttctcctgagggtcgttttactcagatactttctgttggcattggaggctcggctcttggacctcaatttgtcgctgaggccttggctcctgataatcctccattgaaggtatcgcatactgttctaattgcagtcaacattacattcccttgctcttaacactcttagccatccccactaacaaatgggtgttctttatctttgcctcgtaaaaggatgtcctctcttaggtttttctgattaaaagagtctactttgttgtctactgttttctgactttatgttcttcctttggttgttgacagataagattcattgacaacaccgaccctgctggaattgatcatcagattgcacaacttgggccagagctggcctcgactttagtagttgtcatctcaaaggtgtgtcctatattcagttgtgtttatatgatggttggtcctgatattggcgagcatgattaagtttcttacgtatttcccagagtggaggtactcctgaaactagaaatggactactggaagtgcagaaagcattccgtgaagctggtctgaatttcgcaaaacaggtgttaatctcaggtttttgtttccgctttttgctgaaatccatgtctctacgaacatgggaagaatgctgtatgataatggtcaaactggtttacacggttggaaataatctgagaaaagtggactaatttttcatctcattaacaacaacaaaaaaaaaaaactggcttctcatggatcattagacagtagacaccttcagatgtattggatataatttagcttcaacttctgccccactgtagttcctcagcagcaatttcgcgctgtatgcttatgcagggtgttgcaataacccaagagaactcattactggataatacggcaagaattgaaggttggctagctagatttcctatgtacgactgggtgggtggaagaacatcaataatgtctgcagttggtctgcttccagcagcactacaggtaatttgtacataagcgtaaactttctatgaccattctttgttatttacacgaaagcattgtcatcatataggggattaatgttagggagatgcttactggtgctgctttaatggatgaggctactaggacaacttcggtaagtagtacttattgcagcttgtgttgaagatgagtttacttaccaggttttagtagaatgtcatatcatacggttgggtttcctgactcatacactttagatagtctctaccatgactcactctagcctgtaaatttctttcttctttcagatcaagaataaccctgcagcgctcttagctatgtgttggtactgggcttccaatggcgttggttccaaggtgtttttcctcaacttttttgagagttctaaggctatcaaggagattgagttcttattgaccttattactctattcttgctttcttttacaggatatggttgtccttccttacaaggatagcttattgctatttagtcggtatctgcagcagctggtcatggaatcactaggaaaggagtttgatcttgacggtaacactgtaagcatactcttcaattttctctgcagtaccccaaatcaaagttcatgagcatttactgagaactgagaaggtgtaaattggtcttgcaattaatgcccactcttataaatcagaagaccttggttacttaattacttgtgcacatgattgagttcagtttgttaccactccttcatggaagaattgaaacttgtgtactgtttcctcgaccctgttattacgagtgtgatcccaaggaccggttctttgaatttgcaggttaatcaagggttaactgtgtatggaaataagggaagcacagatcagcacgcgtgagtttcatttattcatatagttttactattgagagagcatagcaaataaggagctttttaacagtatttaatttgtttatttcattagctacattcaacagctgagagatggtgtgcacaatttctttgcaaccttcatagaagtgttacgggacagaccccctggtcacgattgggagcttgagccaggtgtcacttgtggagactatctctttgggatgctacaggtctgatttatgaatctcgtttcgcacaaattagtcagagataatatacactctttagtaacactatatatggtgaatttgtccagggaactagatctgctttatatgcaaacggtagagaatccatcagtgttacaatccaggaagtgacaccaacatctgttggggctattatagctctttatgaaagagctgttggtttatatgcctcaattgtgaacataaatgcttaccaccaacccggtagagatattcctcccatatctagaaaccgatgttctgtaattgcctaattgatatttgtttactgaatctgaataaaaaacgatttcaggtgtggaagctgggaaaaaggcagcagcagaagttctcgccctgcaaaagcgggtattgtcagttcttaatgaagccacgtaagaatcagaccgagtccgcttctttgtcaaaaaatcttgtctcgactcatgagagaccacttatatacttctttctgtggctgcagttgtaaagatccggtagagccattgacactggaagagatagctgatcgttgtcatgctcctgaggaagtaacgtccaaatccttgaaacttgttttttcattggtaacttttcgaacgcacgtatcaagaagtttttatctttgaatatgcagatagaaatgatatacaagatcatagcgcacatgtctgcaaacgacagagttctgatagcagaaggaaactgtggatcgccacgaagtatcaaagtgtatttgggcgagtgcaatgtggatgacctgtacgcataacaaaacccaacactttctcaaactccaaactctcattctctccattccttatttctttctgccatgtctatgattttgaaaaagaaaaagattgcaataagagccaggaaacacttgtgtacttgttttgaaataaagataatttcagaatgttacaaatgttgattgtaatgataacattggagatagattcatcaatcaagcaggctcatgtgaaacaatgatctcaacactcttctgcttgttttttggttaggtgttcttttgttgcataaacaaacaaaagcttaagctaatcagcaggttagagatgctcaacaacttcctcccatgtggttagattgtatcaactatagtttcttcaattaaattcacttctgaattttcttagaaaaccccattcagatctaaccaagataactctaaatatttaattttccataataacttttcacttgccacttttgaaattcgaatggaatatgttgacaaaagaaaatggtagatccaccgtaagaaaacaagacataagtcgagtcgattgtccccaccaccacctatttagtagcctaccataacaacaaaaaaattataacgttacaatcccttttatcaattttcaaaaccaagatgttgaatcgctttcccatgtcatcactacccgttatgccatagctcctatcaagctggtgagcgtactaaacgacaccgctttggggaggtcttaccaactcgattgcttttcctctctaccctttcccaaatttgaattcccaattttttcaaaatcaaaagtaaatactaacaaaaagcaaaaatatcaaaaaaaacaaagaaaaatcattttgaagtgcacagatatcaatcgtctctctccctctctctctgtgagaaagctttctgattaagctttcgtcgtctcctccattgcaaaatctagctcgatctgtgaaggtttctctgagttcttcaaaaatctcttctagagaaagacttcattagctcaattttagcaacttcctccacctccttttactcacactgtgcttcgatttcaacttcgcatttcacaatgatccccaacggagaattgagattacctgctctcaaggtccgtgaagaccgcgtgtcaccctcagctcctattccggtcaccagaaccctagtggctgatactgacgtcacttccgatgacgatatgagtacaaattccgaggatgtctctctcgattcgtctcccgagaacagtagagtgtccagtgccgttggtcgcagctacgggagaaattcttcttattatacttactccgaggtgagctcatcaagagagactttggtcggtgcgcgcgaacagacgggacctagatttgatggtgatacggaggaagatgaatccaccgattcagcttctagcacgcaattttctccgccgccggcagctgggaggattaacgacggcgtatctcaggtggaacaaactcacttccctaagacggacaggcgagcaactgtcgagaaggttttaaccttaaccttttgtgttaagatcagagatcttagaaacaatttagtgtgatggatgattttaggcgttcgtagagctaggatgaccaataaaattgacagatatggaaagatatgcaatcgcgttttgttctcatctgtttttattgtggtctgaagatttggattttgtgatcatctagtcataacaatgtccaaatatgatcaggagcttgtgctttagctgatgatctaggtctctatgtaaatccagaaaagagctgcttttctgttttttgtactttcccttgtaacatggtggaacgactaggatgtctacaggatttgtttctttattgatcttataaaaactccagttcatattgcaggagtttgatgagacgttttcttctgaagaagtaagcgatattcccagtgcccctccattttccggggcagcagaggaatctgaagaaattaaaccagcaacttcaagcgttcaagtttcagaagtcaaaacaggagattgtgtagaaagtagaaagactggccactttactaggtattctatttttagctcttaaatgaattgagttctcaatttggtaaactaatttcagtttttgcttctgttcctatagacctagtgcagcttctgagtcatctgggccacctgatcaacatccagctcggcttcctacttttcatgcaaggtagttatgatctaattagtttattcactgcttcagaaactggatatagacagatagaaaacctcagttatcttcactttgttcagtatacaagttggattctttttaatcactctgccaacattttttattgaaccctgatacagttctcgtgggccatggcatgctgtggtttcctatgatgcatgtgtacgactttgtctgcatgcgtggtcaaccggttgcatggaggctcccatgtttttggaaaatgagtgtgctcttctacgagaagcatttgggtgggtttattatagcctctttcttagttttcatatgtatttcttaaatttctctatattattgccgtgagtataattttttatttctttatgcaacctaagttgaaggatggtttttcgtccacatgcatccaaaaatttactgaataacagatttgtatttgggttaatactgactaacaggttgcagcaactccttttgcaatcagaggaagagcttctggcaaagcgatcttcacaagctccgcacgaaggagttgcaccaaaacccaagaaaaacattggcaaaatgaaggtgcaaggtaaacttgagtcctgtttcatttgctatctggctacccctcatataacaatagtcgtaaaatatatgtgtctgcttttgcagtacgacgtgttaaaacagttatggatggtccaaccggctgtagtatatcatctttgaaaccatcgttgataaagtttgagaaaatccggattcacttttccaatatgtcaacacgcttattttctggatggcgggctctaaggaagatccatgtccgtgtaccagccaatggttcttctcttcctcgtcaaagtctggcatatgttcatgccagtacacagtacttaaaacaagtttctggtctcctgaaaaccggtgtcacaagtctacgtaataattcaacatcttatgatattgtacaaggtatgtgaaacttattaactactagcctattcggggagaattaactcaacttgacatctgagtttaaaatgataatatggcacttatatgtatttatatcagtatgcgtgggcatagttcgaaagaaattgtatttccatgtttcccagtacactacactcactctcttatgtacaataacttttataatattgattgacccgttcggttctgtcattcagaaacatactcgtgtaagttaagattgaaaagcttagctgaagataacgccattatgatgcaacccggatctggtgaaagccatgttttgtatgttcctatgttcccaattcttcctttcactctctcaaatctacttggggtagctttcccttattgtgaagtgtgacgaagtatatggaatttcaacagctttcctgatagtcatggagatgatctgattgttgagatcctggatccaatggggaaggattttgggcgtgtacttgtgcaactagctaatatttctgaagattcggtaagtcatttctacttgccttttttatatgttagtacgtttcaagtgattctaatgaagaaaccatacaggctgagaaacttcgctggtggtctgtttttcgtgagccagaacatcaacatgtgggaaaactccagctctatattgactattcagcaagttttgatgataacagccatttgaaggtgtgttaactatctttcactcattatatttggtacctttggtgatctctttttttgcttcgctctctataagtggattggcgtttctttttagtatactgagagacactccagcagtccatttcctttagcaactttaaaactttatctcgtacaacaatagcatcttctcttggtcatagtaattagattgtttgaacctgaaaatattatcttacaatagttgttaattttggacttgttattagcaattttactaaaagaatttctaagaagtaagcacgtagattcagctcatctcacattcaattcgttcaattctaagttctttaattgaaacaagatttatattctaccctttcaaaattgtctctgaaaacatacaaaactcattgtattgtgactagaaaatgttggtgtattgattttgtaactcatctttcctttagtgtgcttctgttgcggaaacagtcgcatatgacctagtcctggaagtggccttgaaaatgcagcgatttcagcaaagaaacttgttgttatatggttcatggaaatggcttttggaagaatttgccacctactatgggatttcagatgtctacaccaagctcaggtatactgtactcattttttaattcttatcatttgagggatatgctataactccattttctctatctttcttgtaatgttgcttttagatacttgtcctatgtaatggatgtcgctacaccgacttccgactgtctccatttggtacatgacttgttaacacctgtcatcatgaagggaaatggcaagagcgccttgagtcatcaagaggtacatatgcatttatctattattaatttttctgtgcggtttctgtttttgtgtggtttccggagttatgtgtttcttgtctcaaattaagcgacagataggatacgaccctaaagttagctagtatactttgatcataatacttgactcagagcaccacattagaatacaatggtgaatcacagacttagacttcacgcagttgctcacatggcaattttcagcatcagacaatacctcatatcaccctagttaatcctgtttgttgttgtttttttttctcttgtggaatcataatagtactttctgcttctgaactgcttatgtagctctactttttatttttgctttcaacagaatcggatcttgaatgaaatcaaggaccagatcgagcagattctaaaactggtctttgagaattacaaatctcttgacgagtcgtcattttctggaatgattgatgtggtcaattctgcgtcaggtgttccagcgccagcactcattcctgctgtgaaattgtacacgcttctgcacgatgtcttatcacccgaggatcagactcatctttgtcattatttccaggtatatcatacagcctctcaattgccttgacttactcttgagtcttgatcagtctttttttctcatctatgtggtatcaatgcacttataggcagcagcaaagaagagatctagaaggcacatgggtgagacagatgagtttgttgcaaacaacagcgagcccaatttttgggatatgtctgcaatgtcggctgcataccagaaaatgacaatggcctgcaagaatgtaaagaatgagatctatactgatattgagatccaaaatgaagatatacttcccaggttagtatacaagtgaaaaatagttatgttcaactattattctaaataatttatataagagataactgaaatgctactgtagtggatattattatttgctgaccaagcctagtcaactgtagtggatactgtttttgttggtgacagactcttaagttttaaagtagtggcagtattatgttcatcttacaagagacagactcgtgaacttattagcttgacggccaaattttcttttccgaaatttggtagcaacttctttttcttcccttagcttctcttttaatatatggttatacctagttaaatcacccatactatttatcttatgtgttatctactatctgtgaaccactgttgtgtcattatagtatcatattttatgttattgagatgtttagatgtgtgactgcacctaaagctcttgtagcataagcatcttcatgcagctgttgattgcccctgtgtttgttatattgttttatgcagctttcttgaccttccaaacctgtcagcgtctatatatagcactgatctctgtaatagacttcgagcatttctcgttgcttgtccgccctctggcccttcaccaacagttgcagagctcgtgattgcaactgcagactttcaacgtgatctttccagctggaacattaggtaggtcgtttagattatttgatttgttgattgtctgttatttttgactggtatcatatttcaatttacagtcctatccaaggcggtgttgatgcaaaagagttgtttcatctatatatcatgatttggattcaagataaacgcctttcattacttgagtcctgcaaacttgataaggtatgtatactgaaatttccgtgtggttttcttcagatatttttttttctctatattttcccttgctctttgttcttctcagcctatgtcgtatcattaaaactaacttctttgatcattacaaaacctgtcattcaagcaggtaaaatggtctggagtcaggacacagcattcaacaactccattcgttgatgaaatgtacaagaggctgaacgaaaccattcaagactatcaagttatcatttccagatggccagaatatatctttgttctggagagtgtaagtttagctgttccttcataacttttgattttgggattgtgaatatattgcgtatacattccactgcatgttataagcgtacaactttactgtatttatggtgtgaatttggagtgaaaaggctgacactgattgtgtttctttaggccattgctgatgttgaaaaggcaacagtggaagctctggagaagcagtatgcagatgtcttatcacctctcaaagaaaacttggctccaaaaaaactaagcttcaagtatgtccaaaaactgaccaaaagatctgtgattccatatgtagtcccggatgaggtgagcataactttcctgcattttttttcctttacttctgttaaaaaaatcgttttgttttgctgagaagtttctgtatctggttggtgcagctgggcattctattaaactccatgaagaggatgcttgatgttctacggcctaatatagaggctaaatttaaagcatggtcttcatgcattcctgatggtgggaatgcagctcctggtgatcgtctttctgaggtgacagtgatgctcagagccaagtttcgtagttaccttcaggctgtggtcgaaaaacttgtagaaaatgtgagtttcccttaactcttttatttcctagctattcgtatgttgtagagcagggatcttatattagagataagctgatcaaaatatgttgtcaacagcaaacatagaatgatttgtagtgcattcctattgcgatttctactgttttgatgtttcctgtgtaacatttgtccatgttttgttatcttgttgggttagcatgttttgagatcttcccttcattatatgcttgtgttgtaaccggatatcttgtttcttttcagagcaagctacaaaaaacgacaatgttgaagaagattcttcaggactctaaagaaagtgttggagaatcagacatcagaagcaaaatgaataacctcaaggagcagctcaccaacacagtgaatcatctacactcggtttgtgagacgcatgtcttcatcgcattgtctagaggatattgggatcgtatgggacaggtaactatttttaatggcctctcctctcctgacattttgttttgcgttgttggagagctaattattcttgtgtgcgtgatagattgttttaagctttttggagaacaggaaagagaacagagcttggtacaagggttctagagttgctgtctcggtaagtcccaataaaaaaactgctcttacttagattgtatgagtcacctgatcttacatggaatgatgcgtattttcagatattagacgatacatttgcagcacagatgcaacagctgcttggcaactcgctaagagagcaagacctggagcctccgagatcgatcatggaggtccggtcgattctttgcaaggaccctgcagataataaagccaaatcgttctactactgagcaccttaacagctaaaaatgcttgaaagatttcagatctcatttgctcgtctgcttgaagcttcaagtattttacttggtggagcaaatcgtggaaaccttgagaaagctttagatgtataagaaagtacaatgggtaccacatctttctttagtgctaatcaaatgtcaatatattacaagactggcatcacatctgatacgaattgtaataagagttggaagtcaaagttttactacaaaactctttattaaattagaatgaacgtgacagagtattaaattaaaaacttcatgtagaacaatatttggcaaagctgataagatctctaaactctttatctgtttgtcttcctcgttaaaaacatagcaacttttgcacaagtaattcttgtagtattagtctgtcagctacgtcataaggccgctcgtaagggtagcgtttgtgacgtgatgtttgaactgaaccatcacatatgacgcatttacgctctcgatagggtggtttgatcaagcggaaaccttgtacctgtagagacttttcattctccttgataaagtcgagattttcatgtcccactagaaccttcctttgagcaagatgatatcttgggtcagcagttctcacagaagcttcaatgttgtttatcaaattatctacctgatcaacctcaacaggggtgttttcaccatcccacaacagagagactgcgaaatctggataaataatgaaaggacaaaacaatgagataaaataagataaaattcttaactttacaatgaagatacaaaatcaaaacaatgtaagggaaattaacaataaattgaacagtacctggatctttctccatagttaccaagcttttgatggtgggaaattaaactggtgaagttaagagtataagtagagggtatatatatatataaattttaatcatctaatgaaagtttgtacgtcgattcttttagtgcttttaacattttgctaatcttttttttatctaataaatttatatgtagttattatttaatataaacaaaacataagcaaaaacttaaatttttctaagataataactacatataaatttatatatttaatataactaattggataagtatgacactggtaacaacttgcttgtagagatgcagaagctggttggaaacagagtcaccaacaagaagaagaaagtgaaacaaaaacttcttctcatctttgtttactttttatttattttcttctacaaagtgaaacaaagaaagtttggtcaagaatctgaatctgaattttttttctttcaaaagatttatttctgcaactcatacataactcgtagtagtagtatagacaattaattctgagcagtattagtagtaatgggacgtgagagtgacaataatttcactttaaaaattttattccatatttaacttaaatgacgtgtaaatttgtttgtttctaaaactgtttactagattttaacccgcggtacaccgcggagacaattcattttttaaaattaatatatataaaatttgtaaattattttatagtttacaattgttactaagtaacgtcctgccaaacccgtcccgccaaacccatccacaaaaaaaatatttattttattaatgttgatcttatttataatatgtttatgaatcattgtcaaaagattttattcgttacgggatgttgaacccacacatttttcgccaattagttaatatatgttcattcttaaaatttcgaatcataaaatatgacgaatttttttttgagattttttaaactctatatattatataatgatgttaagtttttttgatatattaaactttttataaatttaaatattattaatgttttatgaattttaaatatataaataataataattaaaaaattaatattttttgccttttaggtaatgatataataactctaaaagcaagaatttagaagatttaaatctttaattaaatattttcatacctaaataattaatgtcagtaccatgacattgtaaataagttcaaataaatgatttgtttatttaaaaaaaaaacgtttagtaagaacaatatttatttaaacaaaaaactttgttttaaaatattgttaacaaaatacttttatgctaattttaagggattgatgtgaagtttgtttggattaaatttgattgataatgtgattgacaatttaaattaagaatttaaagtgaaattaattattttgaaaaaagatttaatgctaatggcattgagttgtaaataagtccaactccaagatttatttgttaaaatagctgcaaaaatgtatatataaatagcaaattaaacactttgataaatggaacattcttttaattaatttttttttgtttgttttagaatgactagtgatcttgaagacggcttttaaacaccttatcagcagatttatcagataaattaattaattaaaagccgtcttcaagatcaactcccgagtcaaaaatgccaatgatgctacaattcttatcactcagattgcaaccaatacttaaatatttataattctttccaagagtatgagcttatcacacagacttcagaacaggctggcatatcaaattaagatcaaatcaatcattaaaattgcatgttgaggatacaatggaaaagagaggagccataacacacacagagagaagaggcaacaaatggcatttgtacaggagataaatttaatgatatataaaacattgccaagtcttgttgtagacttatatgatcatcatgtgagatttgttcagacaagcttcgatatagcctggcacgacatccagaatgctttggatgcaatactcaggatcatcgggttttgatatatcctgttgccaaaaaaattaaaagggcaattagattagtgagacaatgagaaacattcatcagacacagactaatgattagatgtgttaaagaggatgtttttgctcgatataccctatcgcagttgcgctccatgatgctacgttgtaaataactttacttccctcccatgccttacgaagcttcccctttcttttcttcactgaaaacatcgtgctaagtgctacatcacagttcataagcaaactcttagtatccttagacttaaaagccacccttcatatgcaaactgtaagtatctgttagacataatagtcaccctaagttggtttttaagtatttggttgatttggggccttagggaagaagacacattttggggttcttgacaagaaaaaccttaggctactttctaaacttcaggaagagtataaagccgaaatcttttctaattgtaacacatggaagttgaagatttacctttctgaagctgatcaggtgatatatcctacaaaaagatagcactcagaataagttcacataaaacgaacaaggacaagaagataagagctaacatacctttgtttgcttaagggatgataaataagtagccatgaaacaagcaataccgtcagctatatcttcttccctaacaacgacataatcatcttccgtttgacccacacattcctcatcccataaatcatcttcactaactacatcccaagagctactatcttctgcaaattcaacagctagcttatatagttagttatctctacaaccaaattacacacacattggcaatcttattgagtagataaacaaagctgaaacatcttaccagcaagaacttggggaactgaaacttgagctaattctatcttttcacgaaagtcattacattcaactctagatttgatgagatcataaaactgcacataagaaaacagatcacagaatcatgaaattgagcttctatattctaagttgagctaacatcgatcaaaatcctacgaaacagagagattaaagtaataaaaaagcatactttatcagcttcaggatctcctggatcggaagcagacggttcttccctgtccgattcttcctcctcctcctcctccggtgattcactctgttcgccaccgttttcatcgccgggaagttctagaagctcaagagctctctggcaatccgcgagcagattctgtaacgtctttcgctttacacgaatactatccaaatcgatgcggtttcctttggtttcggcatcatgagtcgagcaagagacttcgatttccatggaatcggaaagttttaggctgaaatttgtgaaagagaagaagatgaatttgatggttctcctccacaattgcgacctacaatatttgtttgttttatttccaccggaaaaaggggaaaaggagagtcgtgactcgtaagacaacaagcaactaaatttgctgaaattagattctattcaatctttgggacaaatattgctttatatatatcttaaagaattttaattgattttaaatatttttattattttgtatataatttttagaaatgtattcttgatttttaaaattttgaaatcagcatacttaaccacaataaaaaccataatcatcaacacttaatcagaaagcaattgagtacttattaaaatctcgataagtgttatggaatacagatggcatatttggcatacataaaatattcccacggtgacgggagctgtaacagtgacggtgacaaacacaacgaagacgtcaaattttttacatacatcacaactttatgcaagaagtaacaacttgttactattttttatgacaacgatctcttgttgttttcaccttctttttttttttttccttttttttttttgtctctgatgtgaactatacaccatagagtcatagacaatagtttgtgtagtgtgtactattctccatttctccttgagtagatgattgatcagtagcagttgataaagtcctttaaaacttgttgaagacgatctctgaggaaaattaattatacttaaataataagatttattctcaccatcgttgtacttcttcggctaattagcataaacatgtcttgtacatgtgcattaactcatctcttatgtgaaattccttattttaagctttcttactacttcgccatttttccttacaaattggattttgttttcacattctatcattaattcccatgtatcgagatggttatgttatgtacttatgtttatcatcgtagtctttgaccattttagagatatgtcatagaaaccaatgtttgaactcttagcaaaaaaaaaaatgtttgaactcaatgtcgttgttaagtgtttccaataagaacaagtaaagagacttatcaaaacactttgtgccatataaatgctcaagttttagtggaatcaggtgaattcatactgtaagtgtcacccaatctgttttttgatcactacagattacattaatgtgattcggttttggtgcgtctacgcaaatcacacttgttaattacttgcaagggaacacgagtagggggtggtggatatgttggaaagcggtgactatactaatttaacttaacactagtaatttcatgatatgacagtcctatatacacttaggtcgctcgcttgtacacctaaaacgcattgccatttgaggcattagtgttgcgcttggacatccaacaaacaagatcgatgctatatccaaatctagattgcataagttatatgaattgcatagtaattgaaacgaagaagaagattgttggatgaatagtcaattaatattgaaacaaccatcaaacaaaaaaaaattaaaattaatcgaaaagcagacgaatgaacgaatccccatgcacgcagcagcattatccaaacaaagataaacaaatggatcacgtagatttattaaactattcaaaccaataacatatcataagcaaaacaaatcagacaaacaaaaacagagagagtggtggatggtcgtgcttagcacgattcagtatattactgaggtcagagggtcaaatcaatgcaaggtgtaataaggttgtcatctccattaccattttttattacaaagagaaagagagattcttatttactctaaattaatgtcttaaactttattttgccaagactctaagacatattaagtagcatataatccataaaactatagagtagagagtaattataagagtgttaatataaattcggtataagagaaataatggttgagagaagagggaagaggtcaaagggggagaaagagggaaaatttccctccaaggaaggggggaagatgatgacgtgtacaactgccaaaataaaagcaaaggttcctcttttttcggccatttttttcgcttcacctcttctcctctaacgccgttgaactcatcaatcaatccattcacaaccaaaatctctctcaccatttctctccctaaaacaccattttcgctatttttatttttaattgatactttttttttactatcattcccagatcaaggtttgtttctcgatcgaattcatgcttctctgatctgagatcagttagatacgactgcgttttcctcctcgaatttgatcatcggacattctctttttgtttcctgggtttatagtgccgcacgtcaatggcgtgaaccgcggtcatggctaacaaaaacgcagaatcatcttcacagcctcctcctcatgtgcagccaaaccaacaacagcagcagcagccaccgattgccaatgaacaagagcaggagcctcatgtgcgtctctctatttttggaaattcatctcgctccagacccgattgttgttcttcttcttcttccaatgttgctcaatgtttgtttttgttctgatctcagggtgacacctgcagtattcctcctgcgcagtctggaaacacagactcgcgttcccgtggtggcaacacggtaatttcttaatgagatatttatttgctttttgatcgaattgcctctgtaatggaacgcgaagcaggagaaattacttgttcacaatcccacttctgatctcgtttttggctacaattacctgcattttctgtcttctccattggtcattgttgcgcgatgatgagcattcatgtaatcattaggcatgtcctggttttctttcgagcaaatctcattccgatcgattaatggaaatatggaattgaattattgcatcattgacttaagacttgagagttttaccttttcaggttaaaccattatgcttgcttctaagttctaatgaaacacacaaaattctagtcactgttctcctacaaaaagtgttttttaaaagaagctaagatcttattgtatgaaaatgaaatgtccaatcatgtaaatgcaaatacaaataaacagtgaatgtgcttctgctgttgatttcatgatacaactctcatggaatttgtttttgtcgactctaattactctgtaggttttcaagagtggaccgctatctatatcttcaaaaggtatgttttatttcttaggatgatctacttagttcagtgtagcctttcttaggatcatgagagttgctcttaggatgagatgttttcttatttctgactggggaaaactgttactggcagatagtaaggacatattatcacctgacgtgggttttgtaggctggttgaacccagatagtatgatacaacgacagcactagcacaattcactaggctacatgtcctggtctgtggctatgtcttaaaattgtctctcaccactttctatttcgtttaatacagggattggctggacatcatggaagaaaagatggtttattttgacgcgtacttcactagttttctttcgaagtgacccggtaagcattaatttactgatgaagggtgctttgaaatattattttcttgtgtgcttcctagagcagtaatggtctactactttttctctgtgaatatgagattgccatccaacactttctttttttatttatttaaaaacttgattcacatgggcactagaatagggctccaaggtataattgcaagaaaatttactggaagccagtggatttctagcttaaattagttatattagtgagaaagtacgagatacactttaactaaaaatatgtttctcttatcagagattggtgaaaatcctatatcagaaatattttttataaggcatgaacctgttattacagagtatgagtatctcaaatttttctgttctattcttcagagtgcagtccaacagaagggcagtgaggtcaatctgacccttgggggaattgatctcaacaattcaggcaggttggcttattgtttgaatcattaaaatctttttatattttattatctggttcggtgttactaacgtccgataacttcgaactattttttagtgtggttgttaaggcggacaagaagctgttgactgttctctttcccgatggtcgtgatggacgggcctttacacttaaggtttttctcaaaattttagttttctgttgttactctacttaatctggtttttatcaggtgcatccacctcatcctccatcttaatctacgctctgaacatttcttatgattttgtgactttattttttttgcaggctgacactatggaggatctacacgagtggaaagctgctctggaaaacgctctgacacaagcacctagtgcttcccatgttatgggtcaaaatggtattttcaggaatgatcatgcagatcctgctgttggtgttgatgaaaagagtatgtttgtcaccttttcaatggtttagtctttacatgtataacaatatatgtcttgagtggtgtgagaatgtcaaagtttcgtcttctctagaaaataagctacagaataatattatcatgttaacatatgttcccttcctctggagtataagctgaccagttagtgttgaatggctcataagaatatgggcattccttatatagtcggtgacatctcaagacttgattcgctttcaattcattagacaatgatgcattttttttatattcttacagaagatgagacaccaacaaaatcaactgtccttggaagaccagtattacttgctctagaagatgttgatggagctccatctttcttggaaaaggcccttagatttgttgaaaatcatggtattagtttcaggttttttcagcttcttttgctgctttgttttactcactctgagctgataaagacaacaaaatcttgcaggagtcaggatagaaggaatcttgagacaagctgctgatgttgatgatgttgaacaccgaattcgcgaatatgagaaaggtttgagttcttatgtttatgtatttattattcttttcttgatttcctggtttgtgcaaagtatttatacgtagtcacttggttcaggaaaaaatgagttcagtcccgaggaggatgctcatattattgctgattgccttaaggtacctggtactgttcactagaatgctgagttagcctttcactcttaaacctatctaactgtatccataaatgcgcagtattttctcagagagttgccttcctctccagtgcctgcatcttgttgcaacgcccttctggaagcttgccgtaagtttatcattctctttcgtgtgtccccttgtgctccatcagagctagacactatctttttctatttttaaaatttgttgaacatctcgtgttggacatacagatccattttgtaatatagaaattatctagataatgaacttgaacgaaatttaagtctccattgggtttctgttcaataacaaattatgagtggaatgaagctttaaacaaatttctttctgttttttttcctaacttctctctggttgtttactttatcgacatctgagcatgttcatatatgttatacatatggattttgctcgcctcttctcctttctggataacgttttctcagttttctgacgtcaaactttaccaggtactgaccgtggcaatagggtaaatgctatgcgggcagcaatctgtgaatcattccctgaaccaaatcgtcgcctattgcaaaggtagtctcttttctgtttcctcgttttacggaagttatttaaatgcataggaagtaaataactttctgtcattaattctgtttattttctctcttgcagaatcctgatgatgatgcaaactgtagcctctaacaaaactgtgaaccggatgaacacaaacgccgttgcagcttgtatggcacctttacttcttcgaccccttctggctggtgactgtgaaattgaaaatgattttgatgtcggcggtgatggttctatgcaacttctgcaagcagctgctgcagcgaaccatgctcaggctatagtgataacattattagaagaatatgaaagtatatttggagtaagattttacttctcttattgattaagagccgccttagtcacatgatcagaatcgatgtttacctctctgcatagtaatccgctctttattacagtagtatagtgaaaaccttggaggcactgtgaaaggacaactttggttcttatcttagttgtacctgtgtgcttattttcagacactgacttctagcatcataaatggtctatgtctgcaggaaggttccttgtcacccggcctgtactctgactcagaagagagtggtagtgggacagaggagggatctgatgatgaagagtatgatgatgacgatgatggctcacagggatctgaggactacacggatgaggaagaggaccttgaaaatgaatctaatggatcctacagtgagagtgccgcctcagaagataaatatgcagacagcattgatcctgatgatcataaggcacggtcctatactaaccttcaatacttgatcaatttcttgaaaataaaatcttatgattacgagaacgagtattttgattatagtcgaatatagacattcctttttctcacgtaattattttctgcagataaatgataatttaagcactgaatcaaaatccccaaaaagaagtaaggagcctaagaagcttttatctggctccagacgatcttcactaccccgacatgatgacggcaaaaaggatgaggatatcgtggttaagggagttaataatacagaggtaaaggctgttgtagaggtctcgacaagtgaggataagaattcatcaacgtcagatgtggcatctgacactcagaaaccgtctaagttatccgatgcaccgggaggaagtaaaaggcactggggccgtacccctgtaagtttctttttcctctgcctttattacctatctcttaagggatccagacatttagtaaacgtttggtgttttatgtgctcaggggaagaaaaacttgtcaatggaatctattgatttctcagtggaagtggacgaggacaagtaagtatcatcatctctacaaatgatttacatctttatgtttctttcaaaacttcaaatttgtttggactagaattaatgtggtctacatggttcttcttctgacaatgttaatattctgcagtgctgacattgagagacttgagtcaaccaaattagagctgcaaagcagaattacagaagaggtcacgataagtccttttgagtatttttgcttttgcgaactcggtgtgctatacaggtggtgattttgacgagtatgtgatctctaacaacctccatgtttggtacaacaggtaaaaagcaatgcagttctacaggctagtttggagcgacggaagaaggctttgtacgggcggcgccaagcactagagcaagatgtaagtgtaaaataaaaccttatcttagcaatgtgaagtttgttatttattgagtgtttaaattttagttatatgaatgtgctttacctttgactaggtgggaagactacaagaacagttgcagcaagagagagacaggaaattagctctggaaacaggactgaacatgtcaaaagggaatcaacctattccagaaacaatcgatgaaaatgttgctcctcttcatttttgtctagcaactagttgatttttgtcaggctaaaagtacatatatctaacttgggagacattttacagttgaagaaagatctgcaagaggtagctcaagcggaggctgatattgccaagttggaacataaggttgatgatcttgaaaataggcttggtcaccatgacggaaaagcctctggttctacgcatagtgccagcaaagaatctcggaaattgccagagcacaatgcgaagatgtacggattcatcaacagattcacatttaacctcacaacctatggtttaaataatatcaaagctaattactcgtcttctttcaaatttgtcactcaggaaggagaaacaaaaagatactgaagcagcctctactcacatttctgaaagatcaacgtccaaggtaaccactgtaaacatttgtctatcaattttgtgttttcttcctctgtatttatcctctacagacgggtaacatattgcaggatgggcaaggggctgcaagagaaaatgagacagagaagcaacaggattcacggagcaaaagctcgcaacaagaaacatcacgtggcagctcaaaactggtgggcttgtcaaagaggtctggcacaaagggagaggtaagtttcatagtgtaaccattaaatttcatccaaatatcgttcaaagctagaaactgagtgaaataaacagggaagcacaacaacaacttctgcactttccaaattgacaatgagactcaacttcctcaaggagagacgtagtcagatcgcgaacgagctccaaaacatggacaaaggaaaaaccctagggcaacccagtccaacctcgggacaaaaccgtgtatcagaggaaactgaaaaaggatcagggtcgaaccaggatccagacagcagcaaactacagagccctcacattcttgacagaggaagatccgagaacggaggagacagaggcagaggatcatctggaggaaaccatcccaacactacaccaaggaccttctccagatgatactctttatcaacaaccccttccctcagatgtacagccgccatttaacaacaccacctccagttatgcttattcgtcaccccccaacaaccaaataacagattctttcttctttttagtctcattcttatcttgcttcagcatttttttaagaccaaataaactacactctctttttttgttgtgttttaactgtgcgttggatctgttgttttggtagtgacatttcacatcagtatagaaactaaaattgaattgtatttaacaacaatgcttgaacaaaaaatatattgaatccccctcttcctagttccttcttgtgttcactatttcaaaaatgaataaatcaatataaatagtcgccatcatcatcatcaataaaagaatggtatcaaaaatctcgaagcagcttcctaacttgctccaacgtaacgaagagaacaacagtgaaaggaccttgcctacaaactgtaggaacaaagcctttataaagagccatggctccttccgctttaaccgtcttcaccgcacaatcccacgcgccgtcgtacgctcccaccttcatattcatcactctcgtctttatcacatccaccggattagacgcaaccgaagcaacaaaccccgccgcaaaactcgctaccacgtgagtccctagcccatcattcatcacaccattctccaatatcccttccttgaactgatcgtaagacgctagctgagccgccgtcacaatcatcgctcggttaatcgtcaacgccgagcctcgccacaagctcgttacgccttctcccttaaccatgctcctgattgcgtctcctactccggcgtagttacgacgttgcgctaaaggtaacctcccgtcagcttgcatcctaaccatcgccacgtcagctggatttccaacggcggctccgattccaccagcgactagccctgcaccgatcttcctactcagattcaacttccctgactcaggatcagtccatttgttcttaagcacttcgtatagacccatcctggtggtggaatataacgtctgacggagaagtgtagcggagactcctgagaataacgcggcggcgccttccgatttgactatgttgattccgagtgagatcggtcctactttggggactgaagaagtcgtttccaggaaagctgcaggagaagaattggggaaagcgagagctggacggaggagagtgacggtggtggtggaaggtgcttcaccgtgaagctgaagacgaaccttgattagatcgagagggtgagtagagcaaccggcgattacagaggcaatcccaccttcaacgaaacttttgactcccattgttgtgaaattggagagagaagagagaatgaaattgagatgttgtgagtgaaggagaagaagagggaaacaaaggtatttatttgtagcgagttttgttttgtgacgcggttttgtctgtgttcaatgttgacgaaacgagtgagagagtgtctgattattaaagaaaaccctaattaagtcagacccgccggttataaaaatagtcaaaaagtaggaaaacgcgtgtgtgagtgagacagagacagcccattgtttgctttatgggcttataagcgagacgtgttaattgggctttttcctttatggccgaaaacaaaagaaacgtcgcctgagagattcgaactctcgcgggcagagcccatgtacttagcaggcacacgccttaaccactcggccaaagcgacttgttgctatgagttagacaaaatcattaaaattctctattatgatttctcatagtgtgtgtgtatattgtggatctactaaaaattctttgttattattactttattttgtgaattagtttgatataggtaagtacaaagttaactttattatttactcaaaatttatcagattaactgattttatattgtttcctttggtatatagacgtactatagtttttagaaaaaccataagattcctttatatttcatagagtgaagagatgagatgagatcttggctggagaagaaataagtttccacgaggaggactctttttttttggtgaagacgaggaggaggactcttggttgatccagtctttacgttagacatcgacccctacatttatttgcctttctctatcaacatggcaggtaaaaatcttcattcaaccgaaccaaccaaagtctcttcccaataatattcaagcaccatcctttgggaaactcatacatactacagtctacactctttcattttctttcaacgctcaacttaacaaatgatatagtctagttgtcaattatatgttttaattagtgttttcacatcaaattctggtttgatatttgatgactattttcggaaacatctcaatgtcccgcaaatacaatcgtctatcatatataatcccgtacgttgtattcttatagatagaataatatggcgtgatctttataatataacatatagaatcgtgtagatttattttattttatttttatatatcgcataaattgcaaaatacttatatatgtttgttatatatgatacccattttatagttacttaaaaaaagttaagcgataatatatatatatcaactttttataacaaaaaagtataacacatggtaaagaaaaataaaaatgaagacatggtgtgacacgaaaatggcactaaatatacatatataatagatagctacaatatcccatcatacacacttttttaattgactaatacataacttacacacttttttaattgactaattcataactttttatcattgtcaacatgcaaattcatatttccgttgaactattattcttattttgtttttaaaagaagggcttcctggtaataaaaatatgatttccaaatgacgttagagcaaaaaaaaaaaaaggttgtctggtctggtaaaatgaaaaagcaaagcgtcttggtatagaaaagtaatatactgcctcctaatttcttcgtccttctaccgaagaatctctccactcttgccctctttcgaaaccctaaaccagaagcaccagattttttcaactttttcccagagaacaatagaaaacccaacttgtgctctctagggttttctttattccttctcatctttggattttcttgggtcatcattttggaagcttacccaccagcgaaaaaattataacttccatcgattcctggcttctctctctcgctctctctgcatgtgctaaatcgccggactgatcctcactgtcacctctgttcccggcttattcgccggtgaaatctatggttggtgctcagatttatttccaattgtttgtgcatctggtggaggataaatgctccttgttttggatctagggatttctagtctagtccttgtggtctctcttgttttacctttgatcggtctctttgttcgtcacaaatggagggtcgctgcccaaagaagggaggagattagaagacttcttattcatgcttctgaagaggctgccagggctgagctagaggcctctgttgagttctcttctgttgccgtctctaatgtcttccattgtcctgtttgctattgtcttgccacgactcgttgctctcgctgcaaagccgttcgatattggtatgcaaaaattctctcactttctccatgtccaaattacgttgtatgatcttagagttatgattgcatctgctgcactctctgctgagacgtgatgaattggagtgattagtaggcaaagaatataagttagttctgtaactttagcgatactggatcagagatttaagaaaattgacttctttttctatgttaacaaaattatgggtaattagttagcttgggaggaagtttagtatttgattcatggcttatctgtgagtaactaactatgtgctgctgaggaatttatttcaattagatagcttaagaaatgtactataatgtctatcaaattttcaaccttttccccttagcgcatgtgaaatttcgttacctacatatcttagtgatagttgtttcgtttttgttattttttttccagttccgggaaatgtcaaatcattcactggcggcaaggtcacaaagatgaatgtcatcctgcttccattgtatatgatagtgaagatgagagtgattccgatttgagattaggagaagaaaatggacaaaatactcctgaggaaactttactggtgggtccagaaccagttactataccaatcggggaatcactattatctaatcgtgccagatctcctgaagatgggaatggagatattgcagataacaaagatgaccttatagataaggaagaagctgtttctgttgctgaaacatctggatcctcgttttctggcttctcctcctccccccgtaatgactctggcgacgagatttctcgttgtgagagcttcagttcatctgaatccgagagatcagagtccctacttgatgctcatgtctctgtagagccagaagacacctgtttcagcaccattgaagatgctccatccaaactgttgtctccaaaatttgtgcacttggttgaatctgtagataatctcgctaatctgcctaaattaagtgtacataaacctgaggatgatgctgggcagaaccagagccaatcaaggagcttacactcattagttacggataggcatccagtatcagctgacccatctctgaagtcatctgatttttggggtacggctcttggatcagccgaacgtgtgagtgattcttgtgttaaatctaaatctggtagacctggtaactcctctctgcatttctcctttggctctggctcctctagagacacctcagctgctaaagtttctgagcagaggagtagcattttaaaagaagctcctagggggactggttatatatctgatggagtaaacttaagagaaagaaatgctaaaagatttgatgaagctgaaattgcattaccaatttcctcttctactgatgcgctgagtcctttggactcttctaatttgtcccatgtgacccttccgaagtcaaagagcgctagtagtgaaaatggctctatgttggcccctttgaaggttggggaagtccaacttttggcatccaaggcctcgaataccaagaagtgtgctgatcttatgaagcattctcctttaggtgcaaaatcggtaagagttcttgatcatcagaaacagaatggtgctgtcgttcagcatataaattctctacatggaagaagtggtttaaaggcatcagtactgaaagttgtagaccagtggaccagaccgaagtctgaaaatgagatggcaggaagacatggtcataaggtaatcactgagttctaggatgttatcatcattatgcaatacttagttcctacattaacaaatcagcaaagctatttttcttatcaatcttttggtgacatgcaggggctctttccatatgaagtctttgctaaactgtatacatataaaattgagttccagccttgtggcctcatcaacgttggcaataggtaattccaatttcctctttttctagtcgtttttagctgttataatcttcagcttgtggtgtaaaaaatgtaaagtaaatgtgtagcttacactcgctgatgcaagaatatactctgtttcttgcagctgctttgctaatgttgtctttcaatgccttatgttcactcctcctctgacgacatacttcctccagcaatttcattccagagcatgtgcgtcactggttctaagtcttttttctttttgctgcttattttggaaggttattttttattatcatcaatatatcaagcctttaataagtcgtttaactataggtacaaaaaaagaacagtgcttcacctgtgggtttgagaagctggtcgtaaaggcaaaagaagagaagtctccactgtcccctaatggcttgctatctcagctgcagaatattggaatctttcttgggaatggcaaggaagaagatgcacatgaattccttaggtgaactgacatttctgaaattgagcaaactttgttgcatatatctttattataactggaagatctgtgttaatttcattttccttgcaatttgcaggtttgttgtcgatacaatgcagtctgtgtgcattaaggcatctgaatatgatatgaccaagagtagcaaattagaagatacaactcttattggtttgacatttgggggatacctccggtcaaaggtatcattacctacaacatttgtactttactcattttactttgttttggagggagttgtaatcctggtacttatgatctctgccagattaaatgcatgaaatgtcaagtaaaatctgagctgcgtgagaaaatgatggatctaacggttgagattgatggagatattagcaccctggatgatgctttgcgtcgatttacaaggactgagatattggatggagagaacaaatacagatgtggcaggttggtcagcattcctttccatgtgttgaacttcgtgtggtcctttgatatttcgaattatcttttcatggttctgaggatagagttttacatgagctttatatatggttctgagttgggtatgataccgattgatttaaagttcatgggcagctgaagtagagttcatggcctgccaaagtattccctttcatatatttcaattacaatacctagattccacgaccagctgcaataaaattcccttctagcttatgaagacagaatgtttttgaagtactatcatggtctttcatttgcgtagttttaactaatcacctgtaacctcttatgtaaatcctggcagtacgattttacattcaatgattgatgggtgcttactcaatttttttattttcctgtgagcagctgtaaatcctatgagagagccaaaaagaagctgaaaataacagagcctccgaatgtccttaccattgcactaaaacgattccaggtaacttatatcttcaatgaatacccggtttgtttctgtttagttctatctggattctcttgtttctcacaattttgcgacacttgattcttaaaggcagggaaattcgggaagctcaataagttgattaggtttccagaaactctagatttggctccatatgtcagtgggggaagtgaaaaatcacatgactacaaactctatggagttattgttcacttggatgtaatgaatgcagcattttctggccattatgtctgctatattagaaaccaaaataagtggtacaaggctgatgatagcacggtaagtttctcatatattatcaatggaatgttgtttgcgaattagtttataagtaagctcgattttttgttccctttttacttgagtttgttatttgatgaactttggaattaactaggagtatcttacttctatgacagcattttaggtttacaattttctgcttcttccttttcagtgatgagtttcttagtttgaaattttgaatggataagtattatataattttccccttccttttatatgctgaagttgttttctagaaaggatattctagctggttccattggggtttctatctttgttgtagtctgaagagtcgtaggattggttttgtgagagaaaatgttttggcttctactcattgactggtctcttctcgtcatcatccatatatctgcatcatacatttgaagaaaatttcaatgtttaattcctctgttgtgcattgattattgtcaggtagtaacttcggatgtggaaaggatcttgacaaagggagcgtatatgttgttctacgcaaggtaaataatattataatgcatctctcacactctttaaagttgtggattatgctcgatctggttacttatgatggtatatatcgaatgaattgactgcaggtgcactccaacgcctccaagattagcagtatgtaccaaaactgaagcatccaataaaaaaagcagagtgccactacctaaggctaatgagaaaagtaccatatcccggtctgtgtctacttcaagtcctgagttgtcttccaacacgcctggtggtggtcgatccggcaatatacagtcattttattctagtttccagaggctgcagaagattttagaagaagactcggcgagtgacagttcatctctctttgacagcaactcagatgaatgctcttgtagcacagacagtacaagcatggacgactttgctgatttcatttttggagatcatcagggacgggctcacggacagtctgagactccctcaccaacatcatcgtcttcctcatcttctccccccttcacaaggcgttcgccgctcagtcgttcttctccagaaacttacggaacctcaagacatcagttgcccttgggaggagaaaggtaagggaaacaagatggttttttgtccacttggccccaactaagtcaaaagtagtagaagaaagtagatttgattacacgtagattgagtggttttattaacaacccgtatttaggcttggtgaaagtggttaatgagagaagtggtggtatatagtagtgtatagtggggaagagagtttttgcccatgaaattgtatcacgtaatggaacggaatttacctttgttaataagttgttttgacttttattataatcaatcaataaagctaatctaatattgtctcatcgttgcacctttatttcttttgcaatttgcttaactttgaatctttggattcagttcagttcagaaattcaagaaaaatcccaaaagatgcaattttgccagttccaagaaaagagatcatatgatgttttcaggggcaaacaaaataaaagcatatagccatatatgttgataccgaaacaagaaagtatccaaatagaagagacaacattcaacacagtactgtgaagcaagtgtgatccgaaaatgaaaagagaaagtacttagacatacaagtgaaggataaacattatctgaaaacaggtcatatcctagccacataagaattcgcctgtgtcacatatctcacccaacgatatggattataactacttgatttctttgctatctgcaagtatttgacctgcatcacccaattcattagcgttaatgatcgaagaggacggttaatggcaatgcaagaatcggcatattacttacctgaagtttagaaacattgtacataggtatcgtgaacgtcatgctgactggccctgcttcctttgtgatattacctacaacgaattgagaattatcagtaatgctttattttcccctgagagaacaaacattacaaacttttgtcttagagggtaaccatgaaattcctgtgaaaatgtaagctttgcacgcagtgtatgctcacccccgccaacaatctggaatgccacagttagctcatggaagcaacatacagttcaatatatacctaaactagcaaaccacgtgagagatttaacacttgccttttttaaattccattcaagcattttgttggattccttgaaatctgtcctctgtccagcagcaccgggttctaactcaaaactagccctgtcacaataaacataatcgttgattctatttcttgtgtgattcagaattcggtatatcactatagctggaatttaaataaattcatcgtattctcttcctcatgtacaatatctcagtgatgcacttgtacaaaccaatcaaaaagttatgtacctggaagtataatttggcaatggcatctgaacagtgattgtgtttgcaattatgtctgaagggaactcagcgcgtattttaataatcacttcagcctaaatttcagcaaacagaaaaatatttatagagcaattaagaaatatacgcagtttttatctgactcagaagacatgtacgcatgaaatttcaccttaagacgtccagcctcttcaatcaaggtattaacatgaaaaggaggcttgaactcctgagtcatacggtaattcattactggaaattcaccatctggtggaacctgaaaacagaacgcaagttaaagactaatacaacatgctattacaagatgttttctgtactaaatattttgacgctcaccagggacaaagttctatctgaatcgaagctatccagacgaacagactcatgaaagttacaatcatcaagtatcacccctgaacctgaagaactcctataatctgcaacatttcaagtgtgatgttaccaagggttagattgtattaatagatcaatccccagttgatactgatgtgcctcaaagatgcagaaaaaatgctacaagagtaactacatatatttacgaattgggttatgacttatgagggaagtttgtaagtggaacatacagcttagttgacatttaagcattgtcaacgccaaatgtcacagaaagagacaccaagatttcaaagagtgagacaagatagaatatgacgttgattccttccaaatataataaagatgatttaaaggggtgaaacaagaaataccatatactgatctccctcctcttcctatgtttaggtcttcattaagagctaaacggatttctggattaccagaaagatagctcttcatttgaatggtgccatcaatctcagaagtcagtatatatccctgttcagaaatcagaaaaataatggatattttccatgaagaaaactaacattaagatgcaactacatgtattaggacataatacaaagcattgatccgcagaaatgggtggtttgatatggcaagaagagaacatgccaagacttctgtacttttgatataataaactagaagcaagtaactactcacgcttgaactaaaagtaacactgattttctcgatgatgtccacaaaaatttcctctcttctccgacccccaggatcattagccacaaccgattttgtaactgcagttccaggcattcttttggctccttgctgcatagcataaattaaaggggtcagtcacatataccaggaggaggaaaatgaaaagcaatcttactgtgaaaatggcagcaggatcaataggctgaaggcgggcaggagaaaccacaatcggctcattgaatatataagatttcaaaacttcggtagatgtagtttgcacgtaaccaaaatcctaatcaaaagagcacagagtcttatttaataaaaaaaaatcaaaactgggaaaataaacaaatatagctactatatagatataaacatgctaacaatgagaactacatcaagacgagacttacaataacttcatcaagcaactcatacacgagcacaaagtttttcctgaatgaatcttcattcagaacaccaagataatccttaataacacgagcaatcctttgtagaagctccaaaacaagagagggtgacacgttaactctcgttgtcgcaacaaaatatagaccaacaaccttgacatggaagtagttcacgccatcgacattctataagcacaaaaaataagttagatgaaatcattacagctcacaaccaaacagaaagtataatacctacaaagataggtggcgcctctgcattgccatcctccttccagaacttgactttacggaagaatgtctctgtacttcctttgggtacctcagcccggtctgtagcaataaaacgttacacatcttgaaacttgtattggatccaaccaaatcgtataatctcaaaacaaatagctttcttctactacattacatacagatactctgcccaaactaattgaatagttttgctatatttgtacaatctgatttggaaattcagctcaacataatttgtcatcggataagaaatgttggtagatcaaacagatcaatgagcttagagaagatttcaatggaaaattctcatgaaacagtgacataagactcgactctgaagagaaaaagcaaaacaggaagaagcagagaggatcagatcgagaaagagagcttacagtcacggaagacgatgttatctcctcgctgagataagacgaagaattgggagatcatcatcgttccttatagcggtggattccgactgtttcaccgcgagtttggttaagtctactgatcgccgatcggtctcgtctttttgtgtgtctggtggtgaggtggttcacgttttaccatttgccgtcgttatcgtgaagcttcttcatgagacggagggttctgtgtttttgtgaattatgatttcttgttcttatatgggcctatttttaagacatcaatatggcccaaatttcgaacttgttatgagtttaaggaaataagtagtaagtactataaatgatggttcgatctcggaggagaaaaaaaaaaacattgtttacgaggaagcaaaatgtgagttgatataaagggtacaacacataatttatttttggaagtcaaaactttgaggattaagctgacaacgaaggttagtgaagactttcgggatcgagcaatcgggagatatacatgagcctagagggctgacaagatgaccaagcattccaaatgaaaggcttaagatttttctttttctaaactcaagtaagaaacacaagatatatgaaagggtaacaagggtcaacaacaagtctaagctttttaaacgtgttagatgattcttcttgaacactattacaattactgtttagtttcacatttatatgaccttgggagtcttctagctcgtcccaaatatattttcaacatattactataagatcctaaagaccaataacattgatctacaccaaaaactctcactttctgattttgcactcgctttttttcctcccataaacaaaaccaaaggcttacaatactaaatctgtctcacattcttagtgcttatttgttttagtcataaagaacttaatcttatacagattgaagtcttaaagtcatctatattacttttcacatgtatcattatgagatggtacgtttcccacgaattttatcagtttagtttaattttcagttgtactttgggagaaaaaatttacaagatacttgtcggccatgatatcaccctagagttaccggagtccggtgatatatcatttctaattagggttaaaacttaaaagggtataaatggctgatcaaacccaaaaataaaagataatgatgacggtgggagacgagtgatcttatcaggtgtcgcatctagcatatataggtgaaagactataaaaaagacatgaaatatttaatagacacaacttttgtaataaaccaaaaccaaaaaggtagatgaactgatgaacagcatcttctaattacgaataaaaaaagtaaccaaactttctttccattagaattggtacgtagttccttgtgtattgtgatttctttcattttccaattatgtttttttattttatcatgttacatttttgatagtgggtaacttttgtatcattttatttgacctagccatatataaatctattaacttatacggagtagtatttcacgtcatttatttttattttgtttttagatgggaagttattcaaaactagactaaaacagtaaaactaggaaacccgctactgaataaagttacaattccacattattccatgacagactaattgaattagaaggttaggtaaattattaaatcataactgtagcagtctcttcgtctggcagctcagtcagacaaaacacaaagtgtgtttatgtgttatttttaatgattatagtttgggaaaaagacataatcaaaagggatacaaaacatatggcccattgataagtatagatcactgtttagctaaaaaaagcagactcttttttccaatcttgaacacaaacacagtcaccatctctctctctctttctctctcactcacacattagggagtaaacagctaccagaaaaaccttttttatcttctcacaaatttaataaagtgggtgctgagattgaataacgtaatccaagatcctccaactcacagaaaggtaaaagctgtgaatctgtgttctttcttcttaagcaaagtgtttgatgaattcatctagtcctgtccattcttttgcttctcatggtttatggatctgatctctctttctctctctctctagccattagggtttcctaagaatattatataaactctctttagctaacaccgttccaattggtttctttctttgttcttggtctaaaatctaaatggtgttatgggtataggcagattcaagaacagtagtgaaggagagatctggtaaaatggcgagagagaagataaggataaagaagattgataacataacagcgagacaagttactttctcaaagagaagaagaggaatcttcaagaaagccgatgaactttcagttctttgcgatgctgatgttgctctcatcatcttctctgccaccggaaagctcttcgagttctccagctcaaggtatattctatctttttgttagtagttgtcttatttttttcaatccatgtttgtgtttttgagaatatggttggataaatatattaagatatgtatttaaatgagatttttattttctcgtttactctctaaagttaattatcagtaggctcggagatctcatgtacggcataatttgatgacctaaattattatactttaaagtataggattgatgttttattacttttatgtataacacatcatgtatttaattccgtttaacataatatgggtttttaacgtgtaatttttcaatcattttcatttagactcatggttaagatttctgtactgggaaataagagagcagaatattatagtgtgatttttgttaattaggaaagcatatgtatatatggatacatagtacttaccacaattagaatgaatttcttttcccttttttcatttgactttgtgtattacaaaagtctttgacactgtcacttggtatgattggggattaattcttaaccactcgtttagtttatcttgggaagcattaccataattgggaaacgagtcatctgtctgtatcgtgatggctacttctgattacttttcttttattataaccaaaaaggcttctaatgtacttaattaattttacaaatgtaatatggacgaaggaaatgtttataagaaagatggattgtttgttgaaacgtgtagaatgagagacatattgggaaggtatagtcttcatgcaagtaacatcaacaaattgatggatccaccttctactcatctccgggtattttcgatatcacttactcttttttttttttgtggattttaaactctctgctctttttaccaaacccttctctttttatcaaacccttctctctataatattatccgatgttcactttgttacacgtgtttgttataatttttagctgtaagtctaaatatagaaacattgagtggcatataatcattaatcttgaagcatctaattaattggttttacatattaatagcagaatcctgaaactgttgactttgcatctagcagcttgagaattgtaacctctccagactaagtaaggaagtcgaagacaaaaccaagcagctacggtatggctccattgatatgttatgcagataaacctattttcatataggctatagctgtaagagatcatctatttcatgtgtgtggtttttttttttatgttttttcaatgatgtgtgcatgctatttttaggttttagaatctatttcatggaaattgaagatatttcatttcacgtgtaagttcgtcaagttgtggcgtgtgtcttggaaattgatgttttgtttgtagattttaagagctacttctaaaatttacaagagttttgtaattttcaattatggcccattattctcattaattcattaaaaaaattatatacattactatctatatctagcataggtagttttttttttctttttctttggtagacctactgaacaaatatctgatatatcactgactggataaatatctatagagatatttttgatagaaatgagtgttaatttaacgtaaaacaggaaactgagaggagaggatcttgatggattgaacttagaagagttgcagcggctggagaaactacttgaatccggacttagccgtgtgtctgaaaagaaggtttactactatacataaactaatagcatgcatattttccttaacgtggcatataaataataagctgtacatatataaaagtttgactttgttgttgttattggtaaatagggcgagtgtgtgatgagccaaattttctcacttgagaaacgggttagtagttagtacatacaattcgtataactaatggatcataagcctatctatagctagtgactttcttaataagtgaaacagggatcggaattggtggatgagaataagagactgagggataaagtacggctctaaacccttatagatatcatggaataaccttaatctatttttttatgtataagaaaatatgatgagggaacgtatattatatatcggcagctagagacgttggaaagggcaaaactgacgacgcttaaagaggctttggagacagagtcggtgaccacaaatgtgtcaagctacgacagtggaactccccttgaggatgactccgacacttccctgaagcttgggtataatttgtttaactgaacatatttcaaactttttgttgacattttgtatgtggatgtttactaactgtttgttggttaggcttccatcttgggaatgaatctgagagagagaaagatccagcagagttgacttcgatggaagcccacaaatattaagtctaccttttccctttcttttctttgaataagtgttgaaaaagaattgagatgggaaggatgaattctcattgcattgcagagaagcaagtttcagatattgtacgtgttattggtctttataactattttgcaccaaagggattcttcacatcacggacaaataataattttaacactaatgaaacaagtaaatatagtgaaacgataggttttctatagtgattctttacattaacaacaatgaaacaataaatataatattggagaggggtgtgaaagaacaaatatgttaattaatttctacaaatgttttcacctcctttctcgattcatataaaacaaaggtaagtctttgttccttaccttcactctctagaaaagatttttttggccaaaaatatgtattcacgcaatcagcagaacaaaaacctcggaagatcacgtccaacgaaggacctttaggcttaggggtaacgtcatgtcttccacttttgagcaaccttgcaaaccatcaacgaagtctttcatgtgcattttattcaacaatggagttttgtaagaaggaactattgaaaaaactaatggaactaaggtgatctagatagtgaacttagcttttcccaaacttttctttatgcactacaaaatttcaataaattaagtttttagaaaaggttctcaagtgaagttagaattttataactcaaacaatattcatgtacgtgtccaccggttttcatggttagattttgagaaagagtgagtccaaactttttaataacgtttttgattccgtgtaagaatgtgtgattctccctcctcctgaaaccctaacccaagacaggagatctttctaacacattctatactaattcacaaaaatcttccaagttccgtccgatgtgggacaaacaattctaatatcccctctctagttaccgctacgagcctacgaccatcattctttgagtcgaagttatacatatgaaatgggaggcgtgattcacgggtgaatcctacatttgagaaattagaacctatgatctgtgaccatattacaagatttgaatctgaaaataaattttattcttcccaatatttgtttttgcgaaaaaaagagattatttggaattgctgacgtcacatctctctcaggagattcccacccggaagtatcaactgtcgtcgtgtatcggttgtttccgtagatctctgttaccactttccatccaatttcaacaaattggatttggcaaactttcggatcagaaacgtgctcgggatgaggaggtacaccgagaaagtttggtcttttattcgttcgtcgctgagtttagaataagggattgtcttcatcgtacgactctgtttttgttgaaaatcgaatgctccaaatgaagcagccattacagaaccttaatcagtcgcagaagacagctttagctggtgttttcgtgctccttttcccgattctctatccgaatctcttcagccctcttggtcgcgcctctccttctctcttctccgtcagtctctctctctctatctccgatgatttatttggaatttcacattttgggattgtgaagctgaagaattaagtttggcatttgcaggaatggaatgctccaaggcctagacatttgagcctactccaaggcgctcttgatcgacaaattgtaagtgggtttagctcagtttcttggatgtatctactacgttcctctaaatctttttcttcttcctcgaaccaatgtgtagtcgatcagacaacaagttgagttatggtctcccttggcagatcaaggttggaagccttgcactgaatcttatagaggcgcttgtaagtttccaaatataaagctttcttccttctttcatcgtttacattcatgtgccctgaaaagtttgtattttgattgatgggtttgtcactctttgcagccttgccagagaagtctgaagggtttcttcaggttttccttgacggcggactaaatcaacaaagaatgggagtgagtataagaatttcagtcaatttttatggtggtttcccttctgactcttcttgttccttttgcagatatgtgatgctgttgctgttgccaagataatgaacgttacactcgtgattccacgccttgaagtaaatactgtttggcaagattcaaggtaatctactttgaaacttgtaagttgtctggtgcctgatgaatttggtgatttatgatttggcatttctttacagttctttcacagatatatttgatttggatcactttataagtgtccttaaagacgaggtgcggattgttagggagcttccaatacagtatgcctggagcactcgtgattattacgctacaggtattcgagctactaggattaagactgcgcctgttcacgcttcagcagagtggtatttggaaaatgtcttacctattatccagaggtttgtgctttctaaacctggtgatctatcagatgaataactgcattttaaagtcctggaaaatacgatactacatatgatctggaatgctttatagacaatactaagggagtgttcaatgtagatgtttttctgtcaagtcacgttttttttttgtgtctatctgaggaactatatatgtctgtagttcaatgcattgttactcatatgaattatccacttcgttatgcagttatggcattgctgctgttgctccattctctcaccgtttggcatttgacaatttgcctgaaagtatacagcggttacgctgtaaagtaaattttgaagcattaaactttgttcctcatattcgtgagctaggggacgctcttgtgcatcgactcagaaatcctccttccagctctcaaacatcaggaactatggatccgacagacagaataaacaccattgtaaaagctggtgctggaaagtttgcagtgcttcatcttcgtttcgataaagtgtggtcttaattctcaacaaatgtgcccatttcctggcagtaacatctagttctgacattgcttcatctttttttttaggacatggctgctcattcaggctgtgactttgaaggtggcaaagcagaaaaactggcgctggcaaaatatcgccaggtgatctggcaaggaagggtcttaaattcacagttcacagatgaggagctaagaaacaaaggtcgctgcccgttgacaccagaagagattggtttactgctgtcagctttgggtttcagtaacaatacccgtctctatctagcgtcacaccaggtttacggaggagaagcaagaatctcaacgctgcgtaaactgttccccgggattgaaaacaagaaaagcctagcctctgctgaggaactagctgatgtacaagggaaagcttctctgatggctgcagtcgattactacgtgagtatgaagagcgacatcttcatctctgcatctcccgggaacatgcacaacgcattacaggcgcatagagcctacttgaatctcaaaaccataagacccaacatgatactgttaggacaagtctttgtgaacaagagcttagattggtcagagtttgaaggagcagtaatgaatgggcacaaaaacaggcaaggccagcttcgtctacgcaaacagaaacagtctatttacacttatccagctcctgattgcatgtgtaaagtagcttagcattccccttttactgtcccaatcttttgttgatttttttaaaattttaatatatggtttttatgtactcgatgattagtaaattaattgaggaactcatattatgtacactaaattcaagtttagtaaaaaattggattaatgtgatttacttattgacaaaggtaaaataaaagtcaaataagaaaaggagagaaggacccactcagattcaacgccccaccaccgataactcaattaactctcttctcttggcttctgcaacgctgagccaccatcgtcctcttctcttcctcttcgatctctcctgaatcctcaaaccctggagagagagagagagagtgacgggggaagaagatgacttctgctttgtatgcttccgatttgtttaagcagctcaagtcaattatggggacagattcgttatccgacgatgttgtacttgtgattgcaacgacgtctttggcactagtagctggatttgtggtgttgttatggaagaaaacgacggcggatcggagcggggagctgaagcctttgatgatccctaagtctcttatggctaaggacgaggatgatgatttggatttgggatccgggaagactagagtctctatcttcttcggtacgcagactggaacagctgagggatttgctaaggtactgtgaccactctaataacgttgaatttgaatttggatccatgttatggtgattattcgaagattggtcttttatgagtcgggtcattttagaatcagtttcattttcatttgtaggcattatccgaagaaatcaaagcgagatatgaaaaagcagcagtcaaagtcattgacttggtatgatctaattctattcacttcctctagtttaaactacttttattgaacttttcctttgctggttattggtttaattaggatgactatgctgccgatgatgaccagtatgaagagaaattgaagaaggaaactttggcatttttctgtgttgctacgtaagaactctccagtctgattatgatttcgttttctttataccctttcatagtttgttggattcatttatttgagaacatgtttagttatggagatggagagcctactgacaatgctgccagattttacaaatggtttacggaggtttgttgcctcagtgttgttttccttagatttgatatgctctgtgtagctttagcgtcaatactctgtgttttatgtttctaggaaaatgaacgggatataaagcttcaacaactagcatatggtgtgtttgctcttggtaatcgccaatatgaacattttaataaggtagtatgatgagaaattgtttctgtctatgcttattcattttcttctgaccttgtctgatagcaatttcttttggagcagatcgggatagttcttgatgaagagttatgtaagaaaggtacatgagtatgtttacgtaacttgtaagtcctaggtaatgctagatattggaaagagatgactgtcggagatatttgatctatgatttacctgtgatgatgccgaatgttttctctttcctgtctggcaacgtggatgccgatttcctagtctctttgatgtatgggggaaaacgtaactggtatcatcacaatcaatgtaggtgcaaagcgtcttattgaagtcggtctaggagatgatgatcagagcattgaggatgattttaatgcctggtttgtttctgattttttctgtcttatatttgcttctttgaaagagtttatctagtccttctactataaaaagggaggctacagagttaacttggttaattgtgttttctgcgtgagtctcattgctgtattattcatgttttttttttgtggtttgcaggaaagaatcactatggtctgagctagacaagctcctcaaagacgaggatgataaaagtgtggcaactccttatacagctgttattcctgaataccgggtggtgactcatgatcctcggtttacaactcaaaaatcaatggaatcaaatgtggccaatggaaatactactattgacattcatcatccctgcaggtagatgaagatgcatgtaataaatactggagcgtggtattacagtttcgcttgcattctaaacattgtgtctttttccaaacagagttgatgttgctgtgcagaaggagcttcacacacatgaatctgatcggtcttgcattcatctcgagttcgacatatccaggacgggtattacgtaagcatccaactctagcttaatttattacctcctacccttggattagttacaaggcagtccagttatctcaacttacatagactctttgtttttatatgattattagagataactggaaaactttggtataaattcatattttcttacagctagtagatctgtctttctcttcaattttattacaaggtttgtaggggactaaatatcagtcaccctgggtcatgtgaaaaaagacctgcacattgaatattctcagtattggtttctgccataatatttgttttctgtgtgtgcttctatattgacattttgattttgatgttttagtcaacagttgattgtcctgtaaaggttttgtaaaaagttcaccgttaaaaaactgtgtataaaaactatggcatttctttgcagatatgaaacaggtgaccatgtaggtgtatatgctgaaaatcatgttgaaatagttgaagaagctggaaaattgcttggccactctttagatttagtattttccatacatgctgacaaggaagatggctccccattggaaagcgcagtgccgcctcctttccctggtccatgcacacttgggactggtttggcaagatacgcagaccttttgaaccctcctcgaaaggtgaacgtctgtttgtttggagattagcctcacaagcttgttctggttgctttggtctttgcttgttcctaaatatttaacttgtatttttttggtttcagtctgcgttagttgccttggcggcctatgccactgaaccaagtgaagccgagaaacttaagcacctgacatcacctgatggaaaggttctgaaatcattggtgtatctatttctttgtgattttaaggtttcatgagttaacaccgtcggtttctttgttgtaggatgagtactcacaatggattgttgcaagtcagagaagtcttttagaggtgatggctgcttttccatctgcaaaacccccactaggtgtattttttgctgcaatagctcctcgtctacaacctcgttactactccatctcatcctcgccaaggtgattatttatttttgaaatatattttgtggcagaaggaaaactattcttgatcgtctctggcattcaaatcactctttaccgttttttacaatacagattggcgccaagtagagttcatgttacatccgcactagtatatggtccaactcctactggtagaatccacaagggtgtgtgttctacgtggatgaaggtacttcttaccttctttttgactatctgccagttcactgttttttttcttaacagtttgaaaaattcagaatgcagttcctgcggagaaaagtcatgaatgtagtggagccccaatctttattcgagcatctaatttcaagttaccatccaacccttcaactccaatcgttatggtgggacctgggactgggctggcaccttttagaggttttctgcaggaaaggatggcactaaaagaagatggagaagaactaggttcatctttgctcttctttgggtgtagaaatcgacagatggtgagactttcacaaccaaaaacaccttcttcatttgctgtgtcatcatgcatgttgagcttctgctgagtgcttatatgtatgttgcaggactttatatacgaggatgagctcaataattttgttgatcaaggcgtaatatctgagctcatcatggcattctcccgtgaaggagctcagaaggagtatgttcaacataagatgatggagaaggtaaatatatcaagtgatgcatcatactttgggaaaaggaatgtcacataatctctttaattttgcattttctatttgttcaggcagcacaagtttgggatctaataaaggaagaaggatatctctatgtatgcggtgatgctaagggcatggcgagggacgtccaccgaactctacacaccattgttcaggagcaggtatgaatgagcattgtgatgaaatttaggtttttcactttggttccctttgatactcgactatttttatctttacaaaatttcaggaaggtgtgagttcgtcagaggcagaggctatagttaagaaacttcaaaccgaaggaagatacctcagagatgtctggtgattgatgatatgatttattggtaattctcttctgctttctcaacttttcttggtacgctgtccttaccatttagatatttatttgtttattttccttcgtctcccttcttttagtcaaacatgaatgatttgtcaaagttttctttgtatgaacaaaagtataaactacaaaataaatctgtgagagtgataaaattgagagaagatacccaagatttcatcatcatgctttctactgtcgatagtggatcatcattgtgaatcagtgacaccaaacaagaacaatttatcttttcactccaaatcccatgcaaatgatccaatcttgatagctctaaagttgattttacggagtagaaaatagaagagtccacattgtaaactttggatggtgtgacgcaataataaagcgacaggaaaagtaaacagttcaaacaatttattgataggcttcccaacaattcgataatgaaattacaaagagtaaaaaacagcatttatgtataacaacaagaagaagatacaaagttatataatcatattagtcacctcctccttgagttttgcaaggtcttcttcaggcatcactacacttacaatccttgcaaagttttgcttgggaaaaaccaaaacaacacctttgtctccgaccccatgaatcgtgtagtttacgaaatccggcttccctccgttgatctcaagttcatacatatctatttcatcaagattcacaaacgttaaatttgcaccgtacgtgaaaaaatccgaagagcctttatcttgttctatcatcctcttgatcgcaccgttttcttctcttttttcaccagcaatcagtgcagctagttcggatatcccaaccatttcgtcattcttttccactacgcttattaccaagtcctcgttccaacaggttgaagactttttacggtcacaaattgttataacattcgtgtttgtttcgccgcggatattcagtagcgacttccatatcaatgcatacaaaatatcaacctccgagaaaggttggtctcgcgtggtgtacttggccatcaagctatcaatgtggttgaggctaaaattaaaaatgtgtctccccatcttgcatttattggtaagtaaccaatactcgccaaccgaatctatcttttcaatggaaatagcttcaccatcattacgagcatgagaggttagttcgggggttttcgggtaaaccggttttgttggggcatgacccgataccagctgtccaagtgttttcatgaacgttgatgctgaaaacacgtctccaagaatatgggcccaactcaacccaatacagagcccaccacatttaaactgagttatctgaaaaacgaatttcaaagtaaaaaatttagtttactctagctagcctgatttggacaaaaaaaaaacacacacacacacacacacagaatctaacctgatcatatatagtgaagaatcaatttcacatgtaaaaaatattttctcttcaagttccacggttatattaaatattcatttcataattattaattaagctaatgattggaaagaatttgaaacgaatgtttgatagttagtaactaagaaagaaactaagttcgtgggagaatcagccgttttcgttgcatgtgaacttaaataatccattatattatactaaaatttgtgtatgtgtgtttacctggaggaaaacgagtggcgagaaggtaagatcaggaccaagaacgtgatcgtagacaaggaatcggtggtcaatggaacggtcgtccaactcgagccacttctccactgtgaactcttcgacgttggcctcgaccacgcgtatgccactgtcgttgcagcgaatgtaaggtatggctgcagctgaagtgtcgttgtcgttgtcggacatccggatccgacctgagacgtggtgataagattggagtagagactgtagagtaaacatggtgttcttcacgtcggcgacagtgaagtcacgtgcacccttgaagaagtagacggctcggacgtagtggagcttcatggctaagtccatgggtgtgagctgtcgtggcttgttctcacctaccacagaagcaggcaccaccgaagagagcctgacactggtcactgggcttccctccattttatttttgtgagagagctgatatgtgtagcttataggcttaaatgggatgtgttatataaggattgagtttcgaaagagagttgagttcagaataggcatgggtatcactgatttaggacagttgggaaaactgtttccgtgacggcaacattaaatgtgggtgggatttgggtctttagcaacaacattagagttggacagttgagtcatcatattcagatccatccaacaacaagcacactttattacgtccaccttgtccttattggcttcaagcaataaacgcacatgtacgtgtcgtagccaactagtattatattacggtacctaacaagtcacattaatctataaaaaaccaagttcagtttcctggtaacattgtttccaccagcaaaaatgatcttaatacggatgcggttcatttccacctcaaacacaatcatgcaacaaatttcctgataatgattttacataattgtacgataactaaatcttgcgaaaaaacagtaaaatttttggtagagaacatccctattgccaaccaatctactcctaattgcgccctcagagatgttcatcattcgctgttgtgtcttgttaagaaaataaacacaagtcactgaacaatacctagttcgaaagagtcaacggtgatctttccaggtacctcagatgcttggacttggtgtattttcactaggccagttgtcctgattaattgcttgactcatcgcatgtagcaccatctagagaagcagcaaggtactcagcaaggctctgctgattactgctagttttgtgggtagcttctgaggtcacagatttttttggtgctatagacttgggaagccaggcttgacctgttgagctgctgctcgaagcatctgagcaattcttccataagactggcttaagatgcttccatggatcttcagccatagagttggagtaaaatcgttctgcccctggttccatgggtcttcttcctccatctctcccaaagcttgtgttcataccgcgtcctcgacttctgcctcttcctgagttaggatacgtgtttccaccccagtttgcattttgtcgtccataattggaaaactgtggaggagtattgttgtagctgcctcgaccaccaaatctattattccccatgttcggcatttcttgagagaatggaaaagggcgaggtacccattgaggtggacctgaatggttaactggtggaggcctaaagttgttattccaaccggcgggtggacctctgtgtgagggtgaaagatgtgccatccctcttggttcataatgagctgcatgaaagccaccatgattggtctgtgcctgatactcactacataatgatcctgttcaaagttataatgcaaggatcagaactggattactgttcattgcaaggcacaggacacaaacctaactgaattccataattgatgtgattttcatactgtcaattcctagaaagtgaaacttaaagagatatatcaaattaaagtagctaaagctaataagtttgaagcctgagactgagagacaaatttcttcctccattgatcttgatttgtagattataatcaagaacacatgactaaacccaaacaaagaacaaaaatttcatatagatttgtagaagagaatcatcacctaactctacgaaagcccaacaaccaaataccaaagtgaattcctgattctgttcaatcctatacctatactcaccaaggaccaactaacatactgtaagttaaactctcatgatattaggcaatcttctttatcagtggactactttctttggcctcacaagaatatagacaaaacaaaaattaagacagagtcattgactatcaaggcagaaacaagcacctggaggaactgatggtggaaactgaggtggtacaggagagcttccttgatgactaggagatgagatgtattgttgcttaggggtcttgtttttcttgaaactagaataagcagccatgggatcggtataataatcaaacctttgcgtttcaaatgaatcctgctggtgattggatgtctctgccaatggattggagaggtgacctgtgctcatagatgtttcagtacctgtagtagcatcatcatcattctgcgctgcagcttccattcgcattgcttttaacatctgttttcttttctctgaatcttccattgtgattcaactacaagatcaaaaggaaatttagaaatcaatccttcaaaatccaaaacacgagctactacaatgtaaaagcattagatacataatcaatctgaccttaaaaccccaaattcttacaattatcggatacccaaattggaaaaacgaaattgaaggtgaaacgaaccttcacaaaagtatggtttctccaaaaatcttcactttctcgtgaaaaccttcaactgtgaaacaacgatgatgacgaagcctttcactacataaacgaagacttccaaaaccgggttagtgttcgaccgtatttttcaattaaacccggtttactggtttaagcgattgaaatcattaaaccggcccattaaattttccgatagaaccttctctcagtcgctcaattgcccgaaaacaaaagtctctctctctcgatcgacgccgcaacgtgctcctttcaggtgatctgcttcttattctccatttcgtcatctctgttgtttctagatttggatcacgttttttctttcctcgatctagtgtttgttttaactgttttcgtaatttctgatcagatttaaccggaaaagttgaatcacactgtcgcatctctcacagtcgtcggagaagaatgcacggtcgtccaaggaatgcttctaagccagaagaggaagcagcttcagctgctaaagctgttcagcttcgctctctccagtctcagtttatgacgaatcatcacgataaaatgtacaatcttctccttcatttccatcggatcagtgtacttcccagatttttagtacgatttgaaggatcctttgtttatttactaatcatttgttgcttttttggtttctagttataccaatgaagctattgagttaagcacgaagcttctagaaatcaatccggaggcgtacaccgcatggaactaccggaagcttgctgtggaggatcgccttgccagaattgagcctgatccaaacttggtcagcgcaattcttgatgaagaactcagagtggtgagttatcctgtcaattaaaagaaacgaatttgctctttatgaaagtagttgcttattagttactgtgaagtcggttctaaattcaggtagaaagtgctttgaggcagaatttcaagtcctatggtgcttggcatcatcgaaagtgggttttgagtaaagggcattcatccgtagggaatgaattgagacttttggaaaaattccagaagctggattccagaaattttcatgcttggaactatcgcaggtgaaaattagggaatgtcaacactttttgaaaggagcattgtgtatgttaatcaagcttgcatattaatgtgttgttcctttccaggtttgttgtagagctaaccaacagatcagaacaggatgagttgcagtatacagatgatatgatcaataacaatttcagcaactattctgcatggcataatcgtaggtatgcatattctttagtatatattatactttactgatttacatgttcagaaatagttttttagcataatcgtaggtatgcatattctttactatatatttttgttcacattctgcagtgtacttctatcaagtttgttggcacaaaatgctgatgggtttatgccaaatataaagattcctgaggaatatgactttgtacattcggctatttttacggaaccagatgaccaaagtggctggttttatcatctttggcttcttgaccaaactcttaatgtggagactcctcttctcacttcctcatggccttcacatggttcaagtatcattctgtctggagctgggtgcttgagtggctcttcatctatgttcactactttttgttctgagtcgggttcttttccactgattctctactttgaccaagctgttggtggagtaagctcatctactgttacaattgattctgaactaaaaggaaacgagggccttgtttgggaaccaattccgaacaaaaattctcaggtgtcctgtgtatgggttgctcgtctgaaatatgtcagttcagatccttgcgaatacaaagtgaagatcagagttgggaactctccaggaatcgtttcttccagaggatataacttcaacgcaccttatgagtttgtctttacagcccatgttcatgataccgtcgaagattctcaagaaggcattgtttcatggacggatggatttgatatttgggatgcgaagtcaaaggatttgaattctcttgtcaccttggatcggttaaatgctgagatggattttaaatggcgtcaggaagctatagattctgaggttgaatgtttcggtatactgcctgacaggtatatatcctatatactttctctctttgattggaaagagaaattgtagtcttaaacgttgtgttattttttcctttatagcaaaattggaaagctcactcttgcaaggcttttgatggctcgtgaagctatggtatcggatgatgctgtcaagggtgttcactatgaagaaatccttcagctgtataacgatttgatggcgctggattcttcacactaccagtactacaaggatgagcacagcaaagcttttctccacaaggtacttagtcttccttgttgctgtgaatcttatgttaaacttttgctattaaaattttcatcggagttatgattttccccgattctcgtctacagtataaagttgattgttcgattctagattttttccttaattctgtttcatcatgcctactactcataaagagaatgttcatgcaggtgacttcaagcagtgaatctttgtcaagacaccttttgcgatatagggatatgaacaatcttgtatgtctacggctaaataacttatcactatctcggatagcctctgttgagaagttgctgtttgtccaaatgttagaccttagtcacaatgagcttcattccactgaaggtaagtttctcgatttcagatgttgcatctgtgtggtaaatgtgactaaatggtgtatgttggtcttgcaggattggaggcaatgcaacttctctcttgtctaaatctgagtcacaacagaatccggagtttttcagcgctggactctctaagacatgtgaagcagctgaaagtgttggatgtttcacataaccacattggcaagcactcagtggacacaactagatacctttgttcttcaccgctctctaattcagagttgggtcaggatgatgtaggaaaacagaatcctggattggttacgaagtactgggatgcgtattgcgtgttaacagatttgaatctgaaacagttagatatagcaggaaatgaaattgcaggggaggaattc

SEQ ID NO: 622 - DNA, 95185 bp, Arabidopsis thaliana
gaccgtgtgttttattcaactcactccactttcttcagcatttgttgaggaaacggcccaagaacacgctccatcatcgctagatgctccaggttttcatgtgtttggaacaatgcttcaccctacaaatctcaaatctttcaataaaagactcccaaacattcattaacaatcaactacttcagacacacaccgtgcacaactccactatgatacatccaacgctccaaacatcacacggataactccagccaagacctgcacacaaggcaatgtttctccataagtttgtgatatctaaaaattttaatgagtttttataacaagagctactcacctaaaatgacttctggtgccctataatgtctggttgatacaatgtaggtttggtcctggcgctcataagttgtgctaccaaaatcaatcacctttattgcacttgatttaggcactcttttatagcatacatccctttgtaatcgggacccctgcatcaggaaacacaaccaaattccttcagcacttaaatagttggccacattaaggtcacacacagttgcattcgagatataccttgtactcgggaatcttcacatagtctgaggagactaacagaatattttctggtttaaggtccgtatgaatcatgcgcaagtcatgcataactgcaaaacaaaaatagacaagaaaattgccataagaaatgaaaagagctgaaattcaaaaactaatgatgtaaccatctcagtgacaagcaaaactcagataaaaatgcacgagcatgtagaatgaaaagactgcaaagactacacacatgctacacattccaagagttgccagccaatctcacggacaagatcaatgggaaaggagcgataattgtttttccgaagaaaatcgtataaactcgatccaagcttctcaaatacctgtagcaaccattttaagttcatccacaaaattcaaccccaactatttcccaaaccggggaaaatcatagacatcacaaaattgactaaatacttacaatacagatatggttacgatagtcaaaccagttccgaatttgtacacaactgcaaggaatacaatgatttaacctttgcaaaaaagaatcttggaaaactatgcttgacttcatcagattagtgatgcatgaagaaaaagtcaacagacagtacttaccgattgccacctttgtcatgtttaccaagctgttgcagcatttcaatttcaatcatagcagcctcacggtatttcttcacaccacggacaatttttactgccaccatttccttcctctccctatcccaacattctagcacttgaccaaaagtacctacaaggaaaatttaggaaatcagatacgataactacaccggacctatgaaaataacttgtacaacaaccataaattcataccttcccccattttgctataaattttatctgcaaaacaagaagagcatagagaaatcagaatactgaaatcaaaacaatatacacaaggtccaccacaacacctagagtttgttcaaagccattgacaaaaaaatctagagaaatttaaaaggtatcttcaggattttatcaaaacagttttttggtaatagaaaagtgggattacagcgtggagttaagtcatctcccagttcaaatatgtaatgtccatccttatcatcttctcgccatgggggagaaccatttcgagccacacccttaacacaaagagagctactattgtctgaaggagctccggaagatgcaaagcttgatatatttccaatctcttgcccacaaaacattcctacctgagcctacacatattcatgtaccataacagacagatgaaaacctgccactatccttctacgccgactcgttcagagtcatttactatcttaaaaccttaagggtaaatccaaatccaaacaactttttttgtattcaacgtgcatctattatctattgttcttcagaaaaaatcacgaagtcacgattatctttaacttatagaattggagagggaaaggcgaatcagccaacacaaaatcttgctcagctcaaaattcacaaatcatgcatcagatcaaatttggttcaccatctacaaacaaatactaaaaacaaaacataccacagaaattgaacctaacaacactgaacatctaaaatatttcaaggacagaccaaatttaaatagatctaaaacaccacctaattcaatcacaaacttcacctaatcatacagaatttggtttcttcaaattgaataattgacaaaaacaaaaacattgagaaaactgcagatccagaagaatcaacacaaaaattaaaccgatcctaaattttaaataaaaatcaaattttcaaaggaatcaaacacaaaaactcaaattggaatcataaataacgaggtgaagagaatttataccttggttgcctgaggcaacacatcccaaccgagacgcgctctctttctgggacgacgatccatgtgagtatgagggaattcatgcacacgctccatctccataatctcagaatcagagaaaatcttaaacggtgtgatttgtttcagaaagccaaacggcgatgacgaaaagcttttttggtgtaaacagaatcgtagcctaaccctagtttttaagcagaggaatagcaaattgcgatagagaagcagtcagaaaaatctccaccgtccacgtgtaatcaaccggtataacctgggttagttggaactgtgctggatttaaccatagttgggttggctcaataattgatgggagagagaatatgcttccactttccagacgatgaaacaacaagaagtgcttcatatttctagtaaaacgacacgcatttaaattggataaagatttttttttccgcgggtcgaatattccactctctaattaacttttttttcggaccaaactctcttcttctttttttcgtcccgaccaaactctcttacttacgatttcggaccaaactcgaatagtcgcaatttttgtcctagattatttaactttgtctactagaagtttaagccgaattttcttttctttttttcttttttttttcttttttttttcgtcaacgaattttcttttttatataagcaaattattctttggataatacggatcttggtataaagcaaagggtaagtttgccattggaatttcaggattcaaagatgtatttttgatctatttcaactactctaccttccaaaacttttcaatttttttttgttgaagagaaatatagccacttggagcgtggttaaagagagatcctaatggcctcttaactcctgaatataatggcctagttgctgagccccaacgaacaaagcatcagcagccagaacaactccaaactacaaacatgacatgagagaagcagtcatgaggaacatgattcacaaaagaaagaagctacaagagattttgattaaaaaaactcaccagacgagcagtatataccaaacggtacccccaaccttctttcgcagcttgagctctttgctggtctgtccaactgcaagtaaaaagatgtatgagcataataccaaatgctgctaatgatgtacaagatagagctaggctattgacttacagtcattataaataaatacaggcctatccattattctcctcattgtcttttgagacttttacttttcaagctatgagaaagtctgagtagcaaaagagagaattacccgaggaactctgaaaaacctccaataccagcaagcttcaagggttggacaccttctgtcactagatcctgctatcacataatgaatgaattagttatcgatgttgtagaatcttgcaattcagaaacgaaactgaaaaagtataaagcacaaaaccgaaagtttaaaacaatcgtataacctcgtcttgagcagattctaaaccaccttgtacccagaacagattctcataccctgcattatatagtagctcgcaagcagctaaggatctgacaatatttacgagtcaagcataaatttgaggatcatccaacaatatgaaccctgtgattcacagttatactatcaacatactaactttcaatataagactaattttcattccacaagaaccgagaccatttgataatgatacttcttcaacccaaaacctggataaatcaccatgcaattctatgaatatataatatataggcagagaacctaaccagccacttactcattataatataaagtaaccacatatttcaagcatggttagtcactcattatctatctatatttcaagtacctcaatcctttttggcaagcaacaatcagctctgagtcttttgggaatttctcctcaacctttgacaagaagagcctgcaaacgaagtagaaaaccaagaagcaagtaagtatgccaaaaggcaaagaagaaggtcagcttactctcgcagacatacctattaaaagatagtgtaggtgctccactccaccatccccctgtacaagtggaaacatggtgaaatcaaaaccaaaattttttacaagaaccaaaaagaatttaataaatgcgtgtattcaagtgttctagtctctatcctagatgggattagtcaatgatatacaatagaaatatagataatagtagggaataataatgaattgatccaatgtcactatagtcaacaggttataacttataatggtggagaagtacccatagcaaaactagtgacttttttggaaagagttccagcgtcaaggttgtcatcattgtcgaagataggaacccaagtggagcctttaatccatgcctttatagaaaagaaaagaaaaaaatcgaaggagaagactacatcagtaacacactatagttttgatttcataataacattacagtcgccaagagtttgaactaacttactaacatgtcatgcaaaggtgagatacatgaaccaaattctatgcaataacgttcaagggtgaatttagacaagacaatcatcatctatggataagtaaacaagcagcctaataacttaaaaaacaagaatgtaccttgttgcgctcgctagagggacgaacatcaaggagaggtttgtttgaaagagaaatagcatagcctgcttctcttggtgtaagaagcttcacttttccttcccttaactatgcaaacaataaatttgttaatagtgagaacagttgaataacaatgaaaataaaaacatgaaccataatcactccaatgttccaattttaagatgtaagtgatggttaccaaaccatcccaacgctttttagcagcagctatgtctctcatttgcttcaaatcaatatcttcatcaacagcttgcatcctaacaacacctactccctattcaacaacaaagagtgtcaaaattttactttcgcttccaatcaaaaaaatcgaatggagaaaacgagataaggccataaaaccaaaatagagaatcaacttacaaagcgacgaacagtggagagcgatgtgcctccaatgggggatttaagtgaagataccattgaagaggtcatcctcgagtgctggtttctaaaaagattagaaccagaagctaacagaggatttagaacgggaagagatagagactccatgttttaaggttctgagcttttggttccagtaggagtaactgagaagatggataatcttcgcctttgcgaatcaacaacagagacaaaagaaaagagtagtcaatttcgagttattggatagttttggcttcattgaagcagtcttttcgaaccagactcactttggttagaaaattcggtcggagtcttatccgactctgacagtaccaatgtaataaaagcccataaagatcccttgtttgggcctaagaaagccaataaaaatacccatctacataatcagtaatcatcaagcctattgatccttctttttcctttttctttttgatcaaaaaactatggatccttcttagttcttacaaatacaagtacaatacaacttccacccactatagcaaatcgagtgcaagcttctgtgctaggttggatcgagagtttttgttgattattgttagttggttcctagatcggagattctgtttgcaggctattacacttcaagtttgcacatgaacaacaacaacagcaagacgacagcacacgaatcttgtcaaataaactaaaaaccagtcaaaagtgtcgtgtgggaaacagtcagacaagttatcatactttgtttaaatctatcttcctgttgtattttaacttggcatacaaactacaatacaaacacataccccaataaattgaacgacactcaaatacaatcttttgacatcaaaccctccattttcattcggtagctcgacttctgtccaaccaatccacactcttacgtgctctctccatcggctgagacttatctctgtatatgtccacgcttctccttgacctctccatttcttcaaatggaaccttcagcttctccggtttctctatgtggctcaacttgtatccctggaaccttagtctgtctatgcttttcctcggtttttctcgtccgtccttactcttccttggagcatctacactatgacgaggaggttgttcacacccttccatgcttcttcttgagaaagaactgtttcttttcgatgcagatttctccacagcgctcacaaacttcttgagatggcctatgtattcgggaaagagttcaagatcacaatggtttccacctttgagccatagcggttcatatttctcttggcagagttcccaaagctgcttcccatgagagaagtcaaccacatcatccgctgttccctgcaaatcgaaaagctttcacctttaagctaacactgaggattattagacaaggattcatacaagaatgaacggatcttgcaaatctgttcaactttattaacttcaattcttccaatcaataatctttgatcacggaaacttacatgaatcacgaggacaggacacctcaccagcgtaattttgtcaatgttctgaagaagatcaaacaaaacggtgtcaagaaggaggaatgtttatcagcaacatcatgtagagaaatcaaaagggtattatgttcaccttgtatatgtcaaaccaataagttcgcttaacgggatacataactctaagcccagaaagaattggactatgaagaatggaagctcttagtcgaggcaaacgagcagctaggtccacggttggaccactaccaacagattgaccatagagaataatgttctcctgcttagccccataattctcttccagacatttgtaagcagcctcgatatcagcataagtgttttgttctgtgggctgcaacaaaatggagatttatgttcagttgttcacagtgtaaatggaccaacatttgaatctcagaactaagagagctttaggatctgtggttactcaccttccctgatgattggccataccctgaatagtcatacctataaacaccacaacatatttagaggattttccaatgtcataagatggaaatcataaccttacagaagtaaattctactaatttcaggttcacttgaagatacgacagaaaaaaatagcgtactaatttgagaaaccaatctatcccagaatcccaagttatacctgaatgagccaaaaagttgttacatcaaagaactacattttgggtattcagtacttgcctttagaaacagaaacaataacagatcttgaatttctagaaatggtaatgtttgcccaagaccacttgttgtcaagtgtcaacaatcaaactcaaacatctcaacctcaaaactactttttgtctctttgataaaggatcagtagagatcctgattcagacaaaccctaaagacaaactcttccagcaaaaatccaagattttatgagtctgcaacttaaactttcaaaagctttgtgaatcacaaatccacagcttaataaagtccacttctctctaacactaagaccaaaattctgcatctagaagcttcaaatctacttgcacaaatccagaaaacagagcaaaaccaaaaaaggcgaggactttctgagcaagatcctgagctaaatatagaaagaaaaatctgatctgggagatttactaaccccatcaaattgacgcggaggtgaatactgagctcgatgaagagctcatacatctgaccgatgtcggcagcatttccatgagagtagagaagggtggtgacggccattgggtatctgatgtacatggccacgatttcggtgcctcggcgcgtgggcagccgcaaaatgtcgacattttctcgatggggaaaagggctcattagaaaaagctccgttgtttcatctctgaccagcttgtacgacggcggattcggaggaaaaaacgccaacttcgccgccattgaagaagtcacacctcccatcttactctaagaagagtccactctgtctctctctgttactctgtattagtaagtgtataagtgagagaactacgaggaagtcgctggaggtttcaaagaagaagacgaagatggtgatgatgatgatgattgcgaggaaacattccttacttttttgcttctctttcttttagagatagagagagagagactcactggcctatgaacctaaataaatttgttttctaagttctaaccatattttaatgtatcaaaattttaattttatttgtttgtccagaacgaaaatggtgatactgtctctattgcgtctaaaaaccaaaaccattattcctggatttatacaaacaaaaaacgacatttcttctttctttgttttgtttgaaatgcaaaacataacatgtccaatatcattgtatttaagagtttatgtgattggcctctcatactatattactacacatgataaatcatagcatgcatgtgtgattcacatggatatcatcataaaagtccattacaagttaaaagattctaaaaaccacaagttggtgtgtagctagatttgtttgctataacatgatttaagattgaatttaaaagaaactttttgggtaagtacagtattaaataagatacaatgtaatgtaatggatttacatttacaggttgtagggtttgagggatacacgtggatggttgggtgccctagaaagaatttactggcgggatcatggggtaggggaccgatacaatccttcctccatcttttcttgccggcaccaactatatatacacctccatttatgttaacaaaaactacacttaagtatattccaattaataatggactagtttttttataattgagtagtttcgtgggtgattattttctttatcagagaataatgaatcttagttttctaagtatctgcattaggtagctctatatcatgatatataatttttttaaatgactatttttgttttgtccaattacttttttttttttcgtcagttttgtccaggtttactaaaataggttaaaacacattttggacgacttcattcttatcattttgtttaagaaaaatattagtacatttttacacttttttgcagaatgatagtgacaataatgaaaattaaataatgttattttatttataaaacgttgaacgatggatccaaaaataattaatagaggtaagcaaagagacaagtgtggaaattattggaatgactggtcgagaagctaaggctaaggttgggcgataagagagttccaagacaagatctggcctagaaaatgaatcatcagtgtcgctctattctcatacactttgtttcctctctttttaattggttttatatattgcgtctattatttcttacgctgtttgctacacatgcatgaatatatggaccatttaatctcgtgtatcccaacaaatgttgcatttccatattttgataaagcgactcaacgagcacgatcgagactttttgcttattgttttgtcttttaaatgcatatttcactctgccatcatcagttgaatctaattctatatgttttagaatttgattgttacattacatgttttgcttgtctcagtttgtattacgtaccctctaataatgtgaaaccatgatttcatatttggcttggagttatacatacttgctacaaacagaactcgaagaagagtctttcattcagattagtgaattcaacgagtcatatcaattaagttcaggactgtaagctggagctagaatataaatgattttttctttacaaaaaaacatagtgggtcatgtgccatagcactcccagtactaagaaccgggcatgggtgaaagggtaagagagtgagagagcatttcataaaaggtgtaagctttttatcatttgttcttagctaacaagggaaagaaagataaagagggagcgtgtatatttgtacacgaatttcttgtattctctccggcaaactttttattggcattggtgggtaagatttcagctagacgtaggtgatatacataattttgtatatctataatttttctaggatacatcacatgagtttaggcctcttaagccaaataagtaagccatattaataagctttaaatttagacttatttttcatgtgtggtttgtttaagtgttggattagagagtggccaatcaagagattaaaatagtggatccctttacgaacacaatgaagatcccaatcctcttctttaggaacctctagactggcagagactaactcaccatatgacaccacctttctagtcttcttcccttaggcctcgaccaacttgtgctttgctatagaagcctttcattctcagccgattttggggtaaacctcgtagttgctaatatctaaaggtcaccgacaaggcatgtcccagaaatgtgtcgtatcccccgatgcgattgagggaatgaaactccaacaattaggaattaaactatgaataagagatcatcaaaaacaagcgatacaaattactttagaagcagcttaactttcacattcagagttcagccaaaaacaatcgttgaagagtgtaagaatctcgtctaaacaaaatgcaagatagggagagagagagggcacagctagatctcagctttaatatccacgccttggaggacgctcttccgctacattcactctgattgctctaccctccaagttctgtaaatcaagagacaatgaaaggtcgattaagagatacatcacaaaatcatgttgactgcattagcataaccatatatgaggaagagtagggtacctgtccatcgagggcagagatggcttcgttgagttcatccacgtcagacattgtgacaaacccgaatccacgtgaacgacctgtctcacggtcgtaaaccaccctagcttccacaactttaccatgctcactgaaaagctgttctagacggccattgtccacatcccatggtagattccctacatatactctgaatgcaggttcatatacccgaggcgcacgttctggacgtgatcctcttggagctgccttgtttacagttagtagacgtccgttaagatcctgaaacacaatgaaaataccaacacagatattcagcaatgttctcacagacagaatcaaatgttagagaatccccaactcaactcatttcccaaaaacaattccacacataaaatgccaaagcttccatattcgattgacaaatagaaacagagaaagtgtgacaaatagtaacatagaaagttttggataacagcattccatagacaatagaaaactgttttcttagagcagaaaggacgaaatcaaaggagcaatatcccatcacaatacatgctaataactcagaaacagaaatgattgaaagtttgaaccatataaacttacataacggttgaacttctccacagctgtctcagcttcgtccacagaactcattgtcacaaatccaaacccacgactctggtcagtttccctattgtatataaccttacaaccacaagaattcaaagaacaagtcaggactaacaacattatctcttgaactaaataaaaaagagagaaccaaaagtataatgtcaacagatatgaattcaatccacggaattctaactctcaaagcagagatgctccaaacacagtcatcaggccaaagaattctacttttctcatccattagactcatagttgatgcaaattgcaatgcacaaaacacacataaataaccttaagcaatgcataatgaacaacatataaacgcatcaagacgaccatatgagcacaagaagaaagcagctaaattcacctcggcgatttcaacagtaccggcttgctcaaagagcatagccaaagcttggctattaacatcataagccaaatttccgacgaaaagcttggcttcttccgatggctccgggaactcagctctttcgctcacagctccttcgctcacatctccttcgctctcatctccttcgctcacatctccttcgctcgcatctccttcgctctcatctccttcgctcacatcttgtgactctaaactgttctcggtctcctcaacagcgacgcttccttctccaccttcttcagcccaatccgaagtctgggcaacgaaggagacaaagggggattttttaaggtgggttttggttttaagagatagagagacgcgagagaaagagaggggcaggttaatgcgtccggtaaggagggaaacactggagctgcgaattctggaggaagagatggtagaggagatggaaggatgggagaaaatggtagaagaggaagaatcggccatggctaaaggcttcaagctagaggtaactatagaagaagccattgctgaattgtgagagatagaagaagtggaagtggaaggagaagagaaaagaagaggaagggaagggttttagaacggtgggcgagataaggataaggagggccgagacatcatcttcaaatgggctcttagatttaccatagttaaaatctcattacaagaaccaaagacaaaaaataaccatgtccctctgcaaagaaaatttcacaatctcttacgaaaacaaggtttatataaacttatcaaaacgaagtttatattataaaaaaataatacacaaagtctatataactcaaatcaaagttctagtcacaatttgaatgttaatcttacttcattttggaaattactctatgttaatttggatgttaatttgggtaagcccctctacatgtaaacacacacactcatgtaaatataaacccacttaaatttgaagcccatttagaaccatcaaaattattttgacccatataaactcatttagacctatttaaaccatatgtgaattttaatgaattattatttatttgattatttaatatcattaaatcatataattgcgaaatcacaaacatcatagcataaactttaaaatttcacttgaggtaagcattttattttccacaatacaaagtctcattttcaatcttataatgagcaatgataactatttgttgagtttatcaaagagttgatcgacttgataaacttgttttgagttttctagctctctaagaacaacctcataatgatctatctaactttcggaagaacaatccacttattctcgaatacgaataaagagaaaaattacaaaaggaaatacatattagccttgcgaactcggtagtaaaatattatggtgtcaaacatttcggtggaggcttgtgtgcgttatgatcggttttgaaagagttaactttaagggggtgttattcgttaatgaattttaatagaattgaaatccaacactaatccaatgttattcaactaatgattctaaatccagctttaaaatctagtgttattggaactcatatttgtaaatcatgcttaatagattttaaagtttggtgttattcaattaagattttaaatatttcattaaaatccaatgttgttcaaaactaaaagtcttgtaaaatctttgtatattaattgatttgaaatgaaacctctttggagtttcatgagtaaatcattagaatcaaaatccaagatatattgcagagattttgaaattcatacaaacatattcttaaaagcaatatcagaaaacaaatctaaagtttaaagaattaactttaactccataattgaataacaccagtaattctgaatctttttgttggtttcagttaactataatttcttactgttacggcatcactgaaatataaagaataatagaacaaatataatcgattgttacaactaaattaactgaccagtacacgtgaccgcacacaactcataacatggccacttaaaccttcttgctccataggaatttctttcgttccccaataactcaaatgtaaagattttttttttcataacaaggaaattctctacctagttttatgctatatacagtatgaccaaaaaaaaaaaaaatctttcttggcaaactaacatttaatactcactgactgaccaaatcaaaccagccacatactaatcacaccaactacatcacatcattagttgcgaccacttgttactttcaaagttttcttcttcctttcgttcctagatgtattatcatgttgcacatggccatctttaacaaaagaaaatgtgcacatggccacaaagaaagttggttagttgtttaattagttactttcaaattttaaataaatcccataatcagtggacagtagtcaaaacacgaatatgagacaaacccatcaaaagtagagctactgtggtattgactgctccaattatctttcttttgaaaattttagtatttcttttttctattcaaaatctatcaacttcacttttctcttctctcattgtcatgcctaggattttcttttcctatttttaagggtaatttttcttttaatttaccggaatcgatgcattggccagaggaaaaaaaagtcgcggcagttggtcaaacattgactggctccaacatctttgacccaaaagttaccattttacataacattacaaacttccgaataaaaagtcattttatttggaaaatcaaagagccattattgacttgccaaatgggcacacttttaactaacctctccatcatgtgtgtacgcaaatttatacttcaaactaatttttgtgactaatctatgtctttgcattgcaatgctcataagaaaataatactagtaaaagataaagacacaaaatcatatttatattaatatcaagatcaacacatctgcacttgttcccacactttaacctaatttaaagattccttaaaacagagaatccttaagaagggtcctagagagcagctagccagaggttgtattctccttcaattttacccgaataaacaaacaaaaaaaagagtaaatcaagggattaagaaagtcttactacactacttaatcccccttaattggtggctttaattgccttttcctatataataatggggtaaaaacttaagtgtgaccactaagccacaatcagcaacgggaacctttacggcaattcagtgcaccagaagtagacgtcaatggtccaactagagaagacggtttagccccaaggctcgaagcctttgcatagctagacgaggctgcaccaccagacggagtaaaaaacgcaccgtttagcaacaaatctccggaagatctccaattccatctcttccactcgctctcaggcgcgtcctcatgcttagtcacttctttgctaaatctgatattgggtgccaaaaatctgttcccttgactattgattgtaggattagcacttccaccaatcgcatacatctcccaatgtgtgtagtcattgttcaccacatggaagtatccatgtctacacctacacaacaacaatacaatggtcccaaaattaatctatatccatggtcacaatcacattaactactaacacaaagtgattttttatttacctgggcattctttggacaaggccttcaccaaaatggttaaaagcaatggtaacttgcatattcttgtcacgactgtaagtatcactatgaccaagcaacatgaccttatcatgatgtgtcatatgattgttagacaaagtgatagccgtcgagcccatgatagcatcaataagtccatcttcacagttagagaacgaacaatggtcaacccaaacatgacttcctccaaagatagagacaccatcaccgtccgatatcgttctccacccgaaatgccgtggagagctccgcaccatagcgttgccaccttgcttgcaatcatggatatgaatcccatggatgataatgttggtcacgtactggatcgttatacaaggcccaccagagatgtgtacggaagcaccacggccatcgatggtcttgaatgagttcatgattagctcttctttgagctgaatcgtcatgtctcgttggaagatgatccagagtggctcgtcttggaccacggcgtgtcttaaagttccgggcttggggctaactgggttgtcgtttcctgagtcggtgaccacgtagatccgaccgtcacggccaccgatggcgtttttgccgaatccaatggcgcagtcagcgagacgttgacggtgttgctcccagtgagggtcacaacgccaacagtcgtcgattgggttaccggtcgtacatgagaggtaacctaacttccttcttcctgcaaccgacgcattaatgctcctgcaacaacacaaacacattgcaaacttttgttagaaaaacagagacttttcaaaatggtcccatttttgtaaaggcgagaactttgtaacactatgctcaaattggtttgtaaaggtgagaactttgtaacactatgctcaaattggtttgtaaaggcgacaactttgtaacgctaggctcaaattgggtttccataaaaagcagaaatttaaaggagaagtgggtttcaagtaaatgtgaaggaagggttaaggaaaaaagatgaaagattcatacttgtgaacttcttcaacgacagattcagggtcaggaactggtgaagataagaacaatggagcatagagaagaaaggagacaatggtgataaagagcttcttcgtctgcattttcatttctctctctctctcacttggattacagtactgtctctctctcggattgtggtgagagaagagggaagcgaaggaagacagaggaaataagtattgagtggagaatacagagaagaggaaattttgggggtttatataaagagaaaaaggacctctatactatttgttattggaatttttaaggtttaggtcccacttttttttttttaaatcatctttagttaaaaaaaaaccttatactataataatgcctaggaggtaggaacaaataatatggttacatccgttactcaaatctaattgttgacaaaaaactaaataaaaagcctccaatctaattaggtcgatatggtgtacttttcaaataacttccacatgacctgtttagcccaatatatacattatagatccagggagttggtgttaagttagttaagtataaggatccatatcaagtaaccattatatagtttataacaatatatatttgcatgtatttataattgtatattaatgtgtattttcatacattttagaacagtaaagtcggcattgagaaaagtttgactttttcttgattgggcatgtagaacatgcttcagctttgttctgacctatgaactcatgaatttaattgtgtatctacctcatggcctttcacaaatttccaatatatcttccatttgcaaattgtttgaacatgcatgttctacattgtcgtgtaggggaggaagacatcgacgtgccctcttttaagtcaagataaagaagctggtggtgggaactagcgattcaaccatatccactaagcgtgtatggggtatgccaagagccgtggatttggtaagtagtaatggttgagtcgaagcacttgtcagtcagttacctcagaactccgtttcttaaacaacattctttatgcatcaagtgggatatatatattaattatgttccaatctttccaaatataccatagaatcgaagaaaattatcgaatagcatcatttgttcccaccaagtttcttagctcttcaaagggatatttcgatgatggaagacgattggaggacgagggaatcttcaaaatatgttttagttagatatttctatacttttaaatagattgttgcactgtatatgctttactaattgctcctaccaatagtttgatacactaaataattcgtgcggcaccattgggcacttgcggaatataagaatttaaaatgtaaaatcttccccaaacgatttggatcctattgcattcacataaagtatgatgacaacttttaaagtgtgggatacagtttggtaaattttatatcaatattgcggggttccttgtattattagcacatagcatataactccgatccaaagaattcactaggctttacttatagttgcatatattaattgcaaaacaaaattaaataaccattggaaagtttacgtatcatagcagttatctgaatataaacttttattattcagagaaataagatttccaaccatagtaatagtactacagcaacatgtcattcgagtgggatatcaagggaaaaggaagataaatgatttaacgtacatgtcaagtaatctagaaacacaaatagaaaaacaaataatggaatgagatgatgagaaagaaaacagtagaatcatgtaataaaatgtcgggaacacacatttaataagtcgtaatgattctattgaagataattgtccttgcatgatctccgccatatatcatttaaatttcaatatccgtatatctctatggacacctaacttttagatagggactgaatgatattatagtgttgagggaattttttaaatagaaaggagtttatatattgaacacaaaaatgataatcagaagtgtttgtaagaatactaactacttaattaagatgtagaagaaaataagtagtttaatatatattcttgtcttaaaacgtagaaaaaattaattgcagctatttgcttcatgattggtgtcggtgaaaatgtattgagaaaacagtttgtttttcatcgtattcctttccacttcatagtgcaccaatcacggtacgggatttgaaaactctctggcttaaagtcctttaggtaataggtgttggtaatgataggtggaagtggaaaagcatgggagggaaagtgatttgtgggacatgtaatgtaatgtaatgtaatgctgccctcgtgatttgccggttttacgggattccctaattgttaggttgtttttgacagttgagcatgcttttctctgctggactccgtaatcaactgatacggttgctcttttaaactaaattaaaaaaatgggtcctccgtcctcatgaaataaaaagtaaaacagcaaatagtgtcacctttgttttttcttcgacaacaacaataatgtcatttgttgacaatggaagtctggtaaaattgtaaataatatatatactaaaatcttattttgttgacaaaacgaaatgttatagacttattcctagcgaactcatgcgaccttagcacatttcgatttcttgtggttgttgttgttccatacttgatccttgtagagaaacaaagcgctagggttgacgaattttgatcttccatgtctccattgagtggttggtttaatgatgctaacgggccaaaagaatggatatttagttttgaccatttcactaaaacttgtacattgttaaattcttaactagctctttcatcattttggtaatttgatcaattacctcagttacaattttttaaataatatagaattgtattttgacctagtagtagatatagaattattttaccaatacttagatttctggaaaaaaatcttaatgctaagtcaaaactaacgaaccatttttgtgaaattgtcataaagctatatattatttaccttttcacggaagatagtgcgattggctaaaagaagaaatgcaacttgaagtttttctaaaccaacatatgtgttttgtcaatatcttttgctttatcgataagaaacttcaaagcaaacaatcaagttcgacatagaactctgttcaaggaagataattactttactttgatctcggcggtcatatagtgtgttccatgaacggacaaattcttcctcttccccaaaattttccaaaggttatttttggctatttacgggttgtcacaaattaaaaaggaaatgtgcaaatatttattattattctttgacttgagggttaggatactcaatatttacaacaacccctattcaaaacacagataaataaatatgaaagtgaataacatttaattgatggagtagtaggaatcaatcaaggagagagctagggccgctcatatcaacaagtcttcaccttcactccactccaccaacaagatttgatctataagataaatgtgataacgacaacgaagatttgagtaattgtagcacatgcatcccaaaactgattattgttgatgatgaagggtaaagtaggcaactctatcatgcgacgtatcctttttcttttgtttattctttttcctgtccgtaaagttcgccgagaattcgaaaaataagtaatcttatgctatccaaccatatatcatacgtggcacatttcatgctatcctctctactcattgattgaatgaacgtaattttggtgacatggaacttagaaggattccaatgtcaataaaccctatatactctgaagcaaaacataaaaactttgtttacatctccttttgaaaggtgtttaaagatttcttgatgtcatttgaaatagaactttagttccaacagtttcgaaacggtgagaaaggggatgaattattagttctaatccgcgaaagaactttctaactagagaggaatcatccctaggcatccaataaacgtaactagtaattaacggggttgaatcttcttctcatgagtccaacacttttctgccatcttgatttatatacaagaatattgttttcatttaaggtattttgggtttaccagtgcgctttcgggttacattcaaatctttgtcaccacacggacacttctctctctaatagaagaataacctacacatggccgcatattatggtttagttaatagactcgaaaacgggtcagtaggttcagctcattataacacttggccctggtgctataaaagttctatttggacctaaaattagattattatttttttgtttgcgcaaaaatattactatagattttgttcatttgcaccttggacacttgtcaagaacaggatatgctagtaacaacctaaaactaaaacctactaatagttgataaattggacaaaacaattcatcaaaaaatttccttactccacccataaagtttgatttaagaattcttcagtgcaccagcccttaattggtgtagttggaatttatcaaaagcatccttaaaatcgtactccaactacaccaagcatccttaatattgacaaaggatcttcttccatgaatgaaaaccagccctttactatctctaaccacccaagccgcaccagctagattgtttctctttgaccacgaaaaccccacattacacttaagccactgataattggtgtagttggagtacgattttccataaatattatcgtaagactctttgaataggagttcaatttgcgttgcatactaatgtgattaaatgatcaaattggtattattgtcggttgtatactctcgtaagatttgatgcatgtagagccctggtttttgggtcgaaaataaattggctcacactctatcatgctttagttttattacttttttcttatgatttcctcatttctcttctcgtctcgatttgtatagtttcttaacaataaaaatgtatatttcaacaataaaataaaattagttttccttccaaaccaaaaccattagcgattcacacttctctaaatactttttgatgcttttgtaacgtccataccaatataacatggaaaaactaaaatttgactcgaaaaactaacatggttcaatagacacactagtctaatcacaatttgaaagaggatatcagacatgcaaattgaaggatttttttttgtgggggtctggtcaaggagatgagactcaataactcatgttgaattccaaacaacaaataattgttgcatctagaattccaaataagaaataattgagatagttgaatcagaatatgttggtagaatgaacgaacacgtgagtagagtccccaaacgtggcagagaagcggaccacacgaagtcctgtttttattatttgttgccataaagaaatccaaacttgaaactgaaaccgtcgaacgaatcttaaatgaagcgaagaaggaacaccaaatagtagtcttaactctttctctctctctctctctcttactggttgggctctctgtccaaagactccacctttctctgcaaaaatctctgccctcctactctaacatgtctccccttctcctctgtcccttatctctctctattcactcaaacaacaacgaccctttttctatttttacctctcaccataataacttcccttatttaccactttaccaactacttcttcttcttcttcttcttcttctttcgacaagggattttagggtttaggattctccgcattgtacgccactctgttcaatacaccttggtattccccaatctttgacgttttgtattttcagtttgtcgtttccttatcttaaaccttatttaaatcgttcccaagttttttttgttttgtccatagcttatctgggtctctgttttttgagctctgtgattgttaaatttaataacttttctctcatatgtctctgtgttaccacattttcattgtttatcactaattgcttacattcattattaggtaagtgatgatgagtgttgaatcttgaagttttaggagatagagagaaaggtttaggattgttttgatctgttttggaaaatgggggagactaggaggcactctgttgatgttcccatcacaagaacacttgttgctcttagaagggttcggtcactgagagatccatgtactacttcaatgagcaagtttgcttctttgcttgacaatgtcaaatgggaaactggttccaacaatgggatctcacttcagtttgtggaacatgctgatgatgcttgtaaggctgctgctgatgctcctgtgggtttgattccttttggttcatactctataatggaggagcttgagagtggttgtgatcttcacaagttgagtagcaaggtgataaatgttgaaggagacgcctgctctaggagtagtgaaagatcttgcagtgatttatcggttaaaggtagggacttagcatgtaatgcgccttcaatcagtcatgttgaggaggctggttcagggggaagatatagaactcattattccactaagttagctagctcggttggtgaatatggaagccgtttaggtagtccgatgaactcaacaaatcatagttattatggagatgaagatgttgattttgatagtcaatctaaccgtggttgcgggataacgtattgctggtcaagaacgccgaggtacagaggatcaaaccaatcctcagatgtagaagagtatcctttactacctggaaatggaaatggtgagagtgatgtggtgacaccgagtcatgaagtgttgtcgaggagtttgagtcagaaattcaggccaaaatcttttgatgagctagttggacaagaagttgtggtgaaatgtctcttgagcaccatattaagaggaaggattacttctgtatacctttttcatggtcctcgtgggactggtaaaacatcaacgtctaagatatttgctgctgctttaaactgcctttcacaggctgcacatagtagaccatgtggcttgtgtagtgaatgcaaatcatacttctcaggaagaggcagggacgtaatggaaaccgattcgggtaaactaaaccgacctagctacctaagatctctcatcaagagtgcatctcttcctcctgtttcatcaagatttaaggtttttataatcgatgagtgtcagttattatgtcaagaaacttggggtactcttttgaacagtttggacaatttctctcagcattcggtttttatactggttacatcagagctagagaagttaccgcgtaacgttctctcacggtctcagaaatatcatttctctaaagtatgtgatgcggatatatcaactaagctggctaagatttgtattgaagaaggcattgattttgatcaaggggcagttgatttcattgcttctaaatctgatggttcacttcgggatgctgagataatgcttgatcagttaagtttgctcggtaaaagaataacaacatctttggcctacaagcttgtaagtttacacttctttcttcatatttgtcttggaaacattagatagtttagaagtgaaagatcaacatttctttgattctgcagattggggttgtttctgatgatgaattgcttgatctgcttgatcttgccatgtcttctgatacttcaaacacggttataagggcgagggaacttatgagatccaaaatagatccaatgcagcttatttcacagctagctaatgtcattatggacatcattgctggaaactctcaagaaagtagttcagcaaccagacttcggtttcttacaaggcatacatgtaagcaccccagtgatgattactttgaatatcagcttcaaattaaaacctgatctcactctttatcatatactgttctactatatatagctgaagaagaaatgcagaaattgagaaatgcattgaagatactatctgatgctgagaaacacttgagagcatcgaaaaaccagacaacttggctcactgtggcacttttgcaacttagtaacaccgactcatcatcttttgcaacagatgaaaatggaagaaaccaaataaacaaaggtcctaattcataaattctcgtttcctttatttcatgcttctttttcgtgttgtcttggttactaactatatataacttacccttggtcatgtatctagacgttgagctctccagcacatcatcaggttgtcctggtgatgttattaaatcagatgccgagaagggtcaagagagaaactgtaatgaaacagttgaatctgtgtggaaaacggttacagatttgtgttgttctgattcactaaagagatttctgtggaaacgaggaaggttgacttcacttactgttgacaaaggtaacttatatttcccaaagatggtctgaaagttttactttggcttgtgtctcagataagtaaatgcatattcttttttcttttcaggtgtggcaatagctgagttagaattctacacacctcaacatgtagcaagagccgagaaatcatggaaattgattgcagactcgttccaatctgtgttaggatgcaacgttgagatccaaatgaatcttgttatctctgcgtgttctccaccaaagagtgctaaagcagcagcaagtcttttctttggacttttcagttgttctcgtagaatgcttcacaagtcgtatttgactacaagaaccgactctgactgcgcatctgaaaagcctgcagttacaaattctctgagaagttgccaaggaaatgtcttgagggctcgaagtgttcgttcttcagccaatgcatcatcgcgtatgagctgttccagtgatcaaggcgatgcaacttctgctatgtgtactccacacattcctccgggtgaaaaaaggtaaaacatggttcatatttattcatttcaaaagtaagttgttttgtgatttggctagctactcaagtatactctgcctctgactttgtgcaggccagaagatgacactgatgtgttgtgttggaagaagactcccctaggcaaggtaaacatctcgactatgcctaagaattcggtttcagatctctgtctgtacctttttggtgtttctaatttgtgatgatgatacatgtcttatagggtcagagcgagacacagaacagcaagagctcacggcttatcggccgagtccttccctgcagcactgcagctaattaagggagctcgatgagggtaatacccattttgtggaagtggaaccaataggttttagcaaacccattgtttaggacaatgtgacacaaaaatgtatagttgcaaaatgtgtttcaagaccatattttagattagcatatactaatcactcctttaacagacctgaattttactgtctttggacccttttattgactgagctcattatgttttcacaaattatctcattcattaaaacgaatcagaataaagtgaatacattagtcttcaacttttttgttacaaaaagtggataatgtttaattttttcaataaactgatttgaaattagaaacataatttggataaggttttagtaatttgggataagatattgacagagagatatttataaattatctggtttcactattttggtaggaaaactccaaaattaaatccataaccctaatcgatatctctcttggacaggccagcacatgtaacgagcaatcgtgaccgttgagacagtaacacgtggcaacagtccttatgatgagacctttgatgagaatcagcagcctccatttctgtaagctttttgttcctcccaaaattcccaaatccatcttcttctccaaacaatcttctctcaaacattactactattttccaggatagcttacgcagcttcagactcgggttcttcttttcgatctagcctccgtcctctttcttcttaccacggatctcgcctgctctttttccgtacgacggtctgctttgtggatagtttggctgacgacgaggcgatttgaacattaacagttactggtacttggagtttcaaacatttctccgatgttttggttttggcatttagtcacgggaatgattaattgattgattgctgtagaaatatgtgaagaatgacacgtagaagaatttgatgaaaccttgggatgcataggcttctgtattatggattggtgattttagatctccatttatgtcgtttcacatcagtgtcttgtggttttagctatatgctgttttggttttaggttgatatttattgtatggtatgtgtttgttaaaggaatgatttgatgatgtttcactgttagggtaattgccaaggatggagggtttcctaacggatcagcagagagagatgatgaaagttgcaactcagactgcagatgatcttccaccctcacaaaaacctcactcggttttacttgagcatctgcctaaaccatctggtggtgggaaagcttctggtgcgtcaaatgctgtgaagcacagaaggtctcatgcgggaaggtctattcgctctaagaagggtcagttactacctttatcagtttagatttgggtttctaaaccatcaagtgtcaagggatggctcttagtcaaatttggagctgaaaattgtgtagattgcatatttatacttcctttgttcttcgggtagcggtgattgataaattttgtttcagatggaggtggtgggaaaggaaattggggaaaacttattgacactgatggagactatcacattgacccgaatgatcctaattatgacagtggagaggtagtttctgcacctttcgtactagatggttgattattttcttgccaaagtacttgcacaaaactgtttctgttgtccatctgctgttcagatgatgtagaaaatttatccattgtgtgttactttttagagatcatcagtctcagctctctttgtgtttttttttgttttataggaaccattcgagcttgttggtgcaactctgtcagacccattagatgattacaagaaagctgcagcttccatcattaacgaatacttcagcaccggtgatgttgatgtggcagcagctgacctcattgaacttggttcaagtgaatatcatccctacttcatcaagcggcttgtctcggtagcgatggacaggcatgacaaagagaaggaaatggcctcggttttgctttccgcattgtatgctgatgtcattaacccgaaccagataagagatggatttgtcctgctgctcgagtcagccgatgactttgtggtggatatacctgatgctgtcaatgttcttgctttgttccttgcacgtgctgtcgtggatgacatacttcctccagcttttcttcctagggctgccaaggcacttccaataacttctaaaggttaccaggttgtccaaactgcagagaaaagctatctatcagctgcacaccatgctgagctagtagaaagaaggtggggtggacagactcgaaccactgttgaggaagtcaagaagaagattgctgacattttgaatgaatatgtggagactggagagacttatgaggcatgtcgttgcgtaagagagttgggtgtttctttctttcaccatgaggttgtgaagagggccttagttactgccttggaaaaccacgcagcagaagcacctgtattgaaactgctaaatgaagcagcttcagaaaacctgataagctctagtcaaatggtgaagggattttcaagattaagagaaagccttgatgatcttgctcttgacattccttcagctagaaccaaatttggtttgattgtgccaaaagctgtctcaggtggttggcttgatgcttcgtttggttatccctctggtgaatgtggacgacaacagaacgaggatgagaaactaaagcggttcaaggaagacattgtgaccatcattcatgagtatttcaactctgatgacataccagaactcatacgcagtcttgaggatttaggagcacccgagtacaacccaatttttctaaagaagctgataacacttgctttggacaggaagaatcacgagaaagaaatggcatctgttcttctctcatctcttcacatcgagatgttcaccacagaagatgttgcagatggtttcgtcatgctcctggagtctgcagaagatacagctcttgacattctggatgcgtccaacgaacttgctctgttcttagctagagctgtgatcgatgatgttttagcaccttttaacctggaagagatcagtagcaaactacgccctaactcaagcggaactgaaaccgtgaagatggctaggtcactcatctttgctcgacatgcaggagagaggcttctaagatgctggggaggtgggagcggttgggcagtggaagatgcaaaggacaagatatcaaatctcctggaggaatacgaaagctcagggctggtatcagaagcatgcaaatgcatccatgagctaggcatgcctttcttcaaccatgaggtggtgaagaaagcactggtgatgggtatggagaagaagaaggacaagatgatgctggatcttctgcaggagagtttcagtgaaggactcataaccacaaaccagatgaccaaagggttcacaagagtcaaagacggacttgaagatcttgctttagacatcccaaacgcaaaggagaaattcaacgactacgtggagtatgggaagaagaatggttgggtttcgtcgtcgtttttaacttccctaactgaagatgctaatgtaggctagagatcaagaggagatatcccaaatggtgtgtgaactaaaaaaaactgatagaatgtacaagtctctttctctcttgagcatccctgtggttgttttgttttgcacttttaggctttgagaattctgcccagggagcttatcttttcacgaatgtttaacttttttcttcagaggacctttttattgctctgaatttagtccaacggaactttggggctatattggatcaagtttcaattcagagtcaataataatgccttgatgacaattagacaaaacaaactatattatttgcatttggtgtttttctaattatgatccaaactttaatcatttctttaattaaataaattcccatatatgcttcgatgtacacacagagacaacaaggaagggaagtctcgaagctaacatgaaattcgtaataccaaaactacccttcacactctctctcttcctctccctctcttttctcatcatcttcctcttcgccttccccaccacattcctccgccgtcctctctcctcctcttcctccgtcacctccgttgccgacgaaggaatacggatccgtcaccatggatactcctcctacgaagcatacatcaaacaccagctcaacaaaactcagaacccgaagctacgtaaggtatggacaacgcgcgactgggacaggaaagttcgtgtgttctccactttcttccgacgtctcagcgatcgcggtcttctctcaaatcaatcaaaagctctctcgatcggtgctcgggttggacaagaggttgcggcgttgagattgatcggcgtggaagactccgtcggaatagatctggttccgcgaccacctctcgtggtgaaaggtgacttccacgcgcagccgttcgacgaagagacattcgatttcgaattctcaaacgtgttcgatcacgcgctttacccggagaagttcgttggggagatcgaacggactttaaagcccggaggggtgtgtgtgttacacgtgtcgatatctgggaagacggataagtactcggctaacgatttgcttagtgtgaaaccattggtgaaattgtttaagagatccaaggttgtggagatgaggaagatcgatgggtttgggcttgacactgagattgtttttagaaagaacatgaactaaaacacttcaagattcataaatgtagttttgttttaatttgtttcatttcattacatagattcgttgttaagttgatagcaaattgtttctttttttggactgtattttcattttctatcatttattatacacttgcaaatgtatacatcaaataaattatagttttattttttactgatataaatatgtaatacctttgtcttttccttattttcattggttaaatttgtcgaaaatatggaaaatcgaattaacatgatagtgatggtcaagttttaaggtgtgttgtgagggatttttgttttttttctgtgattattgaaaagttgacatggaaataaatgaatttcattcattctttcactcattctcaaatttgggttcgaaccacaaccaaatgtatattgcaaatgcggtttaaagctacttctggttcttgatgatgatactctcacaaatttgactattatagttcctagtagttgccatgtaactttgtcggtgtatctcacaaatagcacaaaagtagagttttaaaacttacgcaactctccttgtgctcaaatctgacattataatgacaaaacttttataaagatgtactcactagtcaaagtttcaaaccaactaaaccggttaaggtaagagacaacttgctgccttagctgtatccagaaaataatgtaaagactaaagactgagagcatcatttgcaagaggcaggggattttattaactctctcttggccctgggtatagccttctaagagaactacatcgacgcttctgctttctacctgaaattttattttccattagaaaaacgtatttggtaaatcactataaaagagttgctcattgtcttaacctgttgagagtcttccagatgcatgcaaagcctcttctgccatagccctccagtgttgagcgcaggagtaattaatgccaatccctacgctgagtcctcttaacagaactactgtgcgaagaacagagaagagttcctctggaaatgcctacccacaaccagcaaacacactcaaatttttgcagtatattcaaaacacacacaactgttgactgaatatgtgttttctttttttacctcaaccgaaatctttttgatcgaagagtcttctgagaaaggttgcagagttgtcgtaccaggaggcatctctgtgtcgaacattgtttttgctaactggagaagctcttgttgctcattcttacacttggctactgtagctataccaagttccctgaatttacaccacagaaacatctaagtaataatcatatgccacactaatccgataggtgactaaccaattttcagcttcaattagaaccataatcatgataacaaagttatttcacctaaagctctgtaacgccaatgacgcattgttatcagcgatggcaattaccaaatttgcataaccaagtctcaggtggtcagggagttctttcacttgaccatagtccagcagtgcaacctgatgacgggaaacaaagattacaactcaaaatatatagacggtactaaaacgtatcaaaagaccacagtaagtcaattaagaaactactaaagaataactacaaacaaaagatgacttgcctctgaacctttaccaatcaagatattcccaggatgtggatccgcatgaaagaaaccactcttcagtatcatttggccatatgcttgggacaaactgtgtagtatattgctagaaaacaaaatacattttccaatgcagcattagacaagatccaaatgctttaaaagccgccaatgccattggaaaaagtcaaaaacctatctgagataatggaggagcttacaattttgctgcctctgccattttaccatgaggatttatccctctttttgccatctcatcaccaaggctcaagatcgggattccgttcatgaattccataaccagaaccttcctgtgcgtattatgattattcctctgatcagcactcattagtgaatataaccgaaaattaaagaactttcgaatggaaagagactatgtcgaaaagacaggaaccataattcttgatcagtgaaacaggacaacctaaaaagccttaaaacattattgggataaccagaatgctaatataagaataagtacctggtcaccaaatttggaaacaccctgggaaccagaacaggactctttctattgttatcatatagaaaacgtcggatcttctccattgcattggcctcccttttaaagtcgaattcatacccaatctagtaaatgaaaacaaggactgatagtgacttggcggctataaagttcttaccagataccctcaaaatatagaaagaatgatatatacctgcttctctatttcctttgtcatggagaacaagtcaaatttgatatcagttttctgcatgtataatgcaaatatttgcaagtttctgatatcaaccatcatcaacttctcaacgccaggatgttggacctaaacatgtcgtagcacattcagaaaccaattaaaagtagactaggaagatttcagttttctcctcattattcctcacctttacaacaacatccctcttgtcaccctttactcttgctcggtgtacctagatagaagcaaaaagaaagtgaaatacagtatatattgagactttcttaaccaaactataatcttatctgattttataagcatgcacggtaatactgtacaaaggttctgaaactatgagtgatgaagaatgtagtacctgagcaatagaagcagagccaagaggcttctcatcaaatgtttcaaacacttgttcgatgcttttacctaactctttctccaggacaactcgaacggcatcaaatggtgtggcaggagcttgatcacacaaagtgacgagttttctcacccaagcagctggagccaagtcaggtttccctagaatttgtgcaatctattgaacaaaatgaaaaaaagtaaaaaaaaaaaaaaaaaactcatcataagcaactgtgaacaatcaaagagtaaaatgtacaacctttattctcatcaaagaaacaaaaaaaaaactcatactttttgttacaacaagatttaagatgagtaattcataacaatcccaaacgtggaagtcccctctggtaatcacaaacctcaacaacagtctcaacacaccattaccttaaggaagaaaccaccaaggtcagagcacatagaataaactttatgagcagcaagttcatgttgtctctcccacatctcctcgtgcttattaacatccttgacgaagttcatacgaagttgaaatacctaaaagcccagaacaagacacagattgaaagaaaattgcagaaaatcataagaaaaatgtattacaaaacgaaacatgaagaagaagaaaggagtacccatcaatcaaagagaaaccttgtatccggtgtagatatcagtggcacgagcccagaactgaaacgatcgttgccaaggccggaatccatcagagagcttctcctgaatctctttgaaatcgatcgcatgcattttcgaagttttgaggaagagtgataaggatgagaggataaagttaagaattgtttatgtatggcgtcagagtggagtttgctgctctctacgaatccattcgagagtgttaattactgtttcgttaaattgtaaaggaaacaaaatccgtttgtcttatgtcacactcactgtgagtcactggttataattaggcaggcaatagaagataaggtactaatctcctcaaatcttaaagtagtttacaatgatggtcttgttactaaccccagaccatatcaaaaaatttaggaaaaaaggaacttactaaacagtaagaaacaaattgtaaatcctataagtgtgatggtgaagaatctcacctaattcactaaacagacgtccgtggaagaagaatctgcaaaataccaagttaccaactactgtgtatgtatctctcacaagttcaaccaaggactgtcctttagatgtatctaatttgtgttcaattctaaccattcagattatgaagtgtactaatgcatttttcttggtatatctatatggtcaactaatacaccttgtgaaacaaaagctttattttgtaagaggtatggtggtcgttttctcttagatactagatagatgcgatgaaaacaacagattcaaaagccatatgcgaggaagaataaaatgaacattggagattaaacttgctctttgttcttgggaaattcaccactgacaaaccaactagagttgatgaaagaaactacagccattcatctcaaaatccaaagttcatatcgtttctcagaccttaagattctaccgttcggagtttccaagttgcaaagcttgacgaaagagtgaaacagaaacatgtagcatgctcacagatcgatcacacgagacagcttctggattcggtttagcaagaaatccccttgcttgattgttgcctggtaaagtgcattctttgcatcaggacggtttgtctccaaaacacctgcaaccttgtctatcttacagtgaagcttcccagcagcaatgaagcgcgacaactccctggataaaaaaaaaaatacatttcaagtcagatttaagtttgtattatcgtttttttgtatgcttctaaagagaggtggcaaacataaatatacaaaagagcgttcattattgtgcttactggtctatgaaatcgacagaaacgccaaaggcctttgccattgcttcaactgtcacacttttgtaagattccaaaaactgagagtacaccactgttctgacttccctcatgtagaaccggaaatgcgggtacaagtaacggtcatactttatctgcaccgccattccagctgagaacataagccgacaatgaagttagtaaacatacagacaaaagccaagcaacatgcattcggatgtatgacctctggtccttgtaatgaacttaccaaatgctgagaaaaacgccttgtactggcactcatacaaggagttcagaaactcagaaaggaatggaatcttcccaagcacggttaagatctcaggtgcatcaacgacctgtcaaattagtagcacttgataagaatttcaacaaattacatggatatacatcattttaataagtcgacatactaaaaagtttttatctaagtttagacaactctaagtggaagactgagccattgagaaataccttttgcttaagggaaactctgtccaaagttatgatgcttgtcaggacggtgtagaatatgaaggtctcatatggaaaaatttcatatgttgtgaaggttgatatagaatccaggaataagctggcagccttcttaaaatttctggtggacatgcagtacaaaccttcatagacctttagccggttcttcctctcccagtcaccaccctcttcaaacaatctggcaagggaaaacggaaagtgttaattcaaggatttcagttgcactatccatgaagagtagtcaaaatacagccaaattgacatttacttttttgctttgtcaatgctctttgataccagatcaaagtccatatagaaaaaagcaagttgtaacgtataaaacaccacgtccattttttgtccaacagcaacagttttcccttcagtgagttttagctgctccaaagctttctcctaggattacaaaacaaaaatttaatggccacgatccacggaagttaccataactatcaactttgatatgccacataccttatcactaatcctgatgaaatacagagccttagcaagatgagcttcacgaacttcactttcacccaaattttcttctgcatctgcaatcctgaaaaaagtgaaagaaaagaatatgtaagagaactttggctgataacatactggttcagaagtttctacaaagttaaagcggaggccaagatggactcagaaaccaatggttaggtaatggttatctccctaagaatactaagacatcatgctacatcagctaccacaggaacatggagattcccaaaattcatagtggacttttgcaaacacaattctgaatccaatttgagacccagaatgctacagtccccctacatcaatctaacccaaaatactaatacgagaattcgaatttcaaagcactgccaaataaaagtgagaaactgaaggaaacttacttctcgtcgagcttcttaagctcctcttcattagcggcccgcatagactctaacaagctttgatccaaatccagcaccgaagaggcaattagggtttcgtacaaaggagccatacctaaaataaataaaaacaccaacgaaacatcaggaacataaaatctcgaagaaatattaagctaattctcactgattagagaaaaggagctgcttaaccatgggatctgatgaaatccaaaacctcagacttgagctggactttctcgatgtctggaacatctggatgagtgaggaggaagagcttgttggctagaataaggtgaggctgctgagatccttccgctccaccgtccatcgcaaatcggaaagcttgaatcggatctgagagagagagagcaaatatataaaaagaggtttgcttgagcaaggaggaagagcttacaaagatttcaggtccgatggttttttttttttgtgtatgtaaaaaaaaaataagtttcgcattaccttaaacacccttatctttttttacatttaaatttggaatttttaccataagaaaaaaaagtaaaaaacatttacatttaaattctcgttataaataatttaaacttaagatcgttgaattcaagtaatggatatttatattttatatctctttccaatggaaatcataaaagaaagaggcactcattattaaatttctcaagtttttccaaagtgaagaaagatgatagaattatttcgaaagaagctgaagctatgacgacgcatcacaataagggatgtgttctaatgtcaggctctcaattccaagtaagacatgaatgaaaaccatttctagctaattttcttaagcatagctctaattttcattggaagcccgtaaagacgaataaacccggctgcatccgcttggttgtagatctcactcccttcaaacgaagatatgtcctgtctatacagactgttaggactctgacgccctgtaaccgacacagatcctttgtacagcttcagtgtcacagatcccgtggttgtctcggttatcttctccatgaaagcgtccatggactccctaagcggatcaaaccatcttcctgcgtagaccatctctgcatatttcagtgctaatgtgtcttttacctgaatactctctctgtctagagtgagggattctagttcctgtacagctgcaaagaggatagtgcctccaggagtttcatacacacctcgtgatttcatcccaaccagacggttctcaaccatgtcaatccgcccaatcccgtgctttcctcctattgtgtttagctcggccagaagtgtggctggactcagagccttcccgttcagcgccactggaagtccagattctatcccgatctcgatgtatctgtataagtgtgtaagtatcaaaagttaggatgcaaattgcaaaatcctactcttggtatctaaatttgatagcatagcagctaaaccagttaactcctttgagagactttaataacgagaactctctattctagatctgattcccaatcccaaaccataaacaaatcctgaacacaccaactcattctgcctaaacctcagctctgtagctaactgactcaactttagttttcaaactatcaacacagctataatccactacaaaccaccttggggtaattacagtgcatagttaaacacaagggctcaaagaaattccaacttactcaggctgatcaggagcatcttcaggatccacactcatcatgtacatatctttctttggctcgtttgctggatcttccaatagatcaccctttcaacaaaacacataagtttgatatcagagcatgagacacattattaggaactgagcaatgtgacaaactggatcaatttgtatccaaaagaaaaatgcgaaccaacacttgtcttttactttacctcatgactaaggtgccacaggtttctgtcccggctgtaaatggacttctttgtcactgggacgggaacattatgcttctttgcatactcaatagcatcttctcggccttggatttcccattctctccatggtgccacaactttaagttcagggtttaatgaaaagaaggtgagctcaaaccgaacctggtcaatcaatcagtacaaaaaagtaatgtaagaatcaatgcgtgttttccaatgtgacgcattagcaagacattccaagtacttgcctggtcatttccttttccagtacacccatgtgcaacggcatcagctccaacctctgctgctacatcaaccatggcctaatcatttagaaaatgtattagtgacaatatgtaatccaaaagatatatccagatattagaaatagtgggggtagtcctcacaagtcaatcatataaaaccattcgaaatgttaccttagcaatgacaggtcgagccatggaggtaccaagcaagtattttcgttcatagatggcaccagctctaagacaagggaagatgaaatctttcacaaactcctctgtgagatccttaacgaccaactgagaagcaccactagccttagccttttgttctaaaccctctaactcttttatgcccttcacatcaaagtatttagaggttgagaagacataagcagattgcaacaacataaaacttcatttcttaactaaaacagttgacatgtggcatttttgtgatgtacctgaccaacatcagcagtgaagcacacaacttcacaaccatagttctccctagaaaacaaatagttacatataaggaaggtcagactagttgtttcataaccagaggaagattcaaaacgtattcttgttagaggtcagaaataaactcaagaaaaaggaaaacatacttaagccatggcacaatgacagaggtgtctaagcctccactgtaagctagaacgacctttttcagttttccacgaagtccagcctcctttgaatcagtagtcaaggcggttccatcaccggatagaacagctcgaatagctgtgcaatattcaagacagcaaattgtttaaaacgtactaatggaaaatttcatcaagaggggataaagaatatatgttaaaggaaatggattgattcagtgtaatgctaactttaccttgattcttgcagctgcgggatccggtaacatgaccggtaacaacggcattgccaacaagctggcttcgtttcagagataactgcaaattcagtaaaaagcaaatacagaatttagttgtatcatcgaagaaacaacaagtatgagcatcgatttcaaatggatgtacctcttggaactgggaagtagtttttggaacagctacattctgacattttaagctacctgcgaaattatatcagatattaataacttgaagtcccatttgcaattcgcggagataaaaatagacatcagaaacgaaaactgtcggggaaatggagaattttgtattcaagctagagctattggtaataatataaaaacaaggaaacgaaatggaggagacaagaaatggggggatagagagagagagagaaccattgtgggagctacggatgacgagagcagaggaagaagaagaaggaaacgaagtcgccgagatttcagccattttcgactattgtctgcgaatttgtttctttgtctgcggtttggttttgtgttcgttcgacaatggggtttgtggctcttttaagaatgccaacagtgtccacgtcctctagggtttcgacactcttttttttttttctctattacgacggcgatatcgtttttttgttatttctcattgatttttctttcttcaaatatgaaaaacgtttccatatttaaacccaacaaactaagagcagatttcgacagattatacaccgttaaacaatgtatatctctctcaattccccaatgatttagaattcgaaaccggttaaatgtcggtttggtatgtttagacaattgatagtttctttggttcagttatatacgagaaaacaaaagaaattaagagttaaaagtttcattccctttggtgcgtgttatatactgaagatgaaatagtcctacataaaagattaaatggccaaagctggcactaaactcagacctcacataatgcaacttcggcggaaaaaaaaaaacactctctcttcaacaaaactctcttcctcttatcttcactgttaaagcaaacaaacacaagctatagaaaagaagaagcagcgatttcttattatcagatatatgataccacaatgatgtatgtatggaagcgagcgtcctcaaacactaattgagttttgcctatccgcaggtgcaacgcattgccagaaggaacagtactccggaatatccgccggtttcagccccaaagcagaaacgtttcggccatactcctggtaagatattatccgattatgttacttgcttgtaaacaaaaatttgcagagaaaatttataaatcacacaatgaatcatcatgaagaaggtcttacctgaatatcaaggaacaactgcatacacatcttgtctgtttcagatacattttgatcagaaacacctgatgctgcacctcctcgtctctgtgcattttgacgcaatttctgaagcgatgactgtgtttttcttgcctgtaacataatacaatcaatatatctagattctctaccgcctttcactacacataaattactcaccatctctgcatctttatagtaaaaaaaaaataaaaaaaattgaaaacgatctttagggatagaaagaatgattctggtttttgttttggctactggggttatattgtcaattcaaatcctcaaaaagtgtttataacagagtacttaccacgctaacaacatcagcagctaattcataataccgcctggtaatttcactgacactgccatgcagtaactcctcctttgttttttgggtcaagtagtttctagccttatctccctccaaaaaagcctgttataaaagagaaggagcaataatccacacttcagaatccatcggtcaagcaactataaaatatttttaaaatcgcaaccaaaagctgaattaatacctttacaggacgcaatagcccaacgacatatggtgagtgcctaacaggcagtggcttattagtcatcctaaatgtagcggttatccccctgagctgccttaggtcctataggagataaagcatttaccgttacagagttaaatatgtgtcagacttggagaataactctaacctaattcagctatacagcaaattctaagaaacattgtttctgcaggtgctcaccaaggcagtcaagcaaatcttgaagtttacaaattaaagaacggatctaatgctttttcaaaggtttacctcaacagatttatcaacaatgacgtcaattattgtcttggtaagtaaaggtaggactttctctaatgataccccaccctgttctatgctgatcctcaccacatcaagaacttcagtggagcttgaagataaatactgtgatatatgtccaaggtaatcgccgcaaacttctgagactagacaatttacatcatgtataacctgccaggaaggaaacatgtaaataatcccaaaaaatcaaacgatcaaccatatggtctatgtgatctgatttcatgtatttatagcagatcttccgagtttacttaatttccacagcattttttacttgctattctaatcataatggagattaagctatcccacagaacataactgcagctgatttagtaaacacgaaattgcagaaatcccaaaatgtccaaaataagaggatctcagaaacaagtaacttacatatacaaagtcttctgcagttgctgaaacagcccattcacatccaggactcgggctggcattactctttctattattcaacgcagatgacacccaaaagctatatctacatgccattaacacataatcaaaattagaattgaaactagtaaacgtggataatattacagtcaaattttacaaacctcgaaagaagctgcaaggtcaagcgaagaaatttatcagcagccgagaaaacaagaacatcttctttccagcacgatcgtaagcactccaaaagagtatcactctgtctgagaattaagttgagcgaactctctttatctgaatcctgaatgaaaaccagagaaggagaagtaagagcagaatccaaggctccagctatctcctgaaacctgaaattatgtatttttgagttagagaagctgagaaaccactaatctaatggtaagccgacagtcccgaccaaaaaaaaaattggcaagtcgacagtcatctatgatattactcacgtacctcagtgaaaaatatactcccacattccattgcttcatgaattcgacgcatatagcttcagctcgaaacttagttacagcagatcttgacggacaataaccttcataagaagtatatggtatgagccaaatgaaaaatatccagatcatttcatcacctagtactaaattaaaatttatgcttacgtacgacacatgaaaatcagttcacaatgcatctaataagccatgtgatcaagctcagaggaagatatacatctaccttcaagatatgccaggaaatccaagcttgccttgtaattctttaagaactcagtaggccttccaggagaaaacgctcctggtttgactttctggattgcccaaagaacttctttcaggattgaatttgccaagaagtcgaagacatgtaaacccgatttgtctgttttagcacaagataacaagcacagagtacgatgagtaaaatataagccatgaaatctaggttactgtgttagttggagaattttttcttagaatgtttcaggaaaacgaattttccagagaaacatggaacttaaaaaaggcgattggatatctgcaacatatatgatcagacagcgatttgcatgaattaccagttgaagatatttctagcagcattttacagtccttagcaataaaatgcttgatctgcttgtaatcgttttcaagttcatcttccgatgttccagcagcattcgttgttgtttcatgtgtaataattttctgaataaatggagctacaatcgttgtacggaaaatttcttctgcagcgttggtgttatcaatggcagcatatgcacgtaagcagttgtaaaggacacttgtatcgctgttgtttagcccatcaatgaagcaatgacctaggctagcatccaataacacactagcgctctgaatcctcttctccatgttctcaatgaaaggcaggttctgtactggcaatggcataacataaaaagtagtgagcatcagtcataagaccttctattgtcttctgaggctaacaagtatactgtagtttttggaaaacaccagagatttcacaagatttaactatgtagcatctgatgtaacctatttttttgtcagcaatcttctcaaaggcaataaattctcctagcagcacagcaatatctcaaaccctataccatagctagttttgatccccaatttactacttttaagcaatatactcaaagcttcttgtacgaggaaagagaggagcatttctaatgtaatctatattttgagatggacaaggaattgtgactttgcaaaaagaaaaaaagaagaagtaaatgcatgatggagacctgtgcatgagccatatagaacttgagccgattcatttcactagctattctttccaatagcatgctctgggtttctctcatggttgtgccatcttgctgcgttgaattctcatcattcatagaactccttcccatggaatttgcatcctcgttttgccaatcagaaggagtacttggtagaactttaataagtttttcaacctacatttacaatgattttacgtcaagcattctgagtatctaacaaaaaaatgaaaacagcaatgagaaacatttttgctcattttaaacggaactacaatgcaaaaccattaaggttcacagatagatcaaacttgcattgaggatattaaagaagttatcctgcttcaagcgtacactaagaagatcgacaagcttactcaaatcccgtgatctagatctatatcaatcaaagcaaataatcactggaatatgtcgccaacgaaattagaagcagacgcaagattacacttgcaaagtggaaaattaagattgagaaaccagaatcatgtaccttggataccacatgaaatgtgtcgagcaataattcgagaacctccctggcagcagcagcatcagaacgctgctgcaatccattccttagtgcaaaaagtgctgcctccacagatccacgaaatccagtgatcttctcacggagctcaaggagcggagcacgcatacgaaccacagctgcatcgatatctacgagcttagtgcttaaattgacgaaatcggcataatctcgattgatgagatcgacaagttctcggttgagggatgcaaggtgtgaccggagctcagatcggagagtgtcaaagggaacaaatgtacggagctctgagatgtaggactcggagtcgaagttaggggagaggaagagggaaggcttgaaccatagaggatgagagtcgtaaggatcggagaagaagtctgtggcggatctcggcgctgacgacggcgacggcgacgtcgcgaccagatctgacatttttcgcttcgctgcttcctctgcgtgggaaatgcttcacttatacaactgtgtggactgcttgccgaatccgagttagagagatgaactgcgtgacggcaaaagtgtccagtgcctgatcaatcttaccaaaccggaggattaaataaattggtttggtcgaccctgggtaaaagtcaaaattggttaatatacgatgcattgtttatttgaaaagtcagataaaatgcccaaaaagttatgtgctattgtggaaaaccccttaaataatccagctaagcacggtgttaagtaacaagcttaaccgtaatcaaaagtcaaggtggaggagagatcttgcaatctttggttcggcaagattagactgcaaatattttctaccaaccaactaaaccggatcatgcaaagataggtcgatagatggaaaaagttgcagagtaaacattttgtattaactgttgtaaggttcaatttcaaacaagtatcaaaattacgcagctatatgatacaaaacgtctaattcaacctatttcacttattgttttattctattcacctgaaaaaattatatacaacgcattctgcttgcaaccaggagctctttttaagaccaaatttcagttacggtttctaaaatatattcaatcctactcctacgtgtagaagctgaatgattgctgctttccggatccaccttccccgtggagtttgttccattgttgaagcgctgtcatagtcgcagactctgatgagacgctcgcagacacctgattcaacaccaatgacaatggttacagtttactaagcccaaaacgatatgaaaaaagaaaaaaagaaaagaaaaacagcataagcgaatcttacccacttatgtgcgtctctgaaatcctccacgtttaaagctcggagatcagaacttccacttagaggtggaggaactttgccttgagccagagcagcatctcgctcctaccatataatatcccatcataaacatttgttctatagacaagtttacgcaacgtaaagttttcttggctctgtacaaagaaaatttactcttttttccttctccaatatctccttgattggacggtgggcagcagtaacacatagattctgagagcaccaaaagagaaaataatatgagcattaattactttgcctttctctatcacttttggcagaccacaacaaaggtttaaggaattactaggaatttaccttaagatcacttccagaatatccattagtcatactagcaatctcaccaatatccaaatcaggggacaagtcttcttttgcaagtataacctttaatataaatgctctatttgaagtatctggtagtcccaccatcaacctgcagaagtcaataccacaaaattttcacaacctataactgtcatgtcaatttaacaaaaaaagcttagtccaaggaagcgatttataatttacctacggggcaaccgtctaataacagcctcatcaaggtcaaaaggccgatttgtggctgcaaggaccagaacacgttccctttcctgagtcgtaagaccgtcccaatgcatcatgaactcatttttaatcttccgcgaggcttcatgttcacgtgggtgttctcttcggcctagcatgctgtccacctacaaaacagtaataacattgtaagactgtcagtgctctgattacaagcaaattcgcaaggaattaaccagaaaaattacctcgtccacaaagataacgctaggggacattttactggccaaagaaaagacagctttgacatacttctcaccctcaccaaaccactgcagtattaagaagaacacaagtttgaaaaaaagatcccgtgtgtaaatcggtagaacttttcatagagtattcagttaccttagatgtgatgcttgacattgagatgttgatgaagttcgcatcagcttcctttgccactgcttttgcaagcatggtctttccagttccaggaggtccaaataaaagaattcctttacaaggctgcataaagacgaacaagagcggactgattaagaagccaccaatgcataacgttaactaccaaattttaggagagaagaattattgaggaaagccaaattagcagctagtctcgcaaataaaaggtatttccttcatacatctgtgataaatccgaggcaggacctcaaaaaattatgggagttttctgaaacataatgcagagaagagaaccacctttgttaattcccccttgcagaaaagttcaggccgttgtaaaggaagcataaccagttcctttaagatatctttgactttctcaagtgccccaatgtcatcaaatgtaacatcaatgtcactgggcagaattacatcacttagaagcctcttctcaaacacattttctaccacaatgtcctgaaagccacagagaaaattaacagttcttacataataggagccattgccataatgaaaataagtaaacaacaattcaattccaaaggaagttaataaagttaataaaggaaatttgctaaccttctttgagctcgtagaaccttttagatcattctgtaagagtcctattccaaattctatgctgcaaggatccaaagttcgcactcaatacaccgagacagatatttaagagcagtaatgcacagggacaagctgccaattacctctctcgagacaaagtaaccttagctggatcagtatcaggatttttgcttatatggttaccaaaagcccatccaatgatcttttctacacctaaagcagaaaggcaaagtcaactctttagaaaagcattccattgtcattagaccgaacaaagggaaaacatactgtctctttgaagtgtgagatccttcaggcacatcctagaccacgtcgtctcaagtccttcacatcctagaccacgtcgtcgcaacacctgaattgagatgcaattacggaatcgttcttaaaacttctgtaaatcccctgttttaaaacagataatcttgtacaccagagaaaacgtaacatattctagaaggtcggctatcaataatttattttcatgagacttggagtcaagcaatgaagttttgaaaaatagagataagatagagttatagagttataggcttcaatgaatacagccaaaaatcatacaatatattcagatgaaagacataccatgcgcaagtgattgaagttagacttcactttcgaagtctcagcatcacgatccatttgatgcttccacaatgtaagacgtttctcatcctgggaataattagctccatcaagtataaggtttctttgacagacaacagacgagaatgcttatgtctagtagaacagagtaacagacctgtggcatctgaatagtaattttattctcaaagagctccgctagaagttctgttgcatgtgggacttccttcccttgcttcttttgtcttccaatatcctaggaatatagagcgaaagtaacattagtcaatattaaaagaaaagggatcaagtacgtttcagaactgaaagccggctagaaaacagctactcaatattaaaagtctacttcaacatatgaaatacagaaaatgctgacaaggaaattgtggcaattattttaatgcatgtgatatacataaagaaaaaaggaaacacacttctttgccctaggaaaattttctattccaagagagaataaataacttttgcaaaatgagctcaaagcatagaaatagcatgcaactggagcaaaacatagtacagtaactaccttcaccttgagatgatctgagtgtgtctgtgaacagatcacaattacgttttctgggagatattcaagtctgatttggaacgcagagtacaaatcgaagtttccagcaacagatttctcagcatctttcaaaaatagaataaacggacaagttctgctctcagaatggacaacctggaaacagaaaaaaaatataagcacaaggaaaaacaaaattcattactttgcaactgaaaagtacctcaaacaatgtgttaacaagtaatctaactagatccttaaaactcgagcttttgaacggaagatcagtagctataagaaaacagaagaaacattgtgtgagacaagagctgctgcggaccagtaaataatgcactactgaacatgaagtacctttgcagaagaacccatgtccgctttcacatagttcaccaagatcaactccatcaggtattggcttatcaaatctaacacccactttagctgaaggattctcatcaaacactaaaattactttccctgtagtcccattaggaggtcccctgaataagattaagtaaaaagtggatcattaagttaaagagtgaataaggcaagagaaaatgttaagaagataagttcgtaagtctgacaaaaaatataagatagggaacagattttcaaaagatatgtactttttggatgtaaagtaattcatcaataaatctttgctttttataataaaagaagagactttcttcaccagagcaaacaaatattcatattcatattatatagaaaccaatatcagtactatgataagaagcaaaccttaagcctaaggtagatggccccgaatacaacccagtactgaagaattttactctgtcacctgcaagtgtttttttcttccaaatgaagtatccgcaaaccagaaatccaagaagattgaagtagaatcttctgttgcaaacaatgtaatgggggcatgcctttcttcaaagtatgattcactgaacgaggtaaagtctccggctccaactgtagctgtgagtctgaatcagaagaagcagcaggagaaaggctagaagcaactcctccaccggctgacaaatccgagcttttcccttgatcaatgagctcaatactctgattgggaagcttacatgacttattagaagcaagtccatccctcagtgactcaacttccttagcagtcagagcctgcaggaaattgcagaacggatgcaccaggaattacttacagtaatctcatacccgtaatcaggaaaatagacaaataagtgtagatgcaaaaactttcctcttgtaaactaacaagcatataaaaaaaaaacagcttatatttaagtaacacatacaatatcttacccccaaaattggatagctgtcaaatattagcaatttcgcctcgaggtcacgggcaagtgctttagctaacgtctcttggtatatttcagaccctgaaacaactccaaccaaaaagcgaaaatgatgtttccggctaaagaagtacaggaaccacacaagcaagataccacaaacctgcgggaccagaaagcaatatccttggattcataggggtcatgtcggagacaaattggacatattcttttttcttcagatgtatatatgaagcatataataaggcagcctttgtatattcactgcaaaaataaagccttagtcagcatacacaaaacagagaacaaatgcaaagcgcctaaactaccaaagacaagaaagcagaattagacctcaaaattctatgatgatataaacagattcttaatggaagattcacatgcacatatcttaacactgcatgaatacctgaaaaaatatatctgacttggtcccatacctcaaataatagggaaaatttttgaatgaaacttccatgttttcgcctctaacaaaaccagcttgaatggcttctctgaatattgcagattgcagaccattgcctgatgttgaagcttgttgtgaattacttgtcacctcgtttttctcatccaatatctgataccagctttgttaatataatgcaaaatgctgttgatgacgccagggtacaagagaaacatagagtatttacctccattttggaatcttggttgttaacagaaaaaattccttccatgccgtcaacttggaccatcgactctggcgcttggtggctcttactggatgcatggatcaatctttcaagcgatgatataattgaatgacctgtcattctctctaggtctagaaactttcctgcaggaacctgaactgaaccaggttttgctgcaactataggcatttgctgatatacctggatagaaattaagggggaaacttatgtatattcctatggagatattcatctcaaaactgaaggaaaatttcttcttgcatataataaaaaaagtggaatcacatgaggatacgaaagcaatcctgcttaaaccaataaccacttcgtcaccagagtttagcacatggttgatattcccctcggcataatttccgtttatccacatatgtccattgtttcccatggtctctagaaccgctaaaacattgcctttgcgctgaacatgtgcacaaacaatgagaatacatactgaataaggagttcacatatctccacaaacaactcaaaagtagaaaaaatcatacgcacaggaattgcataggccagtttaaaatccagcagtgctaatgtttgagcgtaacattcaaggaaacaaaaatacctgaattcttgtgatcttgaacgagtatgaactgagttctccgtctaagaatttgaagactgatagaaaaatgtttatgcttggatactgaaaattcataagtagctcaattttgtcaggatattgcatccacaaaagcattagaaaaataaagacaggaagatccaatagatgcttaattcacctgtgcagactgtgatagcaatcgacaccacgggttctcaaacctactgtgtacatatgtccatctttcaaaacttgccttctcttgcaaaatcgctgttgagtatacaatccaaaccagaaaacaaagacgaattgaaaaaacaatctcaaaaggaatttaaattgggtccaagagcataaagatcgaacaagaataagagcaacggaccttgcgcaacaggtggtggttgcgacgtcgtagcagccgccgcagaggcatcaatctgggagtctccagaggttggagtagtgtcgcctaacacgcatttactagaatccgaaggaggtagtgtatcgccgccatcttccaactgaaacgaaaagtgaaatcgccaaaattgttcaaaccagaagctccagatggcactcgaaagatggataagaaataatgtctccgatcagaaaccttttggcgtttggatggagatttatctgcgggagaagatggagatctcttgccgctgcttccgtcgggcgggttattgttctcgccggaggtagaatcactccgtcccggtgacaccatgactcttctttcttccgattatttcaagagcaagatttgcgattctttgagagttgaagaatcaatgcgagagatgaattttgagagaacgtaacaagaaatgagagagcttatgtaaattggtgtatatataggcctttctcggtgggaaaaaattatagagaaactttgattaatgaaccatacctaaaccaaaccgtttagtattattaggaatcgaattttgtacttaacaaccaaaaccaaaccgatccggttcagttttacccacacctggttttaattttgaaccgcacaaccatccaaattccaaagctagagtctctcagagcgtttttaggtcgaaccagtccttaagggtccgaccaatagaacgtagttgctcgaactcttcttccaaaaatggcgcctcatgaaattcgccgtcctttcaagcgacgacctatctccgatcaacagaaacgccgagagctttctcttattcgtcagactcagcatcgcagtgatgctcagcagcgagcccgaaacctcgcctcttccttaatctcgctccaatcctcctctcccgatgtcgacccagagatactatctgaagccgtgcctgagcttgtaggaaccgaatcggaatcgagtagctttgacgttcgtcaagcttcgaggctcagaggacctgaggcacgcaagtggttcgcaaagcagctaatgttacctgaatggatgatcgacgtccctgataatttaagccaagattggtactgcttctttctcattcttaatccgttgttgctgcttctcttccttcataaatggctgattatgagaattggttggttttttaggtatgtgttagcaagaccagctgggaaaagatgttttgtagtttcatctgatggaacaactgttagtagagtacgaaatgggtccactttgcatcttttcccttctgcattacctggtggtgcgaggaaaaaaggcgcttctggccctgcaaactcgtactctatactagactgtatctttcacgaggtaaaagattcttcattttcactgatttatcgggtttaccctcagttttgatcttactaagaggtgatttgttactgtttttttatgcagtcggatcaaacatactatgtgattgatatggtttgttggagaggttactcgctttatgaatgcacatcagagttcaggttcttttggttgcaatcgaaacttgctgagaccggtgcttgtgatccgccttccgtctaccacaagttcaggttcagtgtagttcctttttacaactgcgaccaaagcggacttcactcagcttatacaggatcattaccttatgtcagggatggattgttattttataacaagtaagtgcatcatttcatctcgcctacttgtaaggtgcctttaagtttactgtgattcccatctttccttctcctgctgtctgcacttgcaaaaagtttgggtgccttaaggtttggagtagcgaatcagttgttttctagtgcaggattattgcaactagcctaggagttatgtagttagttgtagttttgccatctcagcaaaggaccttaagtcgttagtttagagctgaatggtttgaagggatattagggaatgcatttggttatgatggtatagggttttagtttgggcagtagggtcgataaccggggaacctttcgttaaaaaagttcttcagacttaacaatttcgtatcaaaaccattggttatgatgaatgatgattatattagaacgaggacagatcttgtattctctgttttatgaatgttactttataatatcactggttgcttcatactcagtggtagtatcatgatatcaatatctcattggtctagtatttttctttgactctttcccactaaagttcatgtaattattgcagacatgcacattatcatactggaaatactcctctggtgttgatatggaaggatgagagctgtagtcagtatgtcatcgatactgataacaatggagaagttccaaaccaacaacatgtaagtggattttgacagacttttacagctcatggtttttcatacaaagtgtttagtattacactcccatttacaaagtcttaacatatattctctctgtatcttgtaaaaacagattgtcttggagttgcaagaagaaggaaaacttgtaacatctgatgatccacctgtaccattcagttgcttaaatgcagattttgtaaaacaggtctgttcagaatataatggagtggtttatatatcctgatcagcctttaaaccaagattatatgatcagcatttggaaaaattgaaaattgaagaacatatctatatttcttatgatgaatgatgattatattagaaagtggacagatcttgtatcctctgttttatgaatgttactgtataatatcactggttgcttcatactcagtggtagtatctatactgtgtctatgtttgttatagactctatgtactcgtaagttagtgatattgcttagtaatagcttctttgagttctttctaggaccaacagagccctctagcttagtactgctctgtttgttatagactccatgtacccataataacagattgtaaagatgatttcgcactgtgttaatttgctaaatgtgtggttcgtgccatgttggatattacagtcagggctgtcttcaggaagtcttattcgctttgccattggcgatggagggctgaaatgtgtggatggtagatttgagaaggcggatttgcaatatatcggtgtatcaaatcgagcccgagcctttgctgatagctattccaaggtcggtactctctctccttgcatatggcatacgaattttgggagaatcatgcttatgaaattgactcaagcatttacaatccatcttgcagatcatgtttcaatatatggcccgacattctcccctgaaagtagaagatcttgcttctacgatttcacctgaggaccaacaggacaagccccctgaagtggagatgtccgattgacgagaagagagtctaaagtatattgtttggtcactgtgttgtgttcgtggaaacagagggaagtaaattttgaaaaacgtagccacgtttttttggcttctcatatgatgtaagatagtttgttctatgaaaatgagaaaaaataaatcgttacttaaattgtctatagagtaaatccctgcaaattgaagaaatcaacaaatcttgaccaatagaattgcgtaaaaccctgttaaaaaacagttccaagaagctaattgttttgaaggaaaacaatgtaatacaaaaaaatcatccagctgatgtggtgggctcgcagctatcgtgagtgcaagccaaaacatctctgtaatctctagagatgttgaaggagtcatacacttggccagtgctgctcttcttgtactcaaagagcagtgatgagtgatcggaagcagtcaacttcacaaacccaaagtcgtagtctctgaccaaactccatttgggtacaagtgagctaaagggagacaagtgacttcctgcaccaccaacaacaacatggatggttcctttaaaggtccctgagtagtgatccttatcattgttcacacattggctctgcaatagaagaaaaaaagggtaagaaaagagctacatccatgagacgaaaaccgagcaatttaggatgggatcaaacctcgtaaatggggcaggttcgctcatagttatggacatggccgtagaaagcaaggtctactttgtacttctgccacagtttttgtaggctttctcttcccataggctcttcaaaggttccttctttgccataccaatcattggtggaataaccaaggacacgatgagctataaaaatgagccaaggctgagtctttctatcaacagtggcaagacaattctcaatgaatttgtattgctccgtgccttctctccaatcgtgttcactgtctgctacacagaagcgaaacattccataatctgttttgtacctgcccattcaaccgaaatttgtaagataccgttctgaaacttgcaagaaaatgtcaatggtttaactaactttaccagaatttagctctgttctcagcaggaaagtagaacatggtctctgcaggaacaccacactctcctccggagtctgtaccggcataaaaagatccagtgtctggccaatcacgctcatggttgccactgcagtgaagaaaaggataacttaaagcactgcaagagtagagagtagaagcacaatgttgtagattttcttgttgactaacctggcgatcatgtagggtacagtagaagcaatgggctggacttgagctgtgaactgatcccactgggagagatacccattggaataagtgagatctccaatgtggaaaacaatgtcaatgtccttcaagtccttgatgacttggtctgttgtgttgagggaaccaggctggtaatcattgtactcattcgagccatctcgctcaccctgaaacatatttcaatcaaggaaaatcattttagatattagtctgagagcgcatggagatcataatggcctaaaagagacgataccatacctttcccatgtcaccaaatattatgacccgttgtttcgagtcttgtccaggataaggagaggacacaaaggtgtaattcttgctccaaattgtggaaccattgaccaagtcatggcctagcctgtatatgtatctgtaaaccaaaggattgagagttacatgtatgaaactatattagtgctcctggattagacgataaagaagcaaactaaagatttcatactcgcggtttggccaaagttctttcaagaaagaagtatggaagaaaccaggatcacgccaaccaacgccgcgagcaggattacctgtgtaaacatagcatgcatccacaaatcaaatctctagaatgatccagatgagtagtttcagatattccaggactgctggctcagagatcacagcgaaacaggacataccacacatgctgtttctgttaaaggtcaatgttccagctggtgatcttctagctggaagtccctttgcactccattcaatgaaaggaacagcctcatctatgttgtacccactagtccatgtcacggtcatctatcaaagatagaaaaataagcaagttttagctaaagatcccaaatattgtatagctgcttcagaagtctcaaggccattgagtggaaaaacttacttcgtcccaattcttccctaatgcaagacgcggatagacaggtgctttaggattgaagaaagctacaggattcgaaaccccgagaaggtgtggctgtgatattcaaaagatcaataattaagtccacttgatatacaaaatactaaactgagaaaaactatagttataacctacctcttgaactccattggaaaacagtgcaaaggagacatcagctctctgatttataatctggaacttgagagtcacattcccggacttcatgtaatctggatgagaattacaatacatgtactgccaaatagaaattaaaaggggaatgttacaccgggacttaaaaaaaaaaaaaaaatcactggtaaatatgtaataaaccaaaccttgatgggagaagagcatatgtaaggagttttctctttgccaccacttgttggccaacagttacccgaactaacaaacaacaaagacaagttaataatgcacaaatggcacgttcacaagttaacaaacacagatgcagattagaaaaaatactcgaattttgctggagagaaaactcctatccaatcatctgaagtgggcttggggttggagatagcaagatttacccattctgtatcttcaccctgtaagatcaaagtcatgacatcaataacatatctatttaagtttggtttttgtgataattacgtgaaatcaagaaaacatattcaagtctatcatacaatttttttgacatttaaaaaaaccatctcttaagagttaatatatatctgtcaaacaagaatctgacaagaacaataatatgatgaaagaatttgttattggaacctgggaaccaagaacttgaggcgaagcgtgaagtttgacagaactatctaaagcaagacttgtttcgtaaacattaatttgagcaagtgcttgatctccacgaccattggcatgatccaaacataagctcgagctgaacagtgcgagtaaacacagaagcacacctaaaactctagccatatttttttttgtttttcctttgttgtgactgagaaacaaaaccagaaaggtatatatatatatattataatcaggatatatctaggaatcccaaaattgattcatgtctatcgaattaaacaaaatcaaatattttctttcaccgtcaaatctttagtcaggaatattctaacagtttctttttaatattctaacagttttttcttaatgatagttcatactgttttaaaaacaaataatgataacggaaaaaacggattttcgttttattcagacttatgtacattaggctgatccgggtcggaccggctttgaaccggaaattaataaagcttgattgttaaatttggcaaccgtggcttcggtttcaatcgcgctgtaatcgcatcactaattcgggtcactttggaaagaaagaagaagaagatgaagaaaccatcgaaaaagagcgaaatcgagttctgcacggtgtgccggtttcatcacgaccaaggctcgcgccacaagtacttccctcgccacaaaagttccctctcttccttactcgatcgattcagatcgaagatagctgacgtcagattcttcctgaagaaccctagcgttctacggccacaagagcagtcgcaaaaccgtgtttggtgtgtcttctgcgatgaggacattgttgagctcggtagctccttcgcctggtatgccattccgttttctctttcctctcgatttgtgactgtttgtttgatttgggttcattgttgtgcgaacattagtagctgtgttactttatttgaatgtagaatcagagtgcgcaagagttgattgaaactgtgctagaaaactgggattgtatctaaactgatgcgtcttctgatgataattgatttatttgactgcacataatactttgtttggaaactttgtatcagttctaaggctatcaatcacttcgcaagttccgatcatcttaagaatatcaagcaatttctgtcgaaaaatggcccggcaatggattgcatagacgagttccgaatttcagaagctgatgtagctaaggtatgcactatttacttgaatattatgctcttctgtttttacagatctcaattgcaacctttgcggtttaagagtgtagccatgttattcgttgaaatctctaatgaaattctattcatgctggatgcagtgggagaaaaaatgtcagtcatttggaaatgaagatgcatcttttgaagggtcctgtggacagctgtctgggacatctaatgatatccacactaaacttgcgtttgaaactatggatagaattaaaaaagttcctgcacaccatataaattcatataaatcaaatgatgttatgcctttacagtataatacgaatgagtatcagatatcactttcagagattcctggagttatacataatggttcatatctgaacatggatgattcccaattccctctatgtgatgaatcaggtatttttggttgattccgacctccacaatttgtcagtttccaagtgtttacaagttgtgtataatagtctctaactctctataattatattttctagggaacgggtttggcgaacattccattccttgtagaagcaaggactactcgggcaacggtaattattgcacccaagaggtgggtttcagtcatagtaacattgatattctgataatctggttatggtgcatctatatgacgcttcctgttagtttcatcatgaggattctttggctcagaattttggttataggctagtttttctaaagtttatggtcttaagtattccttggttcaggaatttcttatgtgttatatgcgtaatttgcacatcaaaaaaattcttctatatatgagaggttttttaggcagaatgaattttattaaagtttggggtaagaaatacttttgtgtgttgtttttatcatcaaagttccttcactgtttggctatctttttccatgtgttcaactacatcatacctccagagctatctcattggctaagtccaaacttttataaaagagcctgtgactgacattgtcttcatctagaattatcaggtgagccaagataagaaacaaattgatggctcttacaatcctccaggtaggcctctgctttcaaatttgatctgcgttgtgttaatttcatgattagggctttatcgtctaggtctatgaatttcattaacgtagccaatcttatatgcactacttttaatggcatgggttttatttttttcaggtgtggtgggaatgactagcatttcgtcctcacattccactgatgctggcgggaacgttcactctggagctcctccaccttggcttgatgcaaatgatggggatttttctagtgttcaactaaaccaatcagatgtggcccgctttcaggcaaaggtacctggaaagaatcgtaagctgaatcctaatagggttggcgctgcatgggctgaaaggagaaagatagagatagaaatggagaagagtggacatgtaacgaagagtaacattgatccagactggcttcccaactttggtcgggtttggcaatcaggcactagaaaagaatccaggaaagaatttgagaaggaaaaacggaagttagtgaaaactgaaagcatctctacagaatcagaaccagtcaaaatacaaccgtacattagcaaacgggcggtaagtttttacctttgctcatgttgaattataaatgactactggtctcatgtcatttgatattttttctacttctcaaacgtatttgtttggattgatattccttttagcgacatatcatgtggtttccttttatactcaacataaaaggatacatattgctttgttgctactgttttaaatttagttcgagaaatacttttcagtggtcttatgtatatacattaattgtgattgcagcgaagagagagtggtgagtaatggcggtggctgacatccaaaatggcaactagtaaggattatctcatgtaggaattttataatcctcgtttcctggagatcctactccaatgtatcttgttttcatgttgagctatgatagaatttagaagtatgtgatcctgggactcctttcaagtagtgtaaaaaatggataaaattttgtttttggtacgagagattttaaagggttaaagttttacgtagcttatgcagtaataaaatatagcatggagaaggcctttctccactatctgatcttcctttgggttcttcatcttaagaaagatctaaatcttttcatctgatgtttctttttctgggggagataaagtgaaataactttgttgtgtggttcatagattgtggccatctcaacaaactgtatctattttctagttggatacacatatttagaatgacatttgtacactaaattactttaattcgaatatttccctacggtggtatgagattaagacacagtagtgtgtagaactaagggagtaacattgttgctcttgattaaatgtacaaaatttagctattatctgatgatgactgtttctggtgagcaaaacctggatgcatttgattgacgcttgatcctaaacttccagaaggttcctttagctgaaaccagattctcctggcacaagaactcccaggagagccacttttcagctgtcctgtgcacatcatgcacgaaaacatctgttgttgagttgctacttccttttcttgctaacacagctgcagtatatatactccccatcctacctggtgtctctaagtcatctccacgggggccatcaacaactatcacatcccatttggtattgtgtacctgctgtggcaaatccctcagttccagtttgcagtctgatgagccttgatgttgattattcatatttggtgcacatgcgggattagctcgagcatgttgaagcagattgtaagcatttcttacttccatctgatggtactttaagctgtagattcttgtgttgtttggatttacttcagcttttggtatcattatctttgcaggttcatcttccagaatgacggtaatacctctagtgttgattgaagataacatgaggtattgaggtgcaaacccgaaaacaagaatgttgcatggggatctacgagtaacggtatctgataagagcttcagttccttttccatgagagcggttgggccctcattagccctgagctgctgactggaatcagctggactcaagcgaaatgtggttgaagatgaggactgggacttagaagaagacttgtatgaaatccggaggagtcggagaacagagaggcttgatagaacgaaaataagaagaggtatgagcttacgtacagtgaatttaggcatcttaatcgttgataacctctggtgtttgggattatcaggggaggaaggaggtgagaacctgagtagaggattgagaatagaaagggaagattgatgaaattgcggaggcattattactattctcacctctctttcaatatcatccggttctcaaaagagtcaagcttttggttttaaatgtcatcaaattatgtgtttatgtcatcttcgagtgaataacaaggaaaagtcgtattgcttctgttccaagatgctctcttttttccttttcttgttgtcatgtcatttgcttgttagtttggatttacctaatatcatgattattatttttcaatttgtcatgtcactggagtagcaaataatagaaacaaacgtgtattaactattaagtgattgcgatggactgaacaagtttggtaagttaatttgtccatgaaactcttcaaagagtggtgattacaaggcaaaagtcttaataagagtaaaactaggagcgatgctttgttttttaaagcctcacatttatcctcagtaagatttaggtaaacagttctgggatctctccatttagagagaaaaaaaacacagcttctcttgattgccaagacgaacaatatatggtttgaaactttgaattgttgtgtcaacttaaataggcccttgaggtttttactttgtaagtttcatcaccacaactaagggtatagcctcatccaccttcaccaaaactttcaaatttctaacggaacagtgaaataaacagtgacatacattaaacagaaagaaaattactagagattgatcccaaatgtgtggttaaactaggttcacaaaatgtttcctctttttgagtatctgaacaagaaaaaagaaaaaaactgtgaagtgtcttcatgaaaacaacaaagctgtaactacccttctccatcttttatcttccctttgttatctgcaaacatgtcaaacaaaactttagaagaggagttccaaaattacaaggacataataaaaaaaacttttactatgaaagtctccaattcatctctatcatccacactctcttctattatgcatattcccttaacatgccaatgcaatgttcatgatccaatcacaagtctatcagcagttcagaacaaaactccttacaacaattttcttttcaccaccaaatttcaaagactatcataggaacaaattgttcccaaacttatctgtcagtgcatgctacacacaaaagccaattcaagttcaatgagtaatccaggatatgtaaaatgcaataacttattttgtatctacagattgaaatctccgaaaaatattcactgtttaagagatgtagagatagatcaaaaacaatcttaagttatactatactacatgaagtagcttaaccaattgaaaaagtatgaaaatgatcaatgcatggctggaaaaagaagagattggtgaagagaaatcacctaagtagcaccgacgatgatgttgttgattggaataaagatgagcttcacaaagaatcccacgaatcccattactacgaacccgattgctgtacggactgcaactttcgtgaattctacaaacaacagaaacaacagaatcaaacacggatctctcctcattcacagatcttcccatactcaaacaattcatatagatccagctgatcagacgattaaaagacacagatctaaagacaagaatttcgagctaaaataggaaaatccgttgaccgatctcgttgaattcgtgggataagaggaaggatgtaatacctttgcgatctggcttatgacaacgcttaacgaggcgaatgctgtccttggcaaagtctctaagaggatccacgacggaatcaatggcgtccatgtcccttcttttttttttttttttttgtgtgtttcgtttttattatttgttctgaatgaaaaacaaattgtgagtcttcggaaaaattacggcaaagaagatatatagaaaaagagagagagagggaacgtcacatggatattgaagaaccaatcacagaccgatcctccacggagttgtgccatgtcagcaaagtcaaaactatagtgggctcgcgttgctttttttgaccaaagcccattttaaacggctatggcactaggcactagctgagtaacattcccttcttgatcttggataacatcaggttttggtgagttttaaaatgattttaaaattttagtgatttcaaatgaatgaatatatagaaattgatatgatttttaaaagctttttgagattttcaatcaaaaccatagatctataacatgtacacacctttgtgttttgagtcaaaatattcctatatacacctaaccatttaaaagacaagtcaagatcaagtacaccagaataaccttgagagacgtgtacatctataaccaagaataccagatatcattggacttttaacattcatggattgtatacatagaatttgtccttttaacacaaaatcattaattctaaaagatgtggttgaatacactcctctcccttgacattggtacaatataacatttggaaattgtaacacacatcacctagctcctcaattgaaaaagttgtatagctttctttggttctcaaaggacaaacacaaactcatattaatgtctcaagtagtagtaagttggaaagtgatgaacaaaatatacattacttgcaatttattccatagattcaaaggtaggagcataccaaccaagctgatcgatgagcttcttcaacctctcttcttgtcccttggagtctccaaaagcagtggtgaaaggatacacaaaggtaaccttagtggccatacacctgtaagcaaccacatcttgcttcaccaaaaactccatcacatctctgctaaatcctcctccttctacctctgcctccacatacctccctgcaaatgcaattgtgtgtgatctttcctcaaatccttggtgggaatcatttaaaaatccaattgtggtgagaaataatttaccatagggagtatcttcaagaaccacaaacttggggttcttctgggtgctcattattgcttctttcagtttctgcgttgaacaaataatcagaaacgatgctaaattgatgaagataggaggaaatatacctcaatgggatcctgtgtatcggtttctgggatcgtcaatggaaaagagaaggaagatgaggttggattcgtcgatacacatcctgggttcgtggaagggcaaggcctaattttgctacaaaaaaaagagagtaataaagattagctttgtttagagagcagaaatcagagtgagaagaggaacaaacccattgagaagaccggtctggacgaacttggattgggtgaaaggagtggtgagtggctgagaagaggagagagaaggaatggctaaggcaggggaaaaggaagttagagagatagcaagagcaaaagagattagttttggtaaaagagagattggaggagaagtagaagagagttcttgttcttgttttgggctttgcaatgagcacaacaacttggtgcttctcggccgtggcgggaggatgagttgcaaactggcgaccaaactcatgtttgtagtttatggttactctcttctcctccaaatattattaatatataagtgtctcaaaacgctttactgaaatgaaaattaattaaaattgttttttttttttattgtatgtttgaacttttaaattttagttgactacaaattccataatgtcccgatataaaatgtgagatgtgttcttgtttgaccacaataaaaacactatgagattggtagaaaattatcaagaaatagagtttcacccaataccaatagcgtttcacctagttttcatcatcctattacaaaaattcgatggtaaattacaagcggcaaagttcaatgtaactaatgatacaccgatacacgtaacatgttcattgaatgtttcattaaaccaacaaaaaactattgactcatgccactagaaaaattaccaccgaattaaattaaagagagcgagaggcaaatgaaacgatagaaaataagacgttcaatggtcttgagagaattaaatatgtttctttatattcaccagtgtttgaacatttgcagaattgtgcagagaaaggactaaaggagaatgaacaacattttattggacaaggaaactctattttcacgatttcgcaggtatgtctttttataatattacttatttcataatattttgatatagatgattactcaaacaaaagaggtgaaaactcttgtaaattttcagtatttaacctgcaaaacagatactacttttttacttgatttatcaaaccaaagttaagacttacaaaagcaccggtgacaatccgacattgttgccatgcaaagactcaaaccaatttgaccgtcgacgcttttttagtatttcaaaaatatttttatcaattcatgaattatgattattgccaaacatcgattcagtggagactaggtttatgaattatgaccgtagaacatatgaaaactgtgtaaaactattgtataatttatgtattaaattttgtattaatcaactgatatgcggtcggaccggatccaaccggcgatcgaaacataccatttatattttttctttttctattttactagaaataaaataaatagaaacctccgttgcttttttggcaaacactgtgagagagttgaccaaaatcgacccagtgggaggactaggtttatcgaaagctccagttttcatagataaatccagtaaaattatacacgcaaattctagtttcttagagcaaagctttgttgaattgatagcttgaatttgggaatggacggagaagagcttaccgagcaggagactgccttgtacgaccgccagattagggtttggggcgctaatgctcagagaaggttactttctcatccccttgttcttttcaacactcaatcttgttttcacttttctaaatttaagtgcttttaagctgcatcatctcaattatgatttgagtcggctttgagtactaaactcttactatttggccattttaggagaatgcttaatggtcccttcttaaatgcggatttagatcattaaaattgtatttttttttgcttctcctccattcgattactttctcttggcttcagttttggtttttatttgtttgtctttgtcttaagagaattttagttaatacctattattggtttagcgtttggattctgcttctagactagtgcattcctaattatgagctcccttaggttgttctgagatgagagttttgttttttaactattaagattgatgtattcattcatattttgctttttgctgaagcttattttattgatacactacactaccatgtaattactctgtaagcttggcacgatttgatatagtgtgaggttggtgttttgccttgcagattgaccaaagctcatatcttggtatctggaattaaggggactgttgctgaggtagctgtaactctataattcatgctgagatgtcatgcttttcaattagtttaatctaatggtatcttactgcatttcctggctttgtttccatttggtgggttagttttgcaagaacattgtgctggcaggagttggttcagtgactttaatggatgatcgtttagcaaacatggaggccttgaacgctaactttttgattccgcctgatgaaaatgtttacagtggcaaaactgtggctgagatttgtagtgattcactcaaggatttcaaccctatggtccgtgtttccgtagagaaaggtttccctctaatacctctccgttaatgttttaaaaacataccgactattatctgatcaatttttcaaatctttcaggtgatttgtcaatgcttggcactgatttttttgagcagtttgatgtcgtagttataggctatggttctcgtgctaccaaagtatttataccaccttttacatatttaccacttgctttcatctttagttgctccatacatctcttcatgacgttgtctgtttattttttgcagaaatatgtcaatgaaaaatgtcggaagttaaagaaacgtgtcgcattctatacagtcgattgtagagactcatgtggtgaaatctttgtggacctccaagattacaagtacacaaaggtacttgcatgatttgttgttgcatttcttctgttgattatgtgctgttttgacatttcatctggcttatttttaaatttctataattccattgaacatttaaacttcattaacaacttctaatttgcacaatgtcctttgtattgttttcctgataattttctttccacagaaaaagcttgaagagatggtggaatgcgaactaaattttccaagttttcaggtacaatttaacactagttctcgctactaataatccttacatctgcataggattttgtgataaattagatttgtttattgccacaggaagctatatcggtaccatggaaaccgattcctcggagaacagcaaagctctactttgctatgagaggtagttactagttactacagctgatttctttattactttccacaaatgaaaattgagatcccaaggcagatacatacaacaaaaattcttcactaatctttggcattctcatgaaattttcagtaatagaagtgtttgaagagagtgaagggcgtaaacatggagaatgttcgctactcgatcttgccagagtcttggaaatcaaaaagcaactctgtgaggcaaacgtaagtgtgtttagttgttttatcattatttagaaatgtcactgccaggttcactgaataactgaatattgtctctcagtctgtgagcgagagccatataccagatattctcttggagagacttatcactggtactactgaattcccgccagtttgtgccattgtgggaggaatattagcacaggttctctctctctcactttcactctcttatcgcattcgaatcttctcactagaaacttgtaatttgacaagaaagattttttgatgtggcaggaggtgatcaaagcagtatcaggcaaaggagacccgttgaaaaacttcttctactatgatggtgaagatgggaaaggtgtgatggaagacatttccgactcttttacctcttaaacaaccagtgggccttgatttagtttaaactctataatctctgagattccatgtatatctcaatcgtttgttttttgccttcacattatgaacaaatttaatgcagaatttagtggaggatcagttgtgattttccttcggtaaaatcattttcagttattgacatttgaattgttcaatttcaaatttcaaatattataattcaattcaaagactagctaagtttttaaaagtaattagtgagagatctcacagtgatataaaccacattcattttaattcatagcaaagtaaatggtaagaaatgaaaatggaagaaagagaggagagtagttcacacgaacatctgaaggagaagttgagagagcttgaggaggaatggacagccatgaaaacaggtaaaaactcatctgcggtttcatggattaccgtggaagatgctcttgagtatgtcgaaaactctcccagaaacctaatgctctctctccaacacaaaccaaaggcagagatgatacaagaaatatcgccattaaggagaaaactctttcacgactctgatgatgatgatcaaactaagaagacgacattgctttctcattcatcttgttggtcttcgaatgtgacgagttcgagtgataccacgaaagcaaagaagaagacaacgattagaagatttgtttctgttacaatggtgctgcttttgtcatgggttttagttgtgttgatgaaccactttgatcatctctccatgaatacacaaatcattactttggttcctacttgatatttttatttattttggtttgagaatgttcatcaatctcaataaataaaaaaagtttagttttgtattattacctctcgccttctcttttaattcattgaacctcttcaactttggctgtaactatgttggttaaaacagtataagtaatgtatgtatttatggttttaggaaaatcttacaaaataatactctatcattggatgaagaagcaaaaactacacccctctacatcttttctattcataaacttttttggggaaagaactacattggtggtgattaggtgcatcggtgacactaatgttgaaaatatgttttgtgtaaaattagtatggttaaagctaatcatttagttgagcaaaaaaagatgctaatcatttaaatagaaaatggactcaaacaaaagaaggccacacattcaattgttacatctttattgggttttcatttttggaagctatttttatgaatttgcagtgttttgttgcccaaaagaaaaaaagcataattccaagtatatctttcattttgaatccatcagtcatatgttttacttgaatcaactatttgttgggttttacgaagttacttgttaagaagattcaaaatatatataattagactatcaaaggaacaaaagaatgtaattgggtcataactttttccgaagcttacgtgacttgggagaaaatcaaacccattagtttcacccttaatcaaactaatcacaaattttgaactttgcaaagaaggtaaaataataatcagcaaaaagattaataaaatgacaaaagtatctctttaaaagattaataaagaaataaagaaatgacataagctctcaccgaccgacgtcttgtcttttttattcttaaggtcggtgccatgtcgacgccttcaagcttagaatctcgccacgtgtgggataaactaaccgaacccaatcgaaccagacagaccaaagacagaccagaccggactagttgtatgtcggcatcagcgttctagtacgacgttaattaaaaaaataaaaataaaatattatttatgatattccaccaataagagccaatgaaaagtgtgtgaaccaaccaacttctgtagcaaaccgtaccatttctctcttagatacctttaccttccttctataaattaggttcttcctttcacatttctttgtcttcttcttctacataaaattgattcgcctcgaaatttacacagacttgtcgctctctctttctctcttatttcacagagcccctaaacatttccaaaaatcttgcaaaggaagaaaaacaatggacaaattttggactttcctcactgctcttcattcaggcgctgggtaattattcttaatcttaattttccttccattatgtttccaaaattagttactttttgatttcctctgtttcgatttctaatccaaaccgtaatcgatttgttggtaatgtatatgcaggcctatcgtgatgttactttatccattgtaagtttctctcttgttaaaccctttaacaaaagaaaaagtttctttctggttcgatctctctactttttgttgaagattaaaaacaaaaatctgtgaatatttactaattatgtttttgattacaggtacgcatcggtgatagcaatggagagcacaacaaaagtggacgatgaacagtggcttgcgtattggataatatattcgttcctctcactcacggaactgattctgcaatcgcttattgagtggattccgatttggtatacggtgaaacttgtgttcgtggcttggctagttcttcctcagtttcaaggcgcagcttttatctacaaccgtgttgttagagaacagttcaagaaacacggcgtcctccgctccacccactccaagcccaccaagcccaacatcctccactccattttcccccaccgggtaaattttttatctttttggttttgagattcataaagcaaaaaaaaaaagtaaaagtaaccattagttttagtattctttggtgggtcaaagaacgaatctttgtttataaagattaataatgcattgaatatagtcctaggaaacgtaagagtgtgcctaattctctaacgtagcgaccatgagcgtataacaagtgttttgtatacttttgttaattctttaattcgtttttaaattaattgtgaattttaaaatgtgatataggagggacacgaggctcacagtcactgaatcagaagggtggagcagacagaagaagcctgactagtattattgtaatggtcttggtggtggtcccatcatgtccctgtctaatctactttttactttatttttatttatcacaaaaaatgggtttaggaatgttgatgatgatgactgatgaggtgtgtaatcgtttttaaattagaaaatggcttcttctgcttgtatgattgtatcgctaatcttccacgcgtatttctttaatgtcaacgctaataatttccaattgtgtcccttcttgaacttatcatacatattttgatgacgcaaatatctcaccgaatcaaacccataacagtatatccctttttttggggcctaaaaccaaaattgaagtgaggcttacagagttagaacgcaatttaaaccagtgactaatgttttgattggttctccctctgccacctgcaaacgctgcgtttgcgggtggtagcggttgttagcgtttgacactaatcatagaaaccgctagataccgttttggaccgcttgaaatcgccagatttcaaaagcttcttcccgtaagcgtttgcggttgcgggcggtagcggttaggttaatttttttttttaattaattaaaataattatatcttccatccaaaccctatatattttattcttatcagaaaaccctaatcaatatattgaaaccctattttctcaattatggcatctacccaaactaacgaaaatcaaaatcaaaatcaaaaatcaaacgtaagtatgatctatcctttcatccattcattagctagtgtaattctctgagtatttcatggcatcgtcattttttttattttgtatttttttgagtttttttattgaatatatgttttgatttgttttctcgattagaaaattatttggtcagacgagatgacccgtttcttgttagaactttatcatatgtatagaggcaatccggaaaatccacgagttcaacgttatttacagtttattacactacttgatgcaatttttggtgatgtaccaaatgcataaagtactaagctttttcttacaaaatttatttatttttgaatttaatgttttatttatggttttaattattaagcatgtttaattttctaatattatcaatttatcataataatatattgtattttttcttttaaaattaatatattatatttattttggttattttttatttaattactatcgcactcgctgatttaccagtcataaaacttccgtaaacgcacccattatcaaacgctcaaccagtcgttcaaaacgcttgataatgcttgaaaccgcaaccgcctgtttccgcaaactcccgcaaccgcaaccgcaattgattaatgatttatgttacacggttttgaagcaagcatgaattatatcacatgtataatattcttacacatactcttagattgaagtaaagaactagtaccaatcaattcctctaagagaaacctaagttagctatacaatggaacacacaaggccaacttcaattatgcattttaagtttttaaccaaaccacacacgcaaaaaaacttaaagatcagactaacacaattcactgttattagctacacaacttgagaagaagaaacagagtgaacaaacaatggactaacgaatgaagtatacaattaaaacaagagatctaactcgaacagaagtttctttaccatttgtcagcttttccacagctaatgtttatcccaaaagacaagaaactgaaaaacttcaacagacaatgaaagagaagattcgttagggttttattttgtctatgggccgtctattgtgtgatccataagaattagttgtgtaaaatcaattataattgagcttacaatttaaacggtccatcttctcaactaacataataatttaaaaaaaaaactagaaaagcctctcaagtcttaagtcaactttgttcctccttctctgaagagatatataatactctttttttctttcccaatatttttcgatttcttcatcattcattcgcgcaaacattccaaaagttttctcttttcaactagtcaatagtcaatactttaaattcatcatcacttttgcttttcaactctttcatcttcttgtccaaattttctattaatggacaacagtattcacgtgaagcgagagattcaacttccatctacttctccggctggctttccggggagagaatctgtaactgtagtcgatctctgtagtagtgatgacgactccgacattggagaagtcgccggtggattagagaaagtaggaaacaacttcgtcggtctgaagagaggacgagatacttttggaggttcttccgaagtggataggaataatgtgaagaaggtaacaacacttgctgagttaggagttgggttaccggaaggattcggccaatcgaatccaccggaaagtttgacgcatcctattcctgcgaatccgtgtaatgtcttcaggcctgtaccgccgccgccgccgccaccgtatgccggcacgtctgggaagattggcggttgtaagcagttttggaaagctggagattatgaaggagcagctggcgataactgggatctttcttcaggtaaaccaaattttaattttattcattagacagtaatgtggaatgttggtcggaacaaaacttttgagtgttacaatttgtgtctcaggtggttttgatcatgtaagagtccatccaaagtttttgcattctaatgcaactagtcacaaatgggctcttggaggtattattcttattggtcaacctttatatgagcgagtttgcctctatttttttgagcttatctgagttctcttatgcagcttttgcagagcttttggacaatgccttggatgaggtaggtttttgtttctttacttgtcttagacagattgtatgatgtgtagtaatggtttctctcgttgatatcaggttgccagtggagctacttatgttaaagtagacatgctagaaaacaacaaagggggaaacaggatgttattaattgaaggtatacactttacctagcaattcttaaagaacctcttccctaatttattcatgtggttattggttgcctaaaatgcaacacttttgtccactcatgtactacgagaatccttatgttttgaactgcagataacgggggtgggatggaccctgaaaaaatgcgacaatgcatgtctctaggatactctgcaaaaagcaaacttgcaaacaccattggacaatgtaattattctttgtttatccgacttatatcgaaagtttgcaggaagatgcttaatttatttactgcttatagatggcaatgggtttaagactagtacaatgagacttggagctgatgttattgttttctcgcgttgccctgggaaagatggaaagaggttagttgtttattatcaatgtgttacacctttcggctatcatgtcttttatcatttttgttggattgtatttcattcccgaagaatatgaacaatagttgaagttataatttttggttaatagataatttacttgatgttggttttagctctacgcagagcatcggactcctatcatatacatttctaaggagcacaggaaaggaggacattgttgttcccatggtaatcgttctttgtttcatttatggcattgttagagaacaacttcatgctctattatgagttgtattctgatatgaaattccattcaattgcttggttcaacaacatgattcttctaatctttggttaacatgggattcagtggcacgtatcagctggttacgtgtacactatttattgcaatctttgttcagtgttagaggaagtgtgaagcactaatatgtcttatgtccacaacgtatactttctaatttaaaagaattttgtattcattatatccttatattctcttgttatgtgatttaaaatgacagcttgactatgaaagaagggaccctgaatggagtaaaataatccggtcttccacgagagattgggataaaaatgtggaaacaataattcaatggtcgccattctctagtgaagaagatcttcttcatcaggtatattttccctttgttcaaagcagttgcttaatcacttattcatactaagaaattttgcatgagagcgtctaagctatttgatcttcttttattctgtcactcctttgatatgggttccatctattaccacccctttactgtctctgtgaacaaacgttatcactaaatttttgcttcatttgttgtagtttgatctgatgaaggatcgtggcacacggataatcatatataacctgtgggaagatgatcaagggatgttagaactcgattttgatgctgatccttatgtatgtgtttttattcctcaatgtttgtggcttattgtgtgagataatgcctatgaacttttatggataaaatattgtttatctgcaggatatccaactaagaggtgtcaatcgggaagaaagaaacatcaaaatggcttctcagtttcctaattctaggcacttcctgacatacaaacactcactaagggtataaactcttattttccattatcttttgtttgttgttgtagataataaatacccaggaagatgttattaccaaattagctatagacagtcttatgctagttaggactgtaaatttgtaatgtacttgaaggtttcgtactttgatgtgatagtggggaataataaaaaagcttgaataggaatattattgtgaattgtgttcgaatagactgcttgtccttgtattctacaagttcgtttctcacatcctttcgacatgttcccagagttatgtatcaatcctctacctaagaattccacctgggtttcgtatcattctacggggaatagatgtcgagcaccacagcgtagtgaatgacatgatgcagactgagcagatcacatatcgaccacagtctgaatcatatggagttgtgacaaatgtaagttttaataacttttctttatacaagccttcttatagttctttttttatttacagaccatgatcttctagctataatataaagctggtattgtgcacaactttcttttatcagatgtctgccattgtaattattggatttgtgaaggacgcaaaacatcatgttgatgttcaaggctttaatgtctaccacaaaaatcggctcatcaaggtttgcttctacttgaatcatgttttgcttgcctaaactctccatactaggcctttgattttcaagataaacagcggatttcatattcttgtgtatttcttattaacttgtgttatcagccattttggaggatatggaatgcaacaggcagtgatggtcgtggggtcataggtattgtttttacatggaaattctattactttgttcacttactttatgtgaagatcacagtgctagtttcctctgctaataggtgttctggaagctaattttgttgagcctgctcatgataagcaagggtttgagcgtacaacagttctcgctagacttgagtcacggctagttcaaatgcagaagacttactggtctgactgttttctcatgttgttttaaaatccaatatccttaagcctggaatggatgtttcagggataataacattccattccttgttgatcaggagtacgaactgtcacaaaattggctatgcgcccaggcgacgtgaaaagtctgcatatggttatgataacagaggtatagtgcctttatttgtttttgtaacgtccatacaacatttccaggagattttacttgtagggaacaatgtttttctggatgttagactcatcaccagaaaatgatcgtgagggaccatcaagcatcaaaactcctactccagcttctgacaagttctactcaagctcatatccaaatcataatggggacaacggtgtatctgggaaagatggtgcacgggtaaatactcccaccaaaatctcaaaccaaaacgatctcttcattgtaatagatctctcattttttctttggtactctcagttgcaagaggagctgcggcgtgaaaaggagcgtaggaaggcacttgaagttgaggtaaggtcttactttctgacattttaaatctctacagcttctttgcaagcctgatggattcctggttaatttaggttcaattatcaagacaaaaaatagaagaaatgaagaaagagcaagagaatctgattgagatattctcagaggaaagagaccgacgtgatggggaggaagaagttttgagaaataagctagaggttcctcattcattaaactaacctttctcctttgactcgtctgattatcatttgaaggcttaccttaaataaaactaaaacatttcattgcaggaagcgtcgaacacgatcgatgatctgttgaataagataaaaaagatggagggatctaaagtcccgagctggagacattaaacatagagcttgcatatatttggaggttagattacaagacgagattccatgtgtaacctaattgattaataaggcatctctatttatttgtgactcgacctgatctgatccgggtgggatacaacatgttgtagattagtgttattgataggaaatttgtaacatctctaaatgtttttgacctatgattgttttttttccttacaaacttataccattcccatagccttagcatctgccattgcagtaacattaacgatttccatgtgaaaaacaaccaattttagcaataatttgggttgactttgtcgagatcttggctcaattatatatattcataccattactatataagaactgatgtcttgtttatttgatgtcagacgcctgagaggtttcaaagtttttaaaaaaaaaaatttttaaagagaagcgtgtgtggctttaaataaggtcaactaggaaatgggaatcattcaacaagaagaaaaatgacaaaatgaaatatgaatgaagaggaggagggggtcgagaaaggttgagagaagcagaccaaagctctgcaaaactctgttttattaatgacacattgtgctctgtctgtcaaaagcaatgccttctttctagtgcatttattgcccattcccaaacaaaatatacaaataagtgtaaggatgcatgatatagtttaaaaaactatttgaaatgctcacattctttttgaacttctcttttaaatttgcaaaaaaaaattatatttttttgttccaaaaactgcaagcaaatgttgatacgaacgagccaacttgtcattttatgaccttgttttatctctgccagtcaaataactctttccgttttcgcttttttggcttacttcttactctgttggtttgccttttgtttggccttactttcgtttataggaatcgaatttcaatgttttatctttcctgtcgaaattaaattggtctttctaataaatctcatttttttctttttcaaagatttgtttatttagtgaacaaattcttaagagagtttttttccccaagcaattgaaaatgaatcatgtaatgttgatttttttggtgcaagtttatatagtttgctagaaatttggccttcatacgatatttgaacattttgatataagatttctatcagaagacagaagctacacgattgattcagccagagaaaacaaaagttgaaccgaacgattaaacccacacacaaaaaaaaacaaatagaataagaatgaaggagaaggaatataaaaatgggtacaagaaaaaacatcatcgtcgcaatcataaatgcaattgaaggcgcgtggaaaagagactcgtgtgcttctgatactcccacgtgaggatgtgacaatttaatattacgaattcaataattacccaatctttcttaatctgttaatttatctaagccaatcattcattcctttcacacccgccacggtgtcaatccaaattttttagaatcaccaaattacacctttacccttatattgtttttaatttgtttccgaattttaccaactgtttcaataaaacgtaccaacccatttctggttggatacaagcgggattcattcctatataacatttttaacggtatcattcaatcataccggtccaatttatttctatcatgctatctatataacattttcttacaaaatgtctttctctataccttttcacattcgaaacttcaaaagttaatgtgtcaatttaattacgcataactcgaaaaatgcattttaaaacaattaaaattaaatttatcttaatttgacgttataaaaaaatattgaatatatttccgagaaataataataagagaaaggactataaatacgtctctagtgtgtaatgtgtaacacagacgagagtcctcaaatccattttctctctctatctctctttatcccttcgtcttcttcctcggcgacaccacttgcaggcgctaactcgacgaagaaggaaaaggtgagagaaactctctgaaaactgtacggatttaaacgtatatatgtgtgtatgtatacgaatctgatggtttagttttctggatttttctccattctctgttgattctactttttttgtttgtttgtttgctttgtttctctgtgtttcacgctgcactacgctccagctttctctttgtttttcagaaccagattgcttttttccatgaaactcgatcgagatttcttactttttcctatttttagtcgctttatgatacgattcatctgtcgcctgattcgcttcatctccttggtttgattttagattttcaatttcttctgtttttggttacgtttgtgttcgctgtgatgaagttttccctgaaacttgttaaaagcgataatgcatttcgccgtcgttttcttcgattttaggtttaagcttctctctctctctttcactgtacattgcgcaacagatttttgattttggtcaaagtttttcaaaatttctgcagtagattccttatatttcaaatcagagaagcgagtgatgttaggagccgcttaaatctggattttcctctgttttatactgttcattgatatgatggatgcaagacaagtcgtgtgataagatactcataaagtttttttcgttctctttcctctggtttttacagattttccggtgttagtcacatcgacgcagaaggaacagagaagaagacgagagtcagcttcattatcaactttagttcttcgacgtctacgcacatgaaccgacggcgacttttggtatcggcgacactgctctcgtatttgctctacggcatggctctcgtctccgttgaagcctccggtggtacgaaattccttaaattaaacgtagattcacttgtttcttaaacactctgttatgcttaggttaaacttagattccttaaccaaatgttatcttctgagtgttaatggtggaaaatctcgtggttataggtgaaaagcttagagataatctggatttgactaaaacgacgacgtcgtcaccgagcatatcacatcggaaaatgctgcttctctctcctggtactggtaaggggattttgatttttttagactccagttttacattttaccaaatcggtgattgattctctattgtgttgattttgttaaatttgtcttggttcctccattttcgttaagaacctcgtgaaatggtgaattgttgttttgtttgtttgtttgcatcagaacttctctctctgtggtctctctgtgaatgcacaacttcctgatgcgtttcgtcctttttgttttcacagcgtcgtcagtcttttgcacgtctgtgttttcttgcccctgcttttgtttctttgttcgttatacttttgtggacccacttaagagcctcatgacttatcttaagagtaaaaacaaataacatcatcttaagattgtgtgttttcaaacgtcgaattttaccttctgttgaatctctttcttcttattatgtgtatgaattagtaatatataaataattaaaattaggaagatttagttttgatgacttgttgactatttactggagaatgcatacatctgtatagcaatgcttaaacagctccctacttcatccagctgtcaaattaatactagtattctctttttttcattttatactccaatatttttttggttattccattaaatttttactagaaaatgtagttagagagaacgagtctttagcatatcctcttagcaatgtagctactaatatactgaaattcctctgttttgattgtgtgtgtgattgtttatataaaggaaaaacagaaaggagtgtagagccggagagaattggagaaaagtgcaagagtacggacatagtggtgaaccaagcagtaacggaaccaatgcctaacggaataccaggctacatggtagagataacgaaccagtgtatgtctggatgcataatttcgaggatccacatcaactgcggttggttcagctcagctaagttgataaacccaagagtcttcaagcgtattcactacgacgactgtctcgtcaacaacggcaagcctttgccttttggctccactctctcttttcactacgccaacactttcccttaccatctctctgtcgccttcgtgacatgtgcttaggtcgtggctttttcttttagttttttttgtttaggatgagatagtagaaagaaacagagggaaattaagagggtcttactagatacggaaatatgagattagtcgtattcataccataccatccacttttgttttttggttctcttgggatgtgaaacagtgatagataaatgaatatatatccaaactcttttttccctctctgttaagcttttctcaatacctattgttgtagctggaaatggtcaaaacccccagtctcagaccgtagaactggcatattgggtcatggagcccttaagaccactaagagaaataacctcggaagcaatctttgaatttgaacatggctaagactttatctataggaaaaaaaagaagaagatgaaatcctgttgattgaagaacgagaatttcattcggaccagttgctttaagaatttcttacgcttggtatccacatttcgtttagtacgatccgattggtttactcattttttagattaaccaattatggtttgttgtatgagtttgtacttccgttttctcgtgtatcccttggcttgaataatatactggatgatatcatacaaatttcaaaataaaaacaaaaagaaatttaatatattgttgcgctttacatattagtataaattattattttcgacacttgttcaattttatagaattgaacagtggattgaagaaatgatgtggaatgatttgatttgtgttaaaatgacaaatcttatgttatttaaacatgacaatggatgaatggattaataatttgaaatagacaatcaaatctactgttattgaaaacattttaagtagtggatttgaattgattgagtgactttaggtgagatttctgggagtttttaagttaaaaatataaatatccaaatctcatggttttaagtgagatttgagagaatataaatatcaaaactcatcaaacttaaatcactctaaattcattactatattagtatagatacatgttaaaagattttctcgtgttatcgcgtgatgaaaatctctatcattttttttatcctatgaaattatgatattttaaaacctactattactttgatccaaaattagattttatacttatatattttaataaaagttgttgaataaaaagttttttttttaactttaatttttgatttaccaatttaactaatacaaatatattatgataatattttatgttcggaaactaatttagtagagtgaattagtcgtttgacaacatagatacttagatagtaaaagtttagtataaaatcgttgttggtgaccaagagaaatttcatatttaaaaaaatattcacaatgtgcccatcgtcatttcgcttgattttaagtgttatattaatcgcttttctctttgttggtctttgcgaggctcatcggcatataaatgtggatatcatcaatgatattggtccaaatgttcaattgggactacactgcaaatcgaagggtaaagatctcggacctcaatctttagcccctcatcaacactggggatttactgcatctcttaatgtttgggagacgactctgtttttttgtcactttgtttgggaaaatcagtctagatggttcgatattcttaaggaaaagagagatacaattgtatgtaaatatcatccctgtgtttggagtattagacctagtggtccatgtaggttaacggatcatgaaaaatgttacccatgtaatgctgatatttgaatgaaaacctttgttacaagattttatttctatagttatagaataaaaagttcaatttccttttcactacgcctggtcaagactctagataattaccttatccagtttgccgggtttgatactactaccttgccctgcaagaaacatcatatggatttaaggcaaaccaaacttagtaaagacaaattgtaatctttaggttttacctggataatcatatagaaggaccaacaacattagccctcctctaagaatatcttcatcatgtctgtgaatcttattggagtgcaacaagttggtccagggcaacaaaatcaaattgccactcaaaaacgatatcatcattgctctctaaaaatttgaaaaaagagttttatctattgtgttttacatgttagtataaattaattcggtcgtacattggacccttcttttgtgccatccacccaacgatataaacagttgttgcagagaaatatccatgtacaatggagaatgagtttcaatacaaattgtatgactgagccaaaacacttcttgattcaattcaacttacctcataaaaagacgctagcagtgttacatcacgataatttttccaggctttatggtcatttctctcccatattagtgcagtgatcgttgatccagtcgccctgatgcactacttatatggataaaaagccaagccaaactaagtaaaattattaaagaaacattatgatctacaagttttttaccagaagaatagcatagaagctccaactcaagcagctggacacaagcactagccctcctcttaggatgtcttcatcatgcttgtgaatcttcttggcgtgcagtgacctggtctacggcaactgaatcacttggtagtcatttgaggtcttgtattcctatagttttgaagttattacgagcgcaagaaacaaaacaaaataaaaaaaaaacatagaaacaaacaataaggtatggtagtcgtacctttcaaatacaagagaaagggatgatagtattgtagctgcgataactagacgctcagcaaacaagattctcggagaaatctccgttatctagaacatattttgcaatgattgacattatcgataagccaatctgaactgaaacaacggtaactaccaataggacgttatccatggcgtcttcttaaaaaaaaagttataacaaacatgagcaaacaataaacaaaacataagcaaaatataagtacatataatacttttttttttttactttttaagtttatgttggcatttataagttgctagattatgacttgtgtcatatagcatgtgttgtttctaagtcaaatgaatacatttgataacagcaacatcaacaaaaaaaagggaaaatatatacccaagagtaaagaatctttgcatatctttgactatcttaatcattcacaaaaatgtaactgagtataaaaagatgggatgcgcaaactttaagttcatattcataattattatcaaaaaataatattcaaaatgagtggctctttggcatttcacatcataatgagtgtcacattcatggtttttttctttggtggtctatgcgaggctcgtggggtaaacgtggatctcatcaatgatattggtccaaatgttcaattaggactacactgcaaatcgaagaacaaagatctcggatcacaatctttagtctctgatcaacactgggggtttagagcatctcttggtttttggaccgtgactctttttttttgtcattttgaatgggaaaaccaatccaaatggtttgatatttttgttgaagacagagatttaacatgtggtgatcattgtgtttggagtataagacctagtggtccatgtagactaacgggtcgagaaaaatgtttcccatggaataataagtattgaaacgttgtattaaaattttcattttgataatctaaaaaaataagaaaagtatacgcttatagtattcgtttatcttcaactatttatttctagtatgatagaaatattttcattgaacctaatattttcgaaaattctcggttgttgacctacctaattctgaaagtaattgctcccttgtagaggactctcgtagatttccatctttttttttaatgtatataagtacataccattgttttgatttttttagtttatcttggcatttataagttgctagattatgacttgtgtcatacaacatgtgttgtttctaagacaaatgaatacatttggtaacaacaacatcaaaataaaaaaacggaaaatatctacccaagagtaaagaatctttgcatatctttgactatcttaattattcgcaaaaatgtaactgagtataaaaagatgggatgctaaacctttaagttcttaaacaaaatatccatagttattataaaaaaaaaaaatcgaaatgaatggctcttcagcgtttcacataatattgagtgttacattcatggtttttctctttggtggtctctgcgaggctggtgttgtggtaaacgtggatatcatcaatgatattggtccaaatgttcaactgggactacactgcaaatcgaaggacaaagatctcggaccacaatctttagcccctcaacaacactgggggtttagaaaaacacttgatttttggggcgtgactctgtttttttgtcattttgaatgggaaaaccaatccaaatggtttgatattcttgttgctgggagagatagaaatacatgtgctgaacatccgtgtgtttggagtataagacctagtggtccatgtagactaacgggtaaagaaaaatgtttcccatggaatgatcagtattgaaacgttgtattaaatttttcacattgatgataaaaaaaaaatatgaagagtattatttttctttgtttttctttactatatactagataaggcccccctatatttaggcgggtgtaagatataactgtaattttttatcgataatatttaaattttaaatagtaaaataataatctatacattgttcttgatatataattttgaatagtaaaatagtagtcttatgcattttattttattatatccattcaatcttattgatgatatttgaagtctaaatagtaatctacacacttttttatattataatttagtatttagaagaaaagaacaaatttttatcttacatattcaattttgtatacaatttaactatctatttcataaaaaactcgattttaattttacacacttcatctcacttgataatgatttcatgtcaaaataatatatatatgagatcaaatctatatcttagttaatattaaaaattattaacaattaacaaaacatagtgttaataccatacatattaaaaatttgaccaataatatatataaatatttttggttaattttccttttggttaagaaaaacaaaatgtaatattttttagatatagacatatgaattagtatatgttaataatgatttattttttagttttctatttctttaagaagaaaaaagttaattgacttcttttttagtatttctatttctttaagaagaaaaaagttaattattttgttacacgtgtcaacatctgatcgatagacttgacacatgacataatcctatgagttagtaattttaaaaaccatactttatataataagatatgtaaatgtttcattttaaaatatctactcccagaattacataatgtctctgttcgggagtacgtcgccttcatccatcactactcttcatgtctgtctgataggaaccgcaactccatcctctacccttgtatgaggaaatcagtctagatggttcgatattcttaggaaagagagatacaattgtatgtaaacatcatcacccgtgtgtttggagtataagacctagtggtccatgtagattaacgggtcaagaaaaatgttacccatggaatgttgatatttgaatacctttgttacaagatttcatttttataattaccttatccagttttgccgggtatgatactactaccttggcctgcaagaaacatcatatggatttaagaaagccgaacttagtaaagacaaggtgtaatcttttcgtttttacctgaataatcacatagaaggaccagcagaaagcatggcagtgtgaatgtaatcttcttagcaaagacatcttgtaatctttttaggaaagacaaaatttaaggcaagcaaaacttagtaaagacaaattgtagcaatatagctacttgtagactaaaatttctctgtcttttattgtgtgattgtttagaaaaaggaaaagcagaaagcagggcagagccggaaagaatcggagataagtgcaagagtacggacatagtggtgaaccaagcagtgacgataccaatgcctaatggaataccatgttatattgtagtatgtctggatgcataatttcgaggatacatatcaactgcggttggttcagctcggctaagtggataaacccaagactcttcaaacgtatttactacgaagactgtctcgtcaacaacagcaagcctaaatttgccttttggctccactctctcttttcactaccgcaacactttcccttaccaatctatctgcggccttcgtgacctgttcttaggtggtggctttttctcttgtttttttttataggatgagatagtcgaaacagagggaacttaagaggccttattagatacagaaatatgagattagtcatattcatataccataccatccacttttgttttttggttctcttgggatgtgaaacagtgatagataaatgaatatatcaaaactcttttttccctctctattaagcttttctcaagacctattattgtaactggaaatggtcaaaaccctcagtctcagatcctagaactagcttattgggtcaagttgattgagcccttaaaaccactaagagaaataacctcggaagcaatctttgaatttgaacatggtcagactcaagacaccataccatcctgtcatttgttctctaggatgggaaactttatggataaatgaatatatcaacctatattcccctctataagctcatctcaatacttatagatatagtagctggacaatgtcaaaacctcagaccccagaacaagcctatccagaatataacagaccaatgaatgagatgttgaatattcactgatggggataaataagaatccaatgaaatcaagagattgggatgcgtagtttttacaccataaagtagaatttctcaattaaatccaaatcacaaacaccaaattgaattgtcattcataaaacgagaatctaaatctcatgtggtagagcttagaagtagaaacagctctatcaacacacagagagaattgaagaagaagatacaaacttggatacttttctggttattcctctacaaatggtcttccatctctaacaatcttcatctctttctagccaatcactaattgccaactcacaattcacacctctaccaatcatagtctcacaaacttccaagtcactcttttcctatatcatacctcagttgcctcaggctctggaggtggaggtggcggcggcggcgtggtttgttctcccatttttccccaaagaacaaaagagatgccaatgataatcacgaaagctccaattatcctgattcagcaaagaaagatgagttgagaagaggactactaagagataccaaggatgttaggaaagcaccaatgctcacctcccgacaaacatctgctcagagagtacaaccgagctaatgaccgccgtggcaatcagattgattggattgaagatactcacccttcttctgtgccatccacccaacaacgtaaaccgttgttgctgagaaacatccctgtacagtggagaatgagtttcaatacaaattgtatgacaaccaaatgacttcttgattcaattcaacttaccccagagacgctaacactgtcacatttggatgaagtttcaaggctttaagtttatttctctcccatattagtgcggtgaccgttgatccaacgccccgatgatgcagatgagagccgtcagggacagttttgccgggtacgacactactaccttggcctgcaagaaacatcatatagattaaaaggccagccaacttagtaaatttctgtaaagaaacattgtgacctttgggctttttacctgaagaataacatagaagctccaactcaagcagctgcacactagcataagccctcctcttaggatgtcctcatcatgtctgtggatcttctttgcgtgcagcaagctgttccatggcaatggaatcacctggcctctccaaaatgtcatcagcattgctccagcaaccgccacacacgttccaagaacttttgcttttcctcgatgactgtgaatagccactttctccaaccttgcaaaagggtacgagacattacatgttggaactaaagtcaaaacacacatactgatttgattattactcatacagaactaaatgtttgaaagaaaatagaaggctacctgaatatacaggccatcacaaatgtaatggccgggagtaggttgaacattccggaagtgaaagtgggcgttgtgagctgcatgcctgtatagtacaagttttgctccaatagtggcctgtaagaaaacatttgattaaacctctaatatattgatgaatgtgatgattcatacaaactataagtaacttactcgaaaatgctcatgataactatctgagcaaagattcttttagtcaggtcttgtattcctatagatttgagattattattagcaccagaaacaaaacaaaacaacaaaaaaaacagagaaaacatacaataagttatggttggtacctctcaaatactaaagcaaggggtgatagaattgaaaatgcaataaccagacgcgcagcaacaaagattctcggagaaagcccgtaatctagagcatactttgcaatgaccgacattatggataaaccaatctgaattgaaacagccgcaactactggtaggatgttatgatcatggcttcttcttcttctacgtcttttttttttggttaaattatattcaaaaaaaaaaaaaaaaacgttttagatccgtttttcttaagtttttagtagaaattacttaaaaaccattgcctaggaaaataaaaatagaacacaaagcttttacctgaggaactgagtactgaaagcagcttagtctcgtgaagcaaaccagcctttgtcgactgtcgtagcgtctgtcctcggttgattgaattgtccagatctgattacgaatatatttatctatccatcggatgaggttggttgcaattcctggttgcacttcttcttcgtctttttcttcttcttctttaaaaataaaataaaatttaaaagtgtggtctcagtggtgttcgtcaatggaggaggaggtgcaggaagaaaatattctaaagaaaatgcttccagctcgtttttactttaatgctattatagtgtgtggtttttacgcttgtttatctccaagctccttgttttggtaatatgacattaacgtcattatgactctttaactaccaactcatacagtataaataccgtagttagctacttatacatgtcgtatacgcttatactactcagattgaccggacgattcgtcaccggctttcgtgtctagggtttaccgacagctctctttttccattgggccctatcataatttatccatcaacagcccaatctttttagcgccacgcataaagcttggctcccttttttggttttttttctcctcgttttaaatgttaaaactaggttgttttacttgtgttttgatatttttaactattgtttgtagtacatgtgtttgattcaatttagtttcatattgccatctttctgcaattctttttttttttaatgtagataagtacataccattgttatgactttttttagtttatgttggtatttataagtagctaggttatgacttgtgtcatatatcatgtgttattacatcatgcctctgttcgagactacgtcgccttcatccatcactactcttcctgtctgtctgatcggaaccgcaactccatcctcttaccttttcccaacctaaaacaaaaagagatgaattttctgttcgaagtgatgttcagagttcatgaattcattaattacatttacgggccagccagaatttggccatttcgcaaattcacctatactaaaacggtgtgaaaggaagaacgaaaaatacaaaggcacaatcttttttaaaaatagatagatatataattatcttcatcacacgtaacgtaatggacctagtaacctatacagcttccatacattgggaaagtaagaagaaaaaacaaataagggacaaagagttacttgaaaagaatttatagttcattttctacacattcaaagatgataaataactccacagcttaaagggaagctttactttacttttagctttctttttttgattttgttttcttctgtaccggaagaattgaaacgatgtgtatgatagatacattggtcttcctcccttcacaaaatggtgcatgtgcagattactgcctttggtgctttatcaaccttcttctctgtttaatcaaaaaccagtattcaactgttagttagctttcatcaacaaacgtcttagtaatcacaaactcactttccacgactttctcaagtttgtgaaaaaacaaattatgcagacaaatctcaaagactggcaaaagttttcagtggggtttacaaggagatgacgaccaataatgaattcaggtattcctttcctcatggcatgctttgctaagcttagagctgatttttgctttatttcacacaaagaacacaccagaaacctaggaat

SEQ ID NO: 623 - DNA, 99688 bp, Arabidopsis thaliana
gaattcttgtgatcttgaacgagtatgaactgagttctccgtctaagaatttgaagactgatagaaaaatgtttatgcttggatactgaaaattcataagtagctcaattttgtcaggatattgcatccacaaaagcattagaaaaataaagacaggaagatccaatagatgcttaattcacctgtgcagactgtgatagcaatcgacaccacgggttctcaaacctactgtgtacatatgtccatctttcaaaacttgccttctcttgcaaaatcgctgttgagtatacaatccaaaccagaaaacaaagacgaattgaaaaaacaatctcaaaaggaatttaaattgggtccaagagcataaagatcgaacaagaataagagcaacggaccttgcgcaacaggtggtggttgcgacgtcgtagcagccgccgcagaggcatcaatctgggagtctccagaggttggagtagtgtcgcctaacacgcatttactagaatccgaaggaggtagtgtatcgccgccatcttccaactgaaacgaaaagtgaaatcgccaaaattgttcaaaccagaagctccagatggcactcgaaagatggataagaaataatgtctccgatcagaaaccttttggcgtttggatggagatttatctgcgggagaagatggagatctcttgccgctgcttccgtcgggcgggttattgttctcgccggaggtagaatcactccgtcccggtgacaccatgactcttctttcttccgattatttcaagagcaagatttgcgattctttgagagttgaagaatcaatgcgagagatgaattttgagagaacgtaacaagaaatgagagagcttatgtaaattggtgtatatataggcctttctcggtgggaaaaaattatagagaaactttgattaatgaaccatacctaaaccaaaccgtttagtattattaggaatcgaattttgtacttaacaaccaaaaccaaaccgatccggttcagttttacccacacctggttttaattttgaaccgcacaaccatccaaattccaaagctagagtctctcagagcgtttttaggtcgaaccagtccttaagggtccgaccaatagaacgtagttgctcgaactcttcttccaaaaatggcgcctcatgaaattcgccgtcctttcaagcgacgacctatctccgatcaacagaaacgccgagagctttctcttattcgtcagactcagcatcgcagtgatgctcagcagcgagcccgaaacctcgcctcttccttaatctcgctccaatcctcctctcccgatgtcgacccagagatactatctgaagccgtgcctgagcttgtaggaaccgaatcggaatcgagtagctttgacgttcgtcaagcttcgaggctcagaggacctgaggcacgcaagtggttcgcaaagcagctaatgttacctgaatggatgatcgacgtccctgataatttaagccaagattggtactgcttctttctcattcttaatccgttgttgctgcttctcttccttcataaatggctgattatgagaattggttggttttttaggtatgtgttagcaagaccagctgggaaaagatgttttgtagtttcatctgatggaacaactgttagtagagtacgaaatgggtccactttgcatcttttcccttctgcattacctggtggtgcgaggaaaaaaggcgcttctggccctgcaaactcgtactctatactagactgtatctttcacgaggtaaaagattcttcattttcactgatttatcgggtttaccctcagttttgatcttactaagaggtgatttgttactgtttttttatgcagtcggatcaaacatactatgtgattgatatggtttgttggagaggttactcgctttatgaatgcacatcagagttcaggttcttttggttgcaatcgaaacttgctgagaccggtgcttgtgatccgccttccgtctaccacaagttcaggttcagtgtagttcctttttacaactgcgaccaaagcggacttcactcagcttatacaggatcattaccttatgtcagggatggattgttattttataacaagtaagtgcatcatttcatctcgcctacttgtaaggtgcctttaagtttactgtgattcccatctttccttctcctgctgtctgcacttgcaaaaagtttgggtgccttaaggtttggagtagcgaatcagttgttttctagtgcaggattattgcaactagcctaggagttatgtagttagttgtagttttgccatctcagcaaaggaccttaagtcgttagtttagagctgaatggtttgaagggatattagggaatgcatttggttatgatggtatagggttttagtttgggcagtagggtcgataaccggggaacctttcgttaaaaaagttcttcagacttaacaatttcgtatcaaaaccattggttatgatgaatgatgattatattagaacgaggacagatcttgtattctctgttttatgaatgttactttataatatcactggttgcttcatactcagtggtagtatcatgatatcaatatctcattggtctagtatttttctttgactctttcccactaaagttcatgtaattattgcagacatgcacattatcatactggaaatactcctctggtgttgatatggaaggatgagagctgtagtcagtatgtcatcgatactgataacaatggagaagttccaaaccaacaacatgtaagtggattttgacagacttttacagctcatggtttttcatacaaagtgtttagtattacactcccatttacaaagtcttaacatatattctctctgtatcttgtaaaaacagattgtcttggagttgcaagaagaaggaaaacttgtaacatctgatgatccacctgtaccattcagttgcttaaatgcagattttgtaaaacaggtctgttcagaatataatggagtggtttatatatcctgatcagcctttaaaccaagattatatgatcagcatttggaaaaattgaaaattgaagaacatatctatatttcttatgatgaatgatgattatattagaaagtggacagatcttgtatcctctgttttatgaatgttactgtataatatcactggttgcttcatactcagtggtagtatctatactgtgtctatgtttgttatagactctatgtactcgtaagttagtgatattgcttagtaatagcttctttgagttctttctaggaccaacagagccctctagcttagtactgctctgtttgttatagactccatgtacccataataacagattgtaaagatgatttcgcactgtgttaatttgctaaatgtgtggttcgtgccatgttggatattacagtcagggctgtcttcaggaagtcttattcgctttgccattggcgatggagggctgaaatgtgtggatggtagatttgagaaggcggatttgcaatatatcggtgtatcaaatcgagcccgagcctttgctgatagctattccaaggtcggtactctctctccttgcatatggcatacgaattttgggagaatcatgcttatgaaattgactcaagcatttacaatccatcttgcagatcatgtttcaatatatggcccgacattctcccctgaaagtagaagatcttgcttctacgatttcacctgaggaccaacaggacaagccccctgaagtggagatgtccgattgacgagaagagagtctaaagtatattgtttggtcactgtgttgtgttcgtggaaacagagggaagtaaattttgaaaaacgtagccacgtttttttggcttctcatatgatgtaagatagtttgttctatgaaaatgagaaaaaataaatcgttacttaaattgtctatagagtaaatccctgcaaattgaagaaatcaacaaatcttgaccaatagaattgcgtaaaaccctgttaaaaaacagttccaagaagctaattgttttgaaggaaaacaatgtaatacaaaaaaatcatccagctgatgtggtgggctcgcagctatcgtgagtgcaagccaaaacatctctgtaatctctagagatgttgaaggagtcatacacttggccagtgctgctcttcttgtactcaaagagcagtgatgagtgatcggaagcagtcaacttcacaaacccaaagtcgtagtctctgaccaaactccatttgggtacaagtgagctaaagggagacaagtgacttcctgcaccaccaacaacaacatggatggttcctttaaaggtccctgagtagtgatccttatcattgttcacacattggctctgcaatagaagaaaaaaagggtaagaaaagagctacatccatgagacgaaaaccgagcaatttaggatgggatcaaacctcgtaaatggggcaggttcgctcatagttatggacatggccgtagaaagcaaggtctactttgtacttctgccacagtttttgtaggctttctcttcccataggctcttcaaaggttccttctttgccataccaatcattggtggaataaccaaggacacgatgagctataaaaatgagccaaggctgagtctttctatcaacagtggcaagacaattctcaatgaatttgtattgctccgtgccttctctccaatcgtgttcactgtctgctacacagaagcgaaacattccataatctgttttgtacctgcccattcaaccgaaatttgtaagataccgttctgaaacttgcaagaaaatgtcaatggtttaactaactttaccagaatttagctctgttctcagcaggaaagtagaacatggtctctgcaggaacaccacactctcctccggagtctgtaccggcataaaaagatccagtgtctggccaatcacgctcatggttgccactgcagtgaagaaaaggataacttaaagcactgcaagagtagagagtagaagcacaatgttgtagattttcttgttgactaacctggcgatcatgtagggtacagtagaagcaatgggctggacttgagctgtgaactgatcccactgggagagatacccattggaataagtgagatctccaatgtggaaaacaatgtcaatgtccttcaagtccttgatgacttggtctgttgtgttgagggaaccaggctggtaatcattgtactcattcgagccatctcgctcaccctgaaacatatttcaatcaaggaaaatcattttagatattagtctgagagcgcatggagatcataatggcctaaaagagacgataccatacctttcccatgtcaccaaatattatgacccgttgtttcgagtcttgtccaggataaggagaggacacaaaggtgtaattcttgctccaaattgtggaaccattgaccaagtcatggcctagcctgtatatgtatctgtaaaccaaaggattgagagttacatgtatgaaactatattagtgctcctggattagacgataaagaagcaaactaaagatttcatactcgcggtttggccaaagttctttcaagaaagaagtatggaagaaaccaggatcacgccaaccaacgccgcgagcaggattacctgtgtaaacatagcatgcatccacaaatcaaatctctagaatgatccagatgagtagtttcagatattccaggactgctggctcagagatcacagcgaaacaggacataccacacatgctgtttctgttaaaggtcaatgttccagctggtgatcttctagctggaagtccctttgcactccattcaatgaaaggaacagcctcatctatgttgtacccactagtccatgtcacggtcatctatcaaagatagaaaaataagcaagttttagctaaagatcccaaatattgtatagctgcttcagaagtctcaaggccattgagtggaaaaacttacttcgtcccaattcttccctaatgcaagacgcggatagacaggtgctttaggattgaagaaagctacaggattcgaaaccccgagaaggtgtggctgtgatattcaaaagatcaataattaagtccacttgatatacaaaatactaaactgagaaaaactatagttataacctacctcttgaactccattggaaaacagtgcaaaggagacatcagctctctgatttataatctggaacttgagagtcacattcccggacttcatgtaatctggatgagaattacaatacatgtactgccaaatagaaattaaaaggggaatgttacaccgggacttaaaaaaaaaaaaaaaatcactggtaaatatgtaataaaccaaaccttgatgggagaagagcatatgtaaggagttttctctttgccaccacttgttggccaacagttacccgaactaacaaacaacaaagacaagttaataatgcacaaatggcacgttcacaagttaacaaacacagatgcagattagaaaaaatactcgaattttgctggagagaaaactcctatccaatcatctgaagtgggcttggggttggagatagcaagatttacccattctgtatcttcaccctgtaagatcaaagtcatgacatcaataacatatctatttaagtttggtttttgtgataattacgtgaaatcaagaaaacatattcaagtctatcatacaatttttttgacatttaaaaaaaccatctcttaagagttaatatatatctgtcaaacaagaatctgacaagaacaataatatgatgaaagaatttgttattggaacctgggaaccaagaacttgaggcgaagcgtgaagtttgacagaactatctaaagcaagacttgtttcgtaaacattaatttgagcaagtgcttgatctccacgaccattggcatgatccaaacataagctcgagctgaacagtgcgagtaaacacagaagcacacctaaaactctagccatatttttttttgtttttcctttgttgtgactgagaaacaaaaccagaaaggtatatatatatatattataatcaggatatatctaggaatcccaaaattgattcatgtctatcgaattaaacaaaatcaaatattttctttcaccgtcaaatctttagtcaggaatattctaacagtttctttttaatattctaacagttttttcttaatgatagttcatactgttttaaaaacaaataatgataacggaaaaaacggattttcgttttattcagacttatgtacattaggctgatccgggtcggaccggctttgaaccggaaattaataaagcttgattgttaaatttggcaaccgtggcttcggtttcaatcgcgctgtaatcgcatcactaattcgggtcactttggaaagaaagaagaagaagatgaagaaaccatcgaaaaagagcgaaatcgagttctgcacggtgtgccggtttcatcacgaccaaggctcgcgccacaagtacttccctcgccacaaaagttccctctcttccttactcgatcgattcagatcgaagatagctgacgtcagattcttcctgaagaaccctagcgttctacggccacaagagcagtcgcaaaaccgtgtttggtgtgtcttctgcgatgaggacattgttgagctcggtagctccttcgcctggtatgccattccgttttctctttcctctcgatttgtgactgtttgtttgatttgggttcattgttgtgcgaacattagtagctgtgttactttatttgaatgtagaatcagagtgcgcaagagttgattgaaactgtgctagaaaactgggattgtatctaaactgatgcgtcttctgatgataattgatttatttgactgcacataatactttgtttggaaactttgtatcagttctaaggctatcaatcacttcgcaagttccgatcatcttaagaatatcaagcaatttctgtcgaaaaatggcccggcaatggattgcatagacgagttccgaatttcagaagctgatgtagctaaggtatgcactatttacttgaatattatgctcttctgtttttacagatctcaattgcaacctttgcggtttaagagtgtagccatgttattcgttgaaatctctaatgaaattctattcatgctggatgcagtgggagaaaaaatgtcagtcatttggaaatgaagatgcatcttttgaagggtcctgtggacagctgtctgggacatctaatgatatccacactaaacttgcgtttgaaactatggatagaattaaaaaagttcctgcacaccatataaattcatataaatcaaatgatgttatgcctttacagtataatacgaatgagtatcagatatcactttcagagattcctggagttatacataatggttcatatctgaacatggatgattcccaattccctctatgtgatgaatcaggtatttttggttgattccgacctccacaatttgtcagtttccaagtgtttacaagttgtgtataatagtctctaactctctataattatattttctagggaacgggtttggcgaacattccattccttgtagaagcaaggactactcgggcaacggtaattattgcacccaagaggtgggtttcagtcatagtaacattgatattctgataatctggttatggtgcatctatatgacgcttcctgttagtttcatcatgaggattctttggctcagaattttggttataggctagtttttctaaagtttatggtcttaagtattccttggttcaggaatttcttatgtgttatatgcgtaatttgcacatcaaaaaaattcttctatatatgagaggttttttaggcagaatgaattttattaaagtttggggtaagaaatacttttgtgtgttgtttttatcatcaaagttccttcactgtttggctatctttttccatgtgttcaactacatcatacctccagagctatctcattggctaagtccaaacttttataaaagagcctgtgactgacattgtcttcatctagaattatcaggtgagccaagataagaaacaaattgatggctcttacaatcctccaggtaggcctctgctttcaaatttgatctgcgttgtgttaatttcatgattagggctttatcgtctaggtctatgaatttcattaacgtagccaatcttatatgcactacttttaatggcatgggttttatttttttcaggtgtggtgggaatgactagcatttcgtcctcacattccactgatgctggcgggaacgttcactctggagctcctccaccttggcttgatgcaaatgatggggatttttctagtgttcaactaaaccaatcagatgtggcccgctttcaggcaaaggtacctggaaagaatcgtaagctgaatcctaatagggttggcgctgcatgggctgaaaggagaaagatagagatagaaatggagaagagtggacatgtaacgaagagtaacattgatccagactggcttcccaactttggtcgggtttggcaatcaggcactagaaaagaatccaggaaagaatttgagaaggaaaaacggaagttagtgaaaactgaaagcatctctacagaatcagaaccagtcaaaatacaaccgtacattagcaaacgggcggtaagtttttacctttgctcatgttgaattataaatgactactggtctcatgtcatttgatattttttctacttctcaaacgtatttgtttggattgatattccttttagcgacatatcatgtggtttccttttatactcaacataaaaggatacatattgctttgttgctactgttttaaatttagttcgagaaatacttttcagtggtcttatgtatatacattaattgtgattgcagcgaagagagagtggtgagtaatggcggtggctgacatccaaaatggcaactagtaaggattatctcatgtaggaattttataatcctcgtttcctggagatcctactccaatgtatcttgttttcatgttgagctatgatagaatttagaagtatgtgatcctgggactcctttcaagtagtgtaaaaaatggataaaattttgtttttggtacgagagattttaaagggttaaagttttacgtagcttatgcagtaataaaatatagcatggagaaggcctttctccactatctgatcttcctttgggttcttcatcttaagaaagatctaaatcttttcatctgatgtttctttttctgggggagataaagtgaaataactttgttgtgtggttcatagattgtggccatctcaacaaactgtatctattttctagttggatacacatatttagaatgacatttgtacactaaattactttaattcgaatatttccctacggtggtatgagattaagacacagtagtgtgtagaactaagggagtaacattgttgctcttgattaaatgtacaaaatttagctattatctgatgatgactgtttctggtgagcaaaacctggatgcatttgattgacgcttgatcctaaacttccagaaggttcctttagctgaaaccagattctcctggcacaagaactcccaggagagccacttttcagctgtcctgtgcacatcatgcacgaaaacatctgttgttgagttgctacttccttttcttgctaacacagctgcagtatatatactccccatcctacctggtgtctctaagtcatctccacgggggccatcaacaactatcacatcccatttggtattgtgtacctgctgtggcaaatccctcagttccagtttgcagtctgatgagccttgatgttgattattcatatttggtgcacatgcgggattagctcgagcatgttgaagcagattgtaagcatttcttacttccatctgatggtactttaagctgtagattcttgtgttgtttggatttacttcagcttttggtatcattatctttgcaggttcatcttccagaatgacggtaatacctctagtgttgattgaagataacatgaggtattgaggtgcaaacccgaaaacaagaatgttgcatggggatctacgagtaacggtatctgataagagcttcagttccttttccatgagagcggttgggccctcattagccctgagctgctgactggaatcagctggactcaagcgaaatgtggttgaagatgaggactgggacttagaagaagacttgtatgaaatccggaggagtcggagaacagagaggcttgatagaacgaaaataagaagaggtatgagcttacgtacagtgaatttaggcatcttaatcgttgataacctctggtgtttgggattatcaggggaggaaggaggtgagaacctgagtagaggattgagaatagaaagggaagattgatgaaattgcggaggcattattactattctcacctctctttcaatatcatccggttctcaaaagagtcaagcttttggttttaaatgtcatcaaattatgtgtttatgtcatcttcgagtgaataacaaggaaaagtcgtattgcttctgttccaagatgctctcttttttccttttcttgttgtcatgtcatttgcttgttagtttggatttacctaatatcatgattattatttttcaatttgtcatgtcactggagtagcaaataatagaaacaaacgtgtattaactattaagtgattgcgatggactgaacaagtttggtaagttaatttgtccatgaaactcttcaaagagtggtgattacaaggcaaaagtcttaataagagtaaaactaggagcgatgctttgttttttaaagcctcacatttatcctcagtaagatttaggtaaacagttctgggatctctccatttagagagaaaaaaaacacagcttctcttgattgccaagacgaacaatatatggtttgaaactttgaattgttgtgtcaacttaaataggcccttgaggtttttactttgtaagtttcatcaccacaactaagggtatagcctcatccaccttcaccaaaactttcaaatttctaacggaacagtgaaataaacagtgacatacattaaacagaaagaaaattactagagattgatcccaaatgtgtggttaaactaggttcacaaaatgtttcctctttttgagtatctgaacaagaaaaaagaaaaaaactgtgaagtgtcttcatgaaaacaacaaagctgtaactacccttctccatcttttatcttccctttgttatctgcaaacatgtcaaacaaaactttagaagaggagttccaaaattacaaggacataataaaaaaaacttttactatgaaagtctccaattcatctctatcatccacactctcttctattatgcatattcccttaacatgccaatgcaatgttcatgatccaatcacaagtctatcagcagttcagaacaaaactccttacaacaattttcttttcaccaccaaatttcaaagactatcataggaacaaattgttcccaaacttatctgtcagtgcatgctacacacaaaagccaattcaagttcaatgagtaatccaggatatgtaaaatgcaataacttattttgtatctacagattgaaatctccgaaaaatattcactgtttaagagatgtagagatagatcaaaaacaatcttaagttatactatactacatgaagtagcttaaccaattgaaaaagtatgaaaatgatcaatgcatggctggaaaaagaagagattggtgaagagaaatcacctaagtagcaccgacgatgatgttgttgattggaataaagatgagcttcacaaagaatcccacgaatcccattactacgaacccgattgctgtacggactgcaactttcgtgaattctacaaacaacagaaacaacagaatcaaacacggatctctcctcattcacagatcttcccatactcaaacaattcatatagatccagctgatcagacgattaaaagacacagatctaaagacaagaatttcgagctaaaataggaaaatccgttgaccgatctcgttgaattcgtgggataagaggaaggatgtaatacctttgcgatctggcttatgacaacgcttaacgaggcgaatgctgtccttggcaaagtctctaagaggatccacgacggaatcaatggcgtccatgtcccttcttttttttttttttttttgtgtgtttcgtttttattatttgttctgaatgaaaaacaaattgtgagtcttcggaaaaattacggcaaagaagatatatagaaaaagagagagagagggaacgtcacatggatattgaagaaccaatcacagaccgatcctccacggagttgtgccatgtcagcaaagtcaaaactatagtgggctcgcgttgctttttttgaccaaagcccattttaaacggctatggcactaggcactagctgagtaacattcccttcttgatcttggataacatcaggttttggtgagttttaaaatgattttaaaattttagtgatttcaaatgaatgaatatatagaaattgatatgatttttaaaagctttttgagattttcaatcaaaaccatagatctataacatgtacacacctttgtgttttgagtcaaaatattcctatatacacctaaccatttaaaagacaagtcaagatcaagtacaccagaataaccttgagagacgtgtacatctataaccaagaataccagatatcattggacttttaacattcatggattgtatacatagaatttgtccttttaacacaaaatcattaattctaaaagatgtggttgaatacactcctctcccttgacattggtacaatataacatttggaaattgtaacacacatcacctagctcctcaattgaaaaagttgtatagctttctttggttctcaaaggacaaacacaaactcatattaatgtctcaagtagtagtaagttggaaagtgatgaacaaaatatacattacttgcaatttattccatagattcaaaggtaggagcataccaaccaagctgatcgatgagcttcttcaacctctcttcttgtcccttggagtctccaaaagcagtggtgaaaggatacacaaaggtaaccttagtggccatacacctgtaagcaaccacatcttgcttcaccaaaaactccatcacatctctgctaaatcctcctccttctacctctgcctccacatacctccctgcaaatgcaattgtgtgtgatctttcctcaaatccttggtgggaatcatttaaaaatccaattgtggtgagaaataatttaccatagggagtatcttcaagaaccacaaacttggggttcttctgggtgctcattattgcttctttcagtttctgcgttgaacaaataatcagaaacgatgctaaattgatgaagataggaggaaatatacctcaatgggatcctgtgtatcggtttctgggatcgtcaatggaaaagagaaggaagatgaggttggattcgtcgatacacatcctgggttcgtggaagggcaaggcctaattttgctacaaaaaaaagagagtaataaagattagctttgtttagagagcagaaatcagagtgagaagaggaacaaacccattgagaagaccggtctggacgaacttggattgggtgaaaggagtggtgagtggctgagaagaggagagagaaggaatggctaaggcaggggaaaaggaagttagagagatagcaagagcaaaagagattagttttggtaaaagagagattggaggagaagtagaagagagttcttgttcttgttttgggctttgcaatgagcacaacaacttggtgcttctcggccgtggcgggaggatgagttgcaaactggcgaccaaactcatgtttgtagtttatggttactctcttctcctccaaatattattaatatataagtgtctcaaaacgctttactgaaatgaaaattaattaaaattgttttttttttttattgtatgtttgaacttttaaattttagttgactacaaattccataatgtcccgatataaaatgtgagatgtgttcttgtttgaccacaataaaaacactatgagattggtagaaaattatcaagaaatagagtttcacccaataccaatagcgtttcacctagttttcatcatcctattacaaaaattcgatggtaaattacaagcggcaaagttcaatgtaactaatgatacaccgatacacgtaacatgttcattgaatgtttcattaaaccaacaaaaaactattgactcatgccactagaaaaattaccaccgaattaaattaaagagagcgagaggcaaatgaaacgatagaaaataagacgttcaatggtcttgagagaattaaatatgtttctttatattcaccagtgtttgaacatttgcagaattgtgcagagaaaggactaaaggagaatgaacaacattttattggacaaggaaactctattttcacgatttcgcaggtatgtctttttataatattacttatttcataatattttgatatagatgattactcaaacaaaagaggtgaaaactcttgtaaattttcagtatttaacctgcaaaacagatactacttttttacttgatttatcaaaccaaagttaagacttacaaaagcaccggtgacaatccgacattgttgccatgcaaagactcaaaccaatttgaccgtcgacgcttttttagtatttcaaaaatatttttatcaattcatgaattatgattattgccaaacatcgattcagtggagactaggtttatgaattatgaccgtagaacatatgaaaactgtgtaaaactattgtataatttatgtattaaattttgtattaatcaactgatatgcggtcggaccggatccaaccggcgatcgaaacataccatttatattttttctttttctattttactagaaataaaataaatagaaacctccgttgcttttttggcaaacactgtgagagagttgaccaaaatcgacccagtgggaggactaggtttatcgaaagctccagttttcatagataaatccagtaaaattatacacgcaaattctagtttcttagagcaaagctttgttgaattgatagcttgaatttgggaatggacggagaagagcttaccgagcaggagactgccttgtacgaccgccagattagggtttggggcgctaatgctcagagaaggttactttctcatccccttgttcttttcaacactcaatcttgttttcacttttctaaatttaagtgcttttaagctgcatcatctcaattatgatttgagtcggctttgagtactaaactcttactatttggccattttaggagaatgcttaatggtcccttcttaaatgcggatttagatcattaaaattgtatttttttttgcttctcctccattcgattactttctcttggcttcagttttggtttttatttgtttgtctttgtcttaagagaattttagttaatacctattattggtttagcgtttggattctgcttctagactagtgcattcctaattatgagctcccttaggttgttctgagatgagagttttgttttttaactattaagattgatgtattcattcatattttgctttttgctgaagcttattttattgatacactacactaccatgtaattactctgtaagcttggcacgatttgatatagtgtgaggttggtgttttgccttgcagattgaccaaagctcatatcttggtatctggaattaaggggactgttgctgaggtagctgtaactctataattcatgctgagatgtcatgcttttcaattagtttaatctaatggtatcttactgcatttcctggctttgtttccatttggtgggttagttttgcaagaacattgtgctggcaggagttggttcagtgactttaatggatgatcgtttagcaaacatggaggccttgaacgctaactttttgattccgcctgatgaaaatgtttacagtggcaaaactgtggctgagatttgtagtgattcactcaaggatttcaaccctatggtccgtgtttccgtagagaaaggtttccctctaatacctctccgttaatgttttaaaaacataccgactattatctgatcaatttttcaaatctttcaggtgatttgtcaatgcttggcactgatttttttgagcagtttgatgtcgtagttataggctatggttctcgtgctaccaaagtatttataccaccttttacatatttaccacttgctttcatctttagttgctccatacatctcttcatgacgttgtctgtttattttttgcagaaatatgtcaatgaaaaatgtcggaagttaaagaaacgtgtcgcattctatacagtcgattgtagagactcatgtggtgaaatctttgtggacctccaagattacaagtacacaaaggtacttgcatgatttgttgttgcatttcttctgttgattatgtgctgttttgacatttcatctggcttatttttaaatttctataattccattgaacatttaaacttcattaacaacttctaatttgcacaatgtcctttgtattgttttcctgataattttctttccacagaaaaagcttgaagagatggtggaatgcgaactaaattttccaagttttcaggtacaatttaacactagttctcgctactaataatccttacatctgcataggattttgtgataaattagatttgtttattgccacaggaagctatatcggtaccatggaaaccgattcctcggagaacagcaaagctctactttgctatgagaggtagttactagttactacagctgatttctttattactttccacaaatgaaaattgagatcccaaggcagatacatacaacaaaaattcttcactaatctttggcattctcatgaaattttcagtaatagaagtgtttgaagagagtgaagggcgtaaacatggagaatgttcgctactcgatcttgccagagtcttggaaatcaaaaagcaactctgtgaggcaaacgtaagtgtgtttagttgttttatcattatttagaaatgtcactgccaggttcactgaataactgaatattgtctctcagtctgtgagcgagagccatataccagatattctcttggagagacttatcactggtactactgaattcccgccagtttgtgccattgtgggaggaatattagcacaggttctctctctctcactttcactctcttatcgcattcgaatcttctcactagaaacttgtaatttgacaagaaagattttttgatgtggcaggaggtgatcaaagcagtatcaggcaaaggagacccgttgaaaaacttcttctactatgatggtgaagatgggaaaggtgtgatggaagacatttccgactcttttacctcttaaacaaccagtgggccttgatttagtttaaactctataatctctgagattccatgtatatctcaatcgtttgttttttgccttcacattatgaacaaatttaatgcagaatttagtggaggatcagttgtgattttccttcggtaaaatcattttcagttattgacatttgaattgttcaatttcaaatttcaaatattataattcaattcaaagactagctaagtttttaaaagtaattagtgagagatctcacagtgatataaaccacattcattttaattcatagcaaagtaaatggtaagaaatgaaaatggaagaaagagaggagagtagttcacacgaacatctgaaggagaagttgagagagcttgaggaggaatggacagccatgaaaacaggtaaaaactcatctgcggtttcatggattaccgtggaagatgctcttgagtatgtcgaaaactctcccagaaacctaatgctctctctccaacacaaaccaaaggcagagatgatacaagaaatatcgccattaaggagaaaactctttcacgactctgatgatgatgatcaaactaagaagacgacattgctttctcattcatcttgttggtcttcgaatgtgacgagttcgagtgataccacgaaagcaaagaagaagacaacgattagaagatttgtttctgttacaatggtgctgcttttgtcatgggttttagttgtgttgatgaaccactttgatcatctctccatgaatacacaaatcattactttggttcctacttgatatttttatttattttggtttgagaatgttcatcaatctcaataaataaaaaaagtttagttttgtattattacctctcgccttctcttttaattcattgaacctcttcaactttggctgtaactatgttggttaaaacagtataagtaatgtatgtatttatggttttaggaaaatcttacaaaataatactctatcattggatgaagaagcaaaaactacacccctctacatcttttctattcataaacttttttggggaaagaactacattggtggtgattaggtgcatcggtgacactaatgttgaaaatatgttttgtgtaaaattagtatggttaaagctaatcatttagttgagcaaaaaaagatgctaatcatttaaatagaaaatggactcaaacaaaagaaggccacacattcaattgttacatctttattgggttttcatttttggaagctatttttatgaatttgcagtgttttgttgcccaaaagaaaaaaagcataattccaagtatatctttcattttgaatccatcagtcatatgttttacttgaatcaactatttgttgggttttacgaagttacttgttaagaagattcaaaatatatataattagactatcaaaggaacaaaagaatgtaattgggtcataactttttccgaagcttacgtgacttgggagaaaatcaaacccattagtttcacccttaatcaaactaatcacaaattttgaactttgcaaagaaggtaaaataataatcagcaaaaagattaataaaatgacaaaagtatctctttaaaagattaataaagaaataaagaaatgacataagctctcaccgaccgacgtcttgtcttttttattcttaaggtcggtgccatgtcgacgccttcaagcttagaatctcgccacgtgtgggataaactaaccgaacccaatcgaaccagacagaccaaagacagaccagaccggactagttgtatgtcggcatcagcgttctagtacgacgttaattaaaaaaataaaaataaaatattatttatgatattccaccaataagagccaatgaaaagtgtgtgaaccaaccaacttctgtagcaaaccgtaccatttctctcttagatacctttaccttccttctataaattaggttcttcctttcacatttctttgtcttcttcttctacataaaattgattcgcctcgaaatttacacagacttgtcgctctctctttctctcttatttcacagagcccctaaacatttccaaaaatcttgcaaaggaagaaaaacaatggacaaattttggactttcctcactgctcttcattcaggcgctgggtaattattcttaatcttaattttccttccattatgtttccaaaattagttactttttgatttcctctgtttcgatttctaatccaaaccgtaatcgatttgttggtaatgtatatgcaggcctatcgtgatgttactttatccattgtaagtttctctcttgttaaaccctttaacaaaagaaaaagtttctttctggttcgatctctctactttttgttgaagattaaaaacaaaaatctgtgaatatttactaattatgtttttgattacaggtacgcatcggtgatagcaatggagagcacaacaaaagtggacgatgaacagtggcttgcgtattggataatatattcgttcctctcactcacggaactgattctgcaatcgcttattgagtggattccgatttggtatacggtgaaacttgtgttcgtggcttggctagttcttcctcagtttcaaggcgcagcttttatctacaaccgtgttgttagagaacagttcaagaaacacggcgtcctccgctccacccactccaagcccaccaagcccaacatcctccactccattttcccccaccgggtaaattttttatctttttggttttgagattcataaagcaaaaaaaaaaagtaaaagtaaccattagttttagtattctttggtgggtcaaagaacgaatctttgtttataaagattaataatgcattgaatatagtcctaggaaacgtaagagtgtgcctaattctctaacgtagcgaccatgagcgtataacaagtgttttgtatacttttgttaattctttaattcgtttttaaattaattgtgaattttaaaatgtgatataggagggacacgaggctcacagtcactgaatcagaagggtggagcagacagaagaagcctgactagtattattgtaatggtcttggtggtggtcccatcatgtccctgtctaatctactttttactttatttttatttatcacaaaaaatgggtttaggaatgttgatgatgatgactgatgaggtgtgtaatcgtttttaaattagaaaatggcttcttctgcttgtatgattgtatcgctaatcttccacgcgtatttctttaatgtcaacgctaataatttccaattgtgtcccttcttgaacttatcatacatattttgatgacgcaaatatctcaccgaatcaaacccataacagtatatccctttttttggggcctaaaaccaaaattgaagtgaggcttacagagttagaacgcaatttaaaccagtgactaatgttttgattggttctccctctgccacctgcaaacgctgcgtttgcgggtggtagcggttgttagcgtttgacactaatcatagaaaccgctagataccgttttggaccgcttgaaatcgccagatttcaaaagcttcttcccgtaagcgtttgcggttgcgggcggtagcggttaggttaatttttttttttaattaattaaaataattatatcttccatccaaaccctatatattttattcttatcagaaaaccctaatcaatatattgaaaccctattttctcaattatggcatctacccaaactaacgaaaatcaaaatcaaaatcaaaaatcaaacgtaagtatgatctatcctttcatccattcattagctagtgtaattctctgagtatttcatggcatcgtcattttttttattttgtatttttttgagtttttttattgaatatatgttttgatttgttttctcgattagaaaattatttggtcagacgagatgacccgtttcttgttagaactttatcatatgtatagaggcaatccggaaaatccacgagttcaacgttatttacagtttattacactacttgatgcaatttttggtgatgtaccaaatgcataaagtactaagctttttcttacaaaatttatttatttttgaatttaatgttttatttatggttttaattattaagcatgtttaattttctaatattatcaatttatcataataatatattgtattttttcttttaaaattaatatattatatttattttggttattttttatttaattactatcgcactcgctgatttaccagtcataaaacttccgtaaacgcacccattatcaaacgctcaaccagtcgttcaaaacgcttgataatgcttgaaaccgcaaccgcctgtttccgcaaactcccgcaaccgcaaccgcaattgattaatgatttatgttacacggttttgaagcaagcatgaattatatcacatgtataatattcttacacatactcttagattgaagtaaagaactagtaccaatcaattcctctaagagaaacctaagttagctatacaatggaacacacaaggccaacttcaattatgcattttaagtttttaaccaaaccacacacgcaaaaaaacttaaagatcagactaacacaattcactgttattagctacacaacttgagaagaagaaacagagtgaacaaacaatggactaacgaatgaagtatacaattaaaacaagagatctaactcgaacagaagtttctttaccatttgtcagcttttccacagctaatgtttatcccaaaagacaagaaactgaaaaacttcaacagacaatgaaagagaagattcgttagggttttattttgtctatgggccgtctattgtgtgatccataagaattagttgtgtaaaatcaattataattgagcttacaatttaaacggtccatcttctcaactaacataataatttaaaaaaaaaactagaaaagcctctcaagtcttaagtcaactttgttcctccttctctgaagagatatataatactctttttttctttcccaatatttttcgatttcttcatcattcattcgcgcaaacattccaaaagttttctcttttcaactagtcaatagtcaatactttaaattcatcatcacttttgcttttcaactctttcatcttcttgtccaaattttctattaatggacaacagtattcacgtgaagcgagagattcaacttccatctacttctccggctggctttccggggagagaatctgtaactgtagtcgatctctgtagtagtgatgacgactccgacattggagaagtcgccggtggattagagaaagtaggaaacaacttcgtcggtctgaagagaggacgagatacttttggaggttcttccgaagtggataggaataatgtgaagaaggtaacaacacttgctgagttaggagttgggttaccggaaggattcggccaatcgaatccaccggaaagtttgacgcatcctattcctgcgaatccgtgtaatgtcttcaggcctgtaccgccgccgccgccgccaccgtatgccggcacgtctgggaagattggcggttgtaagcagttttggaaagctggagattatgaaggagcagctggcgataactgggatctttcttcaggtaaaccaaattttaattttattcattagacagtaatgtggaatgttggtcggaacaaaacttttgagtgttacaatttgtgtctcaggtggttttgatcatgtaagagtccatccaaagtttttgcattctaatgcaactagtcacaaatgggctcttggaggtattattcttattggtcaacctttatatgagcgagtttgcctctatttttttgagcttatctgagttctcttatgcagcttttgcagagcttttggacaatgccttggatgaggtaggtttttgtttctttacttgtcttagacagattgtatgatgtgtagtaatggtttctctcgttgatatcaggttgccagtggagctacttatgttaaagtagacatgctagaaaacaacaaagggggaaacaggatgttattaattgaaggtatacactttacctagcaattcttaaagaacctcttccctaatttattcatgtggttattggttgcctaaaatgcaacacttttgtccactcatgtactacgagaatccttatgttttgaactgcagataacgggggtgggatggaccctgaaaaaatgcgacaatgcatgtctctaggatactctgcaaaaagcaaacttgcaaacaccattggacaatgtaattattctttgtttatccgacttatatcgaaagtttgcaggaagatgcttaatttatttactgcttatagatggcaatgggtttaagactagtacaatgagacttggagctgatgttattgttttctcgcgttgccctgggaaagatggaaagaggttagttgtttattatcaatgtgttacacctttcggctatcatgtcttttatcatttttgttggattgtatttcattcccgaagaatatgaacaatagttgaagttataatttttggttaatagataatttacttgatgttggttttagctctacgcagagcatcggactcctatcatatacatttctaaggagcacaggaaaggaggacattgttgttcccatggtaatcgttctttgtttcatttatggcattgttagagaacaacttcatgctctattatgagttgtattctgatatgaaattccattcaattgcttggttcaacaacatgattcttctaatctttggttaacatgggattcagtggcacgtatcagctggttacgtgtacactatttattgcaatctttgttcagtgttagaggaagtgtgaagcactaatatgtcttatgtccacaacgtatactttctaatttaaaagaattttgtattcattatatccttatattctcttgttatgtgatttaaaatgacagcttgactatgaaagaagggaccctgaatggagtaaaataatccggtcttccacgagagattgggataaaaatgtggaaacaataattcaatggtcgccattctctagtgaagaagatcttcttcatcaggtatattttccctttgttcaaagcagttgcttaatcacttattcatactaagaaattttgcatgagagcgtctaagctatttgatcttcttttattctgtcactcctttgatatgggttccatctattaccacccctttactgtctctgtgaacaaacgttatcactaaatttttgcttcatttgttgtagtttgatctgatgaaggatcgtggcacacggataatcatatataacctgtgggaagatgatcaagggatgttagaactcgattttgatgctgatccttatgtatgtgtttttattcctcaatgtttgtggcttattgtgtgagataatgcctatgaacttttatggataaaatattgtttatctgcaggatatccaactaagaggtgtcaatcgggaagaaagaaacatcaaaatggcttctcagtttcctaattctaggcacttcctgacatacaaacactcactaagggtataaactcttattttccattatcttttgtttgttgttgtagataataaatacccaggaagatgttattaccaaattagctatagacagtcttatgctagttaggactgtaaatttgtaatgtacttgaaggtttcgtactttgatgtgatagtggggaataataaaaaagcttgaataggaatattattgtgaattgtgttcgaatagactgcttgtccttgtattctacaagttcgtttctcacatcctttcgacatgttcccagagttatgtatcaatcctctacctaagaattccacctgggtttcgtatcattctacggggaatagatgtcgagcaccacagcgtagtgaatgacatgatgcagactgagcagatcacatatcgaccacagtctgaatcatatggagttgtgacaaatgtaagttttaataacttttctttatacaagccttcttatagttctttttttatttacagaccatgatcttctagctataatataaagctggtattgtgcacaactttcttttatcagatgtctgccattgtaattattggatttgtgaaggacgcaaaacatcatgttgatgttcaaggctttaatgtctaccacaaaaatcggctcatcaaggtttgcttctacttgaatcatgttttgcttgcctaaactctccatactaggcctttgattttcaagataaacagcggatttcatattcttgtgtatttcttattaacttgtgttatcagccattttggaggatatggaatgcaacaggcagtgatggtcgtggggtcataggtattgtttttacatggaaattctattactttgttcacttactttatgtgaagatcacagtgctagtttcctctgctaataggtgttctggaagctaattttgttgagcctgctcatgataagcaagggtttgagcgtacaacagttctcgctagacttgagtcacggctagttcaaatgcagaagacttactggtctgactgttttctcatgttgttttaaaatccaatatccttaagcctggaatggatgtttcagggataataacattccattccttgttgatcaggagtacgaactgtcacaaaattggctatgcgcccaggcgacgtgaaaagtctgcatatggttatgataacagaggtatagtgcctttatttgtttttgtaacgtccatacaacatttccaggagattttacttgtagggaacaatgtttttctggatgttagactcatcaccagaaaatgatcgtgagggaccatcaagcatcaaaactcctactccagcttctgacaagttctactcaagctcatatccaaatcataatggggacaacggtgtatctgggaaagatggtgcacgggtaaatactcccaccaaaatctcaaaccaaaacgatctcttcattgtaatagatctctcattttttctttggtactctcagttgcaagaggagctgcggcgtgaaaaggagcgtaggaaggcacttgaagttgaggtaaggtcttactttctgacattttaaatctctacagcttctttgcaagcctgatggattcctggttaatttaggttcaattatcaagacaaaaaatagaagaaatgaagaaagagcaagagaatctgattgagatattctcagaggaaagagaccgacgtgatggggaggaagaagttttgagaaataagctagaggttcctcattcattaaactaacctttctcctttgactcgtctgattatcatttgaaggcttaccttaaataaaactaaaacatttcattgcaggaagcgtcgaacacgatcgatgatctgttgaataagataaaaaagatggagggatctaaagtcccgagctggagacattaaacatagagcttgcatatatttggaggttagattacaagacgagattccatgtgtaacctaattgattaataaggcatctctatttatttgtgactcgacctgatctgatccgggtgggatacaacatgttgtagattagtgttattgataggaaatttgtaacatctctaaatgtttttgacctatgattgttttttttccttacaaacttataccattcccatagccttagcatctgccattgcagtaacattaacgatttccatgtgaaaaacaaccaattttagcaataatttgggttgactttgtcgagatcttggctcaattatatatattcataccattactatataagaactgatgtcttgtttatttgatgtcagacgcctgagaggtttcaaagtttttaaaaaaaaaaatttttaaagagaagcgtgtgtggctttaaataaggtcaactaggaaatgggaatcattcaacaagaagaaaaatgacaaaatgaaatatgaatgaagaggaggagggggtcgagaaaggttgagagaagcagaccaaagctctgcaaaactctgttttattaatgacacattgtgctctgtctgtcaaaagcaatgccttctttctagtgcatttattgcccattcccaaacaaaatatacaaataagtgtaaggatgcatgatatagtttaaaaaactatttgaaatgctcacattctttttgaacttctcttttaaatttgcaaaaaaaaattatatttttttgttccaaaaactgcaagcaaatgttgatacgaacgagccaacttgtcattttatgaccttgttttatctctgccagtcaaataactctttccgttttcgcttttttggcttacttcttactctgttggtttgccttttgtttggccttactttcgtttataggaatcgaatttcaatgttttatctttcctgtcgaaattaaattggtctttctaataaatctcatttttttctttttcaaagatttgtttatttagtgaacaaattcttaagagagtttttttccccaagcaattgaaaatgaatcatgtaatgttgatttttttggtgcaagtttatatagtttgctagaaatttggccttcatacgatatttgaacattttgatataagatttctatcagaagacagaagctacacgattgattcagccagagaaaacaaaagttgaaccgaacgattaaacccacacacaaaaaaaaacaaatagaataagaatgaaggagaaggaatataaaaatgggtacaagaaaaaacatcatcgtcgcaatcataaatgcaattgaaggcgcgtggaaaagagactcgtgtgcttctgatactcccacgtgaggatgtgacaatttaatattacgaattcaataattacccaatctttcttaatctgttaatttatctaagccaatcattcattcctttcacacccgccacggtgtcaatccaaattttttagaatcaccaaattacacctttacccttatattgtttttaatttgtttccgaattttaccaactgtttcaataaaacgtaccaacccatttctggttggatacaagcgggattcattcctatataacatttttaacggtatcattcaatcataccggtccaatttatttctatcatgctatctatataacattttcttacaaaatgtctttctctataccttttcacattcgaaacttcaaaagttaatgtgtcaatttaattacgcataactcgaaaaatgcattttaaaacaattaaaattaaatttatcttaatttgacgttataaaaaaatattgaatatatttccgagaaataataataagagaaaggactataaatacgtctctagtgtgtaatgtgtaacacagacgagagtcctcaaatccattttctctctctatctctctttatcccttcgtcttcttcctcggcgacaccacttgcaggcgctaactcgacgaagaaggaaaaggtgagagaaactctctgaaaactgtacggatttaaacgtatatatgtgtgtatgtatacgaatctgatggtttagttttctggatttttctccattctctgttgattctactttttttgtttgtttgtttgctttgtttctctgtgtttcacgctgcactacgctccagctttctctttgtttttcagaaccagattgcttttttccatgaaactcgatcgagatttcttactttttcctatttttagtcgctttatgatacgattcatctgtcgcctgattcgcttcatctccttggtttgattttagattttcaatttcttctgtttttggttacgtttgtgttcgctgtgatgaagttttccctgaaacttgttaaaagcgataatgcatttcgccgtcgttttcttcgattttaggtttaagcttctctctctctctttcactgtacattgcgcaacagatttttgattttggtcaaagtttttcaaaatttctgcagtagattccttatatttcaaatcagagaagcgagtgatgttaggagccgcttaaatctggattttcctctgttttatactgttcattgatatgatggatgcaagacaagtcgtgtgataagatactcataaagtttttttcgttctctttcctctggtttttacagattttccggtgttagtcacatcgacgcagaaggaacagagaagaagacgagagtcagcttcattatcaactttagttcttcgacgtctacgcacatgaaccgacggcgacttttggtatcggcgacactgctctcgtatttgctctacggcatggctctcgtctccgttgaagcctccggtggtacgaaattccttaaattaaacgtagattcacttgtttcttaaacactctgttatgcttaggttaaacttagattccttaaccaaatgttatcttctgagtgttaatggtggaaaatctcgtggttataggtgaaaagcttagagataatctggatttgactaaaacgacgacgtcgtcaccgagcatatcacatcggaaaatgctgcttctctctcctggtactggtaaggggattttgatttttttagactccagttttacattttaccaaatcggtgattgattctctattgtgttgattttgttaaatttgtcttggttcctccattttcgttaagaacctcgtgaaatggtgaattgttgttttgtttgtttgtttgcatcagaacttctctctctgtggtctctctgtgaatgcacaacttcctgatgcgtttcgtcctttttgttttcacagcgtcgtcagtcttttgcacgtctgtgttttcttgcccctgcttttgtttctttgttcgttatacttttgtggacccacttaagagcctcatgacttatcttaagagtaaaaacaaataacatcatcttaagattgtgtgttttcaaacgtcgaattttaccttctgttgaatctctttcttcttattatgtgtatgaattagtaatatataaataattaaaattaggaagatttagttttgatgacttgttgactatttactggagaatgcatacatctgtatagcaatgcttaaacagctccctacttcatccagctgtcaaattaatactagtattctctttttttcattttatactccaatatttttttggttattccattaaatttttactagaaaatgtagttagagagaacgagtctttagcatatcctcttagcaatgtagctactaatatactgaaattcctctgttttgattgtgtgtgtgattgtttatataaaggaaaaacagaaaggagtgtagagccggagagaattggagaaaagtgcaagagtacggacatagtggtgaaccaagcagtaacggaaccaatgcctaacggaataccaggctacatggtagagataacgaaccagtgtatgtctggatgcataatttcgaggatccacatcaactgcggttggttcagctcagctaagttgataaacccaagagtcttcaagcgtattcactacgacgactgtctcgtcaacaacggcaagcctttgccttttggctccactctctcttttcactacgccaacactttcccttaccatctctctgtcgccttcgtgacatgtgcttaggtcgtggctttttcttttagttttttttgtttaggatgagatagtagaaagaaacagagggaaattaagagggtcttactagatacggaaatatgagattagtcgtattcataccataccatccacttttgttttttggttctcttgggatgtgaaacagtgatagataaatgaatatatatccaaactcttttttccctctctgttaagcttttctcaatacctattgttgtagctggaaatggtcaaaacccccagtctcagaccgtagaactggcatattgggtcatggagcccttaagaccactaagagaaataacctcggaagcaatctttgaatttgaacatggctaagactttatctataggaaaaaaaagaagaagatgaaatcctgttgattgaagaacgagaatttcattcggaccagttgctttaagaatttcttacgcttggtatccacatttcgtttagtacgatccgattggtttactcattttttagattaaccaattatggtttgttgtatgagtttgtacttccgttttctcgtgtatcccttggcttgaataatatactggatgatatcatacaaatttcaaaataaaaacaaaaagaaatttaatatattgttgcgctttacatattagtataaattattattttcgacacttgttcaattttatagaattgaacagtggattgaagaaatgatgtggaatgatttgatttgtgttaaaatgacaaatcttatgttatttaaacatgacaatggatgaatggattaataatttgaaatagacaatcaaatctactgttattgaaaacattttaagtagtggatttgaattgattgagtgactttaggtgagatttctgggagtttttaagttaaaaatataaatatccaaatctcatggttttaagtgagatttgagagaatataaatatcaaaactcatcaaacttaaatcactctaaattcattactatattagtatagatacatgttaaaagattttctcgtgttatcgcgtgatgaaaatctctatcattttttttatcctatgaaattatgatattttaaaacctactattactttgatccaaaattagattttatacttatatattttaataaaagttgttgaataaaaagttttttttttaactttaatttttgatttaccaatttaactaatacaaatatattatgataatattttatgttcggaaactaatttagtagagtgaattagtcgtttgacaacatagatacttagatagtaaaagtttagtataaaatcgttgttggtgaccaagagaaatttcatatttaaaaaaatattcacaatgtgcccatcgtcatttcgcttgattttaagtgttatattaatcgcttttctctttgttggtctttgcgaggctcatcggcatataaatgtggatatcatcaatgatattggtccaaatgttcaattgggactacactgcaaatcgaagggtaaagatctcggacctcaatctttagcccctcatcaacactggggatttactgcatctcttaatgtttgggagacgactctgtttttttgtcactttgtttgggaaaatcagtctagatggttcgatattcttaaggaaaagagagatacaattgtatgtaaatatcatccctgtgtttggagtattagacctagtggtccatgtaggttaacggatcatgaaaaatgttacccatgtaatgctgatatttgaatgaaaacctttgttacaagattttatttctatagttatagaataaaaagttcaatttccttttcactacgcctggtcaagactctagataattaccttatccagtttgccgggtttgatactactaccttgccctgcaagaaacatcatatggatttaaggcaaaccaaacttagtaaagacaaattgtaatctttaggttttacctggataatcatatagaaggaccaacaacattagccctcctctaagaatatcttcatcatgtctgtgaatcttattggagtgcaacaagttggtccagggcaacaaaatcaaattgccactcaaaaacgatatcatcattgctctctaaaaatttgaaaaaagagttttatctattgtgttttacatgttagtataaattaattcggtcgtacattggacccttcttttgtgccatccacccaacgatataaacagttgttgcagagaaatatccatgtacaatggagaatgagtttcaatacaaattgtatgactgagccaaaacacttcttgattcaattcaacttacctcataaaaagacgctagcagtgttacatcacgataatttttccaggctttatggtcatttctctcccatattagtgcagtgatcgttgatccagtcgccctgatgcactacttatatggataaaaagccaagccaaactaagtaaaattattaaagaaacattatgatctacaagttttttaccagaagaatagcatagaagctccaactcaagcagctggacacaagcactagccctcctcttaggatgtcttcatcatgcttgtgaatcttcttggcgtgcagtgacctggtctacggcaactgaatcacttggtagtcatttgaggtcttgtattcctatagttttgaagttattacgagcgcaagaaacaaaacaaaataaaaaaaaaacatagaaacaaacaataaggtatggtagtcgtacctttcaaatacaagagaaagggatgatagtattgtagctgcgataactagacgctcagcaaacaagattctcggagaaatctccgttatctagaacatattttgcaatgattgacattatcgataagccaatctgaactgaaacaacggtaactaccaataggacgttatccatggcgtcttcttaaaaaaaaagttataacaaacatgagcaaacaataaacaaaacataagcaaaatataagtacatataatacttttttttttttactttttaagtttatgttggcatttataagttgctagattatgacttgtgtcatatagcatgtgttgtttctaagtcaaatgaatacatttgataacagcaacatcaacaaaaaaaagggaaaatatatacccaagagtaaagaatctttgcatatctttgactatcttaatcattcacaaaaatgtaactgagtataaaaagatgggatgcgcaaactttaagttcatattcataattattatcaaaaaataatattcaaaatgagtggctctttggcatttcacatcataatgagtgtcacattcatggtttttttctttggtggtctatgcgaggctcgtggggtaaacgtggatctcatcaatgatattggtccaaatgttcaattaggactacactgcaaatcgaagaacaaagatctcggatcacaatctttagtctctgatcaacactgggggtttagagcatctcttggtttttggaccgtgactctttttttttgtcattttgaatgggaaaaccaatccaaatggtttgatatttttgttgaagacagagatttaacatgtggtgatcattgtgtttggagtataagacctagtggtccatgtagactaacgggtcgagaaaaatgtttcccatggaataataagtattgaaacgttgtattaaaattttcattttgataatctaaaaaaataagaaaagtatacgcttatagtattcgtttatcttcaactatttatttctagtatgatagaaatattttcattgaacctaatattttcgaaaattctcggttgttgacctacctaattctgaaagtaattgctcccttgtagaggactctcgtagatttccatctttttttttaatgtatataagtacataccattgttttgatttttttagtttatcttggcatttataagttgctagattatgacttgtgtcatacaacatgtgttgtttctaagacaaatgaatacatttggtaacaacaacatcaaaataaaaaaacggaaaatatctacccaagagtaaagaatctttgcatatctttgactatcttaattattcgcaaaaatgtaactgagtataaaaagatgggatgctaaacctttaagttcttaaacaaaatatccatagttattataaaaaaaaaaaatcgaaatgaatggctcttcagcgtttcacataatattgagtgttacattcatggtttttctctttggtggtctctgcgaggctggtgttgtggtaaacgtggatatcatcaatgatattggtccaaatgttcaactgggactacactgcaaatcgaaggacaaagatctcggaccacaatctttagcccctcaacaacactgggggtttagaaaaacacttgatttttggggcgtgactctgtttttttgtcattttgaatgggaaaaccaatccaaatggtttgatattcttgttgctgggagagatagaaatacatgtgctgaacatccgtgtgtttggagtataagacctagtggtccatgtagactaacgggtaaagaaaaatgtttcccatggaatgatcagtattgaaacgttgtattaaatttttcacattgatgataaaaaaaaaatatgaagagtattatttttctttgtttttctttactatatactagataaggcccccctatatttaggcgggtgtaagatataactgtaattttttatcgataatatttaaattttaaatagtaaaataataatctatacattgttcttgatatataattttgaatagtaaaatagtagtcttatgcattttattttattatatccattcaatcttattgatgatatttgaagtctaaatagtaatctacacacttttttatattataatttagtatttagaagaaaagaacaaatttttatcttacatattcaattttgtatacaatttaactatctatttcataaaaaactcgattttaattttacacacttcatctcacttgataatgatttcatgtcaaaataatatatatatgagatcaaatctatatcttagttaatattaaaaattattaacaattaacaaaacatagtgttaataccatacatattaaaaatttgaccaataatatatataaatatttttggttaattttccttttggttaagaaaaacaaaatgtaatattttttagatatagacatatgaattagtatatgttaataatgatttattttttagttttctatttctttaagaagaaaaaagttaattgacttcttttttagtatttctatttctttaagaagaaaaaagttaattattttgttacacgtgtcaacatctgatcgatagacttgacacatgacataatcctatgagttagtaattttaaaaaccatactttatataataagatatgtaaatgtttcattttaaaatatctactcccagaattacataatgtctctgttcgggagtacgtcgccttcatccatcactactcttcatgtctgtctgataggaaccgcaactccatcctctacccttgtatgaggaaatcagtctagatggttcgatattcttaggaaagagagatacaattgtatgtaaacatcatcacccgtgtgtttggagtataagacctagtggtccatgtagattaacgggtcaagaaaaatgttacccatggaatgttgatatttgaatacctttgttacaagatttcatttttataattaccttatccagttttgccgggtatgatactactaccttggcctgcaagaaacatcatatggatttaagaaagccgaacttagtaaagacaaggtgtaatcttttcgtttttacctgaataatcacatagaaggaccagcagaaagcatggcagtgtgaatgtaatcttcttagcaaagacatcttgtaatctttttaggaaagacaaaatttaaggcaagcaaaacttagtaaagacaaattgtagcaatatagctacttgtagactaaaatttctctgtcttttattgtgtgattgtttagaaaaaggaaaagcagaaagcagggcagagccggaaagaatcggagataagtgcaagagtacggacatagtggtgaaccaagcagtgacgataccaatgcctaatggaataccatgttatattgtagtatgtctggatgcataatttcgaggatacatatcaactgcggttggttcagctcggctaagtggataaacccaagactcttcaaacgtatttactacgaagactgtctcgtcaacaacagcaagcctaaatttgccttttggctccactctctcttttcactaccgcaacactttcccttaccaatctatctgcggccttcgtgacctgttcttaggtggtggctttttctcttgtttttttttataggatgagatagtcgaaacagagggaacttaagaggccttattagatacagaaatatgagattagtcatattcatataccataccatccacttttgttttttggttctcttgggatgtgaaacagtgatagataaatgaatatatcaaaactcttttttccctctctattaagcttttctcaagacctattattgtaactggaaatggtcaaaaccctcagtctcagatcctagaactagcttattgggtcaagttgattgagcccttaaaaccactaagagaaataacctcggaagcaatctttgaatttgaacatggtcagactcaagacaccataccatcctgtcatttgttctctaggatgggaaactttatggataaatgaatatatcaacctatattcccctctataagctcatctcaatacttatagatatagtagctggacaatgtcaaaacctcagaccccagaacaagcctatccagaatataacagaccaatgaatgagatgttgaatattcactgatggggataaataagaatccaatgaaatcaagagattgggatgcgtagtttttacaccataaagtagaatttctcaattaaatccaaatcacaaacaccaaattgaattgtcattcataaaacgagaatctaaatctcatgtggtagagcttagaagtagaaacagctctatcaacacacagagagaattgaagaagaagatacaaacttggatacttttctggttattcctctacaaatggtcttccatctctaacaatcttcatctctttctagccaatcactaattgccaactcacaattcacacctctaccaatcatagtctcacaaacttccaagtcactcttttcctatatcatacctcagttgcctcaggctctggaggtggaggtggcggcggcggcgtggtttgttctcccatttttccccaaagaacaaaagagatgccaatgataatcacgaaagctccaattatcctgattcagcaaagaaagatgagttgagaagaggactactaagagataccaaggatgttaggaaagcaccaatgctcacctcccgacaaacatctgctcagagagtacaaccgagctaatgaccgccgtggcaatcagattgattggattgaagatactcacccttcttctgtgccatccacccaacaacgtaaaccgttgttgctgagaaacatccctgtacagtggagaatgagtttcaatacaaattgtatgacaaccaaatgacttcttgattcaattcaacttaccccagagacgctaacactgtcacatttggatgaagtttcaaggctttaagtttatttctctcccatattagtgcggtgaccgttgatccaacgccccgatgatgcagatgagagccgtcagggacagttttgccgggtacgacactactaccttggcctgcaagaaacatcatatagattaaaaggccagccaacttagtaaatttctgtaaagaaacattgtgacctttgggctttttacctgaagaataacatagaagctccaactcaagcagctgcacactagcataagccctcctcttaggatgtcctcatcatgtctgtggatcttctttgcgtgcagcaagctgttccatggcaatggaatcacctggcctctccaaaatgtcatcagcattgctccagcaaccgccacacacgttccaagaacttttgcttttcctcgatgactgtgaatagccactttctccaaccttgcaaaagggtacgagacattacatgttggaactaaagtcaaaacacacatactgatttgattattactcatacagaactaaatgtttgaaagaaaatagaaggctacctgaatatacaggccatcacaaatgtaatggccgggagtaggttgaacattccggaagtgaaagtgggcgttgtgagctgcatgcctgtatagtacaagttttgctccaatagtggcctgtaagaaaacatttgattaaacctctaatatattgatgaatgtgatgattcatacaaactataagtaacttactcgaaaatgctcatgataactatctgagcaaagattcttttagtcaggtcttgtattcctatagatttgagattattattagcaccagaaacaaaacaaaacaacaaaaaaaacagagaaaacatacaataagttatggttggtacctctcaaatactaaagcaaggggtgatagaattgaaaatgcaataaccagacgcgcagcaacaaagattctcggagaaagcccgtaatctagagcatactttgcaatgaccgacattatggataaaccaatctgaattgaaacagccgcaactactggtaggatgttatgatcatggcttcttcttcttctacgtcttttttttttggttaaattatattcaaaaaaaaaaaaaaaaacgttttagatccgtttttcttaagtttttagtagaaattacttaaaaaccattgcctaggaaaataaaaatagaacacaaagcttttacctgaggaactgagtactgaaagcagcttagtctcgtgaagcaaaccagcctttgtcgactgtcgtagcgtctgtcctcggttgattgaattgtccagatctgattacgaatatatttatctatccatcggatgaggttggttgcaattcctggttgcacttcttcttcgtctttttcttcttcttctttaaaaataaaataaaatttaaaagtgtggtctcagtggtgttcgtcaatggaggaggaggtgcaggaagaaaatattctaaagaaaatgcttccagctcgtttttactttaatgctattatagtgtgtggtttttacgcttgtttatctccaagctccttgttttggtaatatgacattaacgtcattatgactctttaactaccaactcatacagtataaataccgtagttagctacttatacatgtcgtatacgcttatactactcagattgaccggacgattcgtcaccggctttcgtgtctagggtttaccgacagctctctttttccattgggccctatcataatttatccatcaacagcccaatctttttagcgccacgcataaagcttggctcccttttttggttttttttctcctcgttttaaatgttaaaactaggttgttttacttgtgttttgatatttttaactattgtttgtagtacatgtgtttgattcaatttagtttcatattgccatctttctgcaattctttttttttttaatgtagataagtacataccattgttatgactttttttagtttatgttggtatttataagtagctaggttatgacttgtgtcatatatcatgtgttattacatcatgcctctgttcgagactacgtcgccttcatccatcactactcttcctgtctgtctgatcggaaccgcaactccatcctcttaccttttcccaacctaaaacaaaaagagatgaattttctgttcgaagtgatgttcagagttcatgaattcattaattacatttacgggccagccagaatttggccatttcgcaaattcacctatactaaaacggtgtgaaaggaagaacgaaaaatacaaaggcacaatcttttttaaaaatagatagatatataattatcttcatcacacgtaacgtaatggacctagtaacctatacagcttccatacattgggaaagtaagaagaaaaaacaaataagggacaaagagttacttgaaaagaatttatagttcattttctacacattcaaagatgataaataactccacagcttaaagggaagctttactttacttttagctttctttttttgattttgttttcttctgtaccggaagaattgaaacgatgtgtatgatagatacattggtcttcctcccttcacaaaatggtgcatgtgcagattactgcctttggtgctttatcaaccttcttctctgtttaatcaaaaaccagtattcaactgttagttagctttcatcaacaaacgtcttagtaatcacaaactcactttccacgactttctcaagtttgtgaaaaaacaaattatgcagacaaatctcaaagactggcaaaagttttcagtggggtttacaaggagatgacgaccaataatgaattcaggtattcctttcctcatggcatgctttgctaagcttagagctgatttttgctttatttcacacaaagaacacaccagaaacctaggaatgaattctagggtatcctttactctctctcaagacaaacaaaccaaatttagacaaaaccactaatcacctgataggttgattgagtcagtaccataggctgttagaaagaaaaagaatgtactgatcttagtcaccgactaactttctgatgtgcatgaacactcttacgaaatcttaccagcctcaattaatataagtatgactagagctagatattataagacgtaaagttgagccagataaatgaataccataatccatacagttgacaagataaataccacaagactaatgaaagattgaggaacctctaaggacacatatatctccatgaaacgggaattctctgatataaaagacatgaagaacattacacatagacaaacaactacctgttttggatttagctagagaaggctgtacaacaacatgcatcacaatgactccaccagcaatatctccaaatggtgtcttacactgcccaacagtcttgttgttctccaagatcttacccgagcttatcagcttcacttcgtttatcccctttggaacaactgttttgcctaaccaaaaccacaaaaaaattgatgcttggatcaacctcaaatcacagagacttggcttttctcatacatcaagcttataacatctcaaatgagctaataataattcatctacagctctaaatttcgaatttctaccgacaattgcaggattcagtgacaatcaacacgaaattcgtgggaagatcatgaataaaaccaggatcagattggggaaaaaggggcaccgattcaaaaaaccttaaaactaacctttgggccaatcagagacgaccctctgcttcaaaaagtcaacagtagaagccgcagaataccgaaaaggcccgatatcggagccatcgtacaacctgaatttgatatctatcgattcttcctccggcatatccgttgacttctctctgacctccgattaccaaccaaattccagctccgatcaccaatcccgcttctcaaacacaactatttcagatctgaaaataggtctgaaaaaaagtagacaggaacgagaatcagagctcgcttcgaaacgggatagaacaaaaaaacaaaaaacaaaaaagaggaagaatcaaacacacagaatcgaagcttcctccgaaatcgtgtttcggatctttgattttgaggtgtgaaaaaagcgaaagaaggaagaagaaagagcttgcttttttcaagagtcaccaaatatcaaagttccttctcaagccgacggttttcacttttttccttccttttttttttcccctttcttttcgtcgtcacttctacttcttctcaagccgacgtcttcaacttttattgtcctagccaaaaacgctgtcgttttattcgaatttacctgtctaactgttcccacttcccaccatactttttttttcttcttctacaataatataattcgttctgattttggcagtattgtgtggttaagacatcataattctgattttagtagggctccaaatcttatacgagtcggccaatatataatatattagttgtatgcaacaaaacaaaacgatggaaactttccaatacttatttctacaagttgacacttcttcacttgaactcttttctttcactggagttgtatcctttaacaccactagtgctctttttatttaggtattctttatcattttatatttcattatacatatctttagatactgccaaaatgttttattaaaaaggaagaagatacattcgattacttttcttatgattcgagttatgcgttacttcttctcccagacagcaaagtcaaggcctgaataagctaaagcaaaattagaaggaacaagtgttcccacatcttgctttggtccaatcttcatgataactttatcatcaatcatagccaagtagagatccgcctctgccgcttttatcgttacagagcttgtgctaccaatcccatttttgttcctgatagccaccagctttgagatgctctcttttagtccccattctatgtaatgattataaaactgcaacaaaaataacatatcaacaagattgtagttgtaaatagtatagctacatactaaaatgatacttacaatgcaaggagttcctggatgagtaagtatataaacgtatccaagcaagactttatcagaagggaaaacccacgttctgaatgtatcatggttatctatgaatgtgacagcgtttccgggcatgattcctatcataccaggcggttttccctgcgagtcctttagtctccaaagctcacctttgacagcagactgtaagatccctttggtggtgaaatcaaaagctgtcaacacaccaccacccgcttcctcgatccactgtttgagacccgaccgatgctcgttctgatcatagtctagtttcccgtctcctccgtacttcatatcgtcccatttctcacccaccgcaaaatccggtgatgtattctgtgtatccaaaaacagaggaatttatcacataatcagtagtgaactttcttatatatttcttattgattgcattgacttatgtttcttatatactaaatagtagtaaataaccctatcaacctatgatacttatatatactaatagtaaataattatctcaacctatgtttcttatatactaatactgttgtctgatatttgagaattcatatgtgatttacctgaacgtataatttggtgatggaagatgcataacctcgaacataatcaaatctccaaccatggaatccgatttcagttttaagccaattcatccattcggacaactctttctgaactctagggttaaggtggtcgatgtcgggcgctccatcaaaatctcctccggtgtcgaggtttccggtaccgggaaatttagggtcattgcggcagacaaaggaaggatcccaatcaagacgatcatcggaagtcccaccttcgaaataacagtatccacatttatcgtctttcctctcagctgttctgtggttaatcactatatcagccaaagcttttattcctttttgattcaacgctttgattaacgatttcagttccgcctctgaaccgtatttggagctgtttagatcgtatagctttcccggtaagtaacctgaggaatgaagattgcgtgagtaacaagattggtatgtgaatgtgtaaagagtaaagcagaaatggaaccttcaggagcaacggattgagaaggaggaggaagccaaagatgagtgattccagcgttggctatgtcgtcaatggagttgtggagagaattgtagaatcctccttctttcttccatgactcccaattgaaactctgtttcacaattgaaagaaacccaataagtgagtgtgtagagtctgtgtatgtaaagaagcaaaactaaagacgaacctgaaacaataaggtggaggaaaacgtgaaggttggaaagacgatgaagaaaagaagagaagagaagagtaacgtatggagagatgtcattgtctgattgtgaatggtttgcttcttctatctgctttgtgtgtttatattgagaccctaaaccttgtagagttacgtaacctaaacgacacggccttgtcatatctgatatatttcttcatcagtctatttttcttgggaatgaaatgtgaatacatttacaaggagttatggcaaaaaatctactctgtctgatcctagctctaaaatgagtcaagtatggtctccctttagacctccatttgtcacgttttgagtggacaataggttgagaatattctaggggaaaaaatgatatttggagctaatatatgttgtttgggctgttaaaaaaagtgattgggccgtaacattaacttttcctagaggaatcataaaacgaagaggctagagtacttgttatttattagacgttagggtaaaatagaattgagaagtactaggtaactcaattctggtagtccagatgaattctgaagtattgtctacatgtgatgtacaccataatgatttttttttaaaacatctgacctgtgaatgatcatgtttatctaacttactttgaattttcatttcctttttaattagccggactaataaacttttaagtattactgagaacagaggcatcaaaaactattttacaaaattctaaacgacgcacataaatttttgaaggatagtacaatttcgagatatttcgaaagaagatgatgagaaaataaaagacaaattaggaaaccagactcaacagttcaacattaaagtcaatcactaattcataattgaaaactaaatcttgacttagtttggcattttcttgtccatctggtcctctaagtcaccaccatgagttttaataggatgactcacgtcaggattagtctgcggctgaaccgtaagatcaccagaagccggagtagatgaaagcttgaccatgttgatggaatgatccgacaccgttttgggcttctctgtctcatcaaccactagtggagttttgtagtacttgaatatgacgtatagaatcatttggactgctccgagaaacgcacccaatatatttggaagcttcaaatcataaaaaagtaatcacatcatcagtaacaatcccactaatcattttttgatagggaacagtaatcctattaatcgccgacaacctaaaaaactttatataattgtactctcggtttcttttacgtgatcatataatatatgattgtaagcataaagcaaaagtagcgtacggctcaaatcattcattcgtcgtctttaaatagatggaatttgggcaaagagacaaaaggtggtggaaactcttttgcctttaacataaaccacacataataatatatgatactatgtttgagctgtccattttcatatactaaagaaaaagattcacatataatataagaaaaaaagagagactcaccgcaacgtagaagtctttaatagcaagaccgtagaagagccacgtaatggcgctgattgtaagaaacaatgatagagagaaaggcataaactccacactctttgttcgtatcaccactctctgcgtcatcattttatacaatttcacatgttagagaactatataatatacgtaaacataaagagatgctattaccggaaaaggaaagacaaatattagtttctttgattttagagtatattatattctctatatgaattagcatggctctttttagatagacaaacatttcttttttctgagtgcgtgtgatacatgtcacataagtatgtacgtaccatgatgctcaaaggagctgcgaaaacacaaacagaaaatccgacgcaaatccctccaaggactttctcacggttcgatcctttggttaggagctcgcagacgagaataatagcagcaaaacccaagaaattcaagagcccaagaaccttcaaagttgatatctacatggtttatcatcatcagctaaacctgtatgtatgagtgcatgttttaatataccaaaagaaatgggatggtttaaacgtactctagctttcttgttagcataggtgatgaagaggatgatgtagatggtttcgatgaagcatcccacagcgtttatggtaatgagaaggaagcctgctccatctttttgcagagcatagtaaatccatagcatcgcgctaaagagggctgacacgtagggaagtgattcaaaaccttctatcgattttttcttgcagattcttacaaaagttggcctgaaaataatgtccaaaacatttttctttgttaagagaaagcaaataaaaatagaagtgtacgtttgagatcgatgatgcttacactggtgccaagaaaacgatgaacgatatgatgttacctacaaaaatacatataggtaaagataacaaagttaaatttgatatgcacttataagaacaatgatatagtatatagttttgtataacttgatgtttatttatgaatgcttgaaacttacccaggactccaaatgtaactgccaatacgttgtgagtgagaaccattttggttattttgtgaatgagcgagctcttcagtatctttctacttttgaatgggagtgtcggagaaaactaataaggaaacaagagaagggaaaatatatagagatcttcgactcttgattcctctatttgagttttcttcgatatgaattaactagcgaggccaatggttcactatatatagagacatggtaatatgtgtaatggttccatgcttatatgctagggacgtcgtcgtttcgtggtaaaagagagagaagaacatcgcagattgacggtctcagatatttctatggtttttaaaaatggaaaatattcgataattttatgtggtatgcactcttggcgtgtattattttggtgtcaaacttttatgccaaaccttggtttatattattatcgtagtcatttaagtgacctttctttttcctttaaaccaaataaaaataaatgagcttttaatataggcgttactaaactgcaaagaaacccttaaaacttattggtaatttgttcctttggcatgaccaataatataattaaaccattgatcggctgatagctttctagctaaccatccaaataaataatatatttaattttgatggttttcatcattgtattaaaaaacgtaatctaattttccaatattctaccaggactcaaactagctaattaattagtttagatatttgttctccgtacacatgtaagatataactacatctttttgttgccatcatataactacgcgcgttatgtaaactatccaagcttgcattgtaaaatatatatactataaacacgtttcaacgttttctactattgataataactaagaaaaaaaaattattaaacacaacataagaatattttataaaaatgcatctcattttaaaaataaaaattcaattcatgtatcacttaaatttaatacactcctggagcaaaaatattgattgcaaaagttctagttcccattccatctccaacccgaatcgttacataccgaattaagttccattaaccatgcgtgtttgctcgttttgttcatcataccagtaaaaatgaacgtttaggtgtccgccacgtgtgacatattttatgttgtctccgagcactcttgaacttcatgattaggcagccaaaattaggtccgtaactaattttattttattagctctcataacaacaaataatatcttgtccctgtgataatgtatataaacgcgtcgagaagaaagcaaacaatataaattgtataaaacaaagaatagtgcgtttcatcttagacgcgactgtcgcgtgtgtaaaccgtatagggtaagattcaccatcatgcttcttgatgctccacttgactactttcatgttaatcttattatctacacaaatattatcgtatccaacaccaatcttcaactaattttaaaaaatcatgctttatatttctataataatataattttataaccgaaccaaaattttaacaaaaattagtaatatgcaactagttaagcttttggaattaattatactatgatatgtctaggttgtaattaagctttaattttaccgtaatacaacttctcactccacttatagagagtaattatacactagggaaatgaaaggtggcatgttaaaatgttgagttagaagttcaagctatgaatattgtaatcaataccactactttgagggagtatggccaggtgatgcctcatgaccgccgtcagatttttacgtgtttttatgtaaagtataaagtgcaaagttggtcaaaatgagctagtcacaatttactttcattgtcctttagcattccaagacagattcttaggtaaatgcaaattaattcgaatatcacctggcgtgatatagtatcttgacggtcccgattatgcaacattaaccgatcggggcacatggaccatatcaccatgatctctcccaagagttctcccagacattattgctgtctcccttgtttttaaacttttattgccaaggattcaattgtgtaggttaacaactcttgtaaaacctgtttgttcatttctaatgatatttacatgcgtagcaaaaacaaaatggaccatgtcactgttgctaaatatgctgaaaattaacatgtttcatgtaaaacttcttattcgtaacaattgctatacagtatacttggttatatatataacatcaacacatcaatatattattcgatatctaatgaaataattcagtcaaaaaatcatcattttggcaaacaatataacctgtgacagatactgttgtgagtggcttcaaaaccatactcaatttgtgtaaagtggggtgctgtcacaagggttaaattacgtaccatcaattatttgatattttgtatagcattcatgcattcccaagaccaccgtagaaaatgtcaaagaaaaataaaacgagttacaaaaatgtaacagaactttagcagcaaacacgtacagccaatgctaaatcttagatcttacacaaatctaaactcttgttttctctacaccaaactcttttaccaacaatgagatctctaaacttggcaaatctgaaaacttttgtttactcgacaccaaacagttcgggtgatgtattctctgtaaaaacataattaataagtgaaattggttattaaattttgttgtcacatacagttaatatatattttaatcaaattgtaagcaaattagagattaaaaaaagggaacttcagttaagtaatatttagtttataagcctatactatcaattcacataatggattcattaaaaatgtgaaaaagttaaaatataacaaatattatttacctatcaaaagagaaacagaaaatgtatggttgaaataaaaaagcgtttgaaaatgattgacttatgaaacccatttgcatgttgattcttattaccacctttcgttgtggtctcacttacttaattaaagacaaataaaatgattaatattttgttgaattaaataagtaagtgattagcaaatgaaacttttgctttatggagtcttggtggttcttcttcggtcaaagggagtggttccatccaaccatgcagattccttattaagcggttaaaattcgttcccaaccattattttcctcttcctcactttctccactcttttcccgaatccgaattcaaatattgaactaagactctgagagatgtcagcaaaataaattactgtaaagagtataatatgcttcaatgttccatgcaaatacaaagctaatatatcagagaatattgagattgtggtctaattggcttcattaaaaaaaaagttatatagttattctgcttattaggaatggtgtttgggttataacatccaatttctcaaagataaatcccattgaaagacaattttcttatttttcagtataaactgttacccttaattcatcgtccacttaaagtgctttacccattacttagtagatatttcccacattagtttttttttttccttttgtcttcacctttgatattcaatatatggtcgttatggaccttatggttgagtttaagagtttgactaaattatttcttccttcacatcacaacctttatcacaatagtcttccagaatttcaaatcagcaataagaaatttgtcgtttataagaattgagggagcaccacccttttcgttttacatatcgaaataatctgaaaaaaattctggtcacgttgttttaagaaactgtcaccaaaattgatcaaatcctgttaagctgtcaatgtcatgctgcaagacggtttttgatgttttcgtctattttttttatataatagaggtttaatatagttaggcttcttctaattccgtatttttcgaatagagttttccacatccatttggaaagtcatcaacatctacgataagcttaatgagcattcgccgcaggattagaaaatacgcgtcaaagtaaaatctcccttgcggattgcctatagccatttctaaattcatatcatcaacgtcctagtcagttttgagtacaatgtacattggttcggaactagttaaggatgtctctgtgtttcctctagtcacttatctcttaacttatatcctgagtcatccccaaaacataagcaaccatccaaactcctttgtacaaaaaggttgttgtaccattcattaaggggcaatgttgctcgctcagctaataaacctctgcatcacacatgtgcataataacaacttatccatagctctctctcccatatgaatttccaagtgcttatatgccacaacaaagataaatatatagttgatcaaatataataaagactttaaagtctggtcgtttataacttagcagattaaaaagtctactctacgcagccatttaaatgctaacaatatgtagtcttgacacctgattttgcagttaaatatggctcagtcagtacccaatatcagcaggatcaccaatgtactcggcgacttggtcaagtttaacatgaagcatctcctggctatctgcatcgcaaaccacaccagtttccttatccaaatctttctcaactagtctcccatacacacccttatgtctaccagacagaaccaacacagaccctcctcgcctgggcaatgcagtctcaagcaactcctgatcaatcccttgaaccaactcctgcgtctcatccatagcaatatcacaacttgttggcccaaccacatcagtcaccactgctttcttaagatacaatctcccacctttaacatccttgcttattattctcacctttatatgactcctaagccatgaggtcttctctctcgtctctctagtttgacctctatagttctgcttacaggctttaacttcagtgcgactctctccctctgtttctctattacgttttctcacaactctatctttctccatattttcaatcttgttgataccaactttcacttcctcatggcttccagaaccaacaagtttattatctatcatcttcatggctttgtccgatttaccaaagccaaatccttcattaccagaccacttctcgtattcaacaatcttaacatcctctttagctttaagaccaatcccctggcctggtttccacccatacccagccagtaacgcctctccaaagccatccacaggaaagctctcgaaatcctctttttccggagcatcagggagtgactccaaatctgtcctcatgcttttcagtaacatcttctccacaggctctggcttctcaacgttctcgactttctgtcgcagattcagaccgtacgtaatgttgttatctgagccatcgccagaggggatctcggcctcgaattggagacctgaagctgatggaagcggtagatcaatgctcctgtaggacctccgacgatcctcaatgggaggtataacgtatttcggtttggagtcggttagggtttcggaaggatcgaattcggtgacgaactgcttgagatttcctgcaccgatgcagtctttcctgtcggaattcagactaactctggatttcgatttgggagggagagagaaagagagcttcatggtgatgattgttacctaggaaattatccggcgagagtcgctacagtcgacacttttggttttgagaggtggtaattcatcatataaccagtttactgggcctatgggccatccctcatttagcacgtgtcttccttttttgttttgcctatgggccagggtttttattttttgttttgtctgttattaacacttctattattattattatttttatttttatttttaaaaaacactaacttcagaaaaaataaaaataaaaaccttcagtaaatcttataaaaatcaggtctcgaatccactacgtttcagttttcactcatttatgcgttcattatcattttatcgacaattattgtgaaagcgtggtggggttgagacatcataaaaaaatttaatttcaattcttaaaacgatgtcgtttttaagttatagcatcaaatacgtgttattttgactcagcaaccgtaacagttgactattacccattatttacgattttgaattgtgcagtaactgtaaagtccagatataaaattcaaattttttgaagtttgaatatgaattaatcctataatttattcgcgtatgaaaatatacttaacagattttaaggatatgaaaatactttttacttcatatgcatatgtatatacttgtttgaactttaaagtcaatggagaaaatacactagaggttacaggtgctgccgctgcaatgcaacatgtcgtttatatagtaactgatagaaactatcaactaaagtctcatcactaaattttccttaaaacttattacattactcactactacacaatgcattaaaaataacatatttgaaagtatattgtgtatgctaatttttgatgtgtacttaaatctcattattggtatataagtaaagaactttaaaaactaaagataggcagtaaaacaaatcatacataaaatttacgttgaaattagtttgaatcaaatttgcgatctacagttttcgtgtaaaactaatcaaagaaaaacgattcaaaataaccaatatattttgaaatgatgattaaaacttggcgacaaatgaaataaaaataaacaatgggaaaaagttttgtgttgttgaccaattagagaccaaaagactggtttttgtagtaaaaagcagattacgtacaaaacaatttagcgggtgggtatatggaatttaggttcagaatattttcttccttttaggattagggtttgtcttgcaatttaggatgttattggacatctgttcaattatggataggtgggaatagggtttgagtctcacatataaatccttgaattttccactaccatgtacatctatatatgaaacttcataaagtccgatttaacaagtttgcagtatggcgagatctgttttggcatcttagaaacaaagcttaacactaatacaaaaataaatattcgtcaagaacaagagtagatgacaaacaagctaaaggaggaggaaaacaactaagataactagcaaaagatagcatttcatactacaagtataaggtaaaaataataaaggcacaaaaatacccggagaaggcatttcttttgggtctcttcaggtgtctcactcttaaacttcttgatcatcttctcattctcaaaggaggtgtcgctctagtctttacctcatacattcttttgttcattttctctttcttatttttttttttttttcaactttcgtttaatgtggagatttaatatgtaattcttatctaaaagataattaactttttgcttatgttttgcttatttttagtctttttttttgttaatatagtttctttgtttttgtttatttatttttaataattgtagacaaaaataattattaggtttttaaattagtttgatgtttttaagcaatatagttgttggcggcggaggaatacatgtactgaagataaacacagttaaacctttttagtaaccgaaccgacccatttggattgagataaaatacaatcgaatagtttgagtcttagattgggtttggtttgggtcggtttgagttcggttgggttgggtcggttcggttaaaatgcccacccctactttcccatcatccccttgacaaattaataaccaaattagtcataatccaatctttcaacatgaaaaccggaatatgagggtcaaagcggacccattaagagaaaaggtgggtcagttgacacaccttaaatctacaaataaagtttaatgcatgaaatttgttaaagagataatagctaagttggtttatcatgtgtcattgacacccccattatccaagttcaatccttccctatgtactttttcgtaaaaaatttctttttatatattaaacgaaaaaactattgactcaggtaaaaatctttcctgggtccgccggtcaacgaggaggaaacacgacggaatgagagagagaagttggtggcctaatttttgtaggagaaaaaacacacagaaagaaaagtaaaatgttgacaaaatggggttgggaaattgagaataaaaattcaaagaaggcatgcatattgcaataataatgtgcgatttgtcaaacaagtggggctgtgagagagagcgcgtggtcagcacgaagaagaagcaggtacagagttttatcaccagctatctatctttggtttgttcttaaataataatcaaacgccatctctctctattctctatctatcttctccacgttactaccacctaacctctcatccaccttttctcctttaagcatatttcatttcatctccgaaaggaattgtatcgttcctcacacacgcctctcatctcttatccgtaagttttgtttctcttttctctattgatgtacccttttgcccatatttgtgcttgtgaactcgcatttgatcgtttatgctagatctggtttgggtttagtcgtttagatgctcgtcaagctccctttgaatcactagtgctcttagactcttatatttactgatttggaattttgtaattcaaaagtccgagtcttttgatgaacccccgtgccgaccacacgattgctttcaatttgggcttcttcttaattttggtgaactattgaggatttttgcaagtttctgtgtgaatcctagagtagaatgactcaaaaatgatttcttttgattcaattatatgcgattgttaatgtctttgaggttctatgatctggaattagattttggtattatcttagtatatcaaagcttagatgatgtttctttagcatgtaactactattgtccatataaattgcataactcatttaactttcgagcattctctgcgtctcgattacttatatggttcctttgtttgtttttgttcagattcttgtccttttttcagctcaacaagaatggataattgtactggagaaaatcccatggcttctcagttgaacattctccgatgcccgttcttgaggaacatcaatgagcccactaacctctctttctcttcatccttgccttttcccatccctgtaagtaaccgtctgttggttcactccatattgacatttcttatagattctgatcttgtctcatcatatatataggcaagagctgggaaaggacctatatttgaagatggtcccaattttgatacggcgtttaggcttttccatggccaagatggagttgtccctctctctgacaccgctcgaactgaagcccagaagcctgtgcctgtattccatccacttgctgctaaggcggccactattagtctctcatcctttggatctggagggccttttggatttgatgcattttctgacatgtttaaaaatcaaaagaagaagtcagattcatccaaaaataaggtaaaggttttatgagtttcttgctcaacatttatcttttaaaactgatgtgcataggtaaagaaatgtgtctaaggaaatagttaagcttctaagattgcttaagtagtatgcaatgtgttggcttatgagatagaaaatcatgatatttcttttctcttagagcaccgcttaattgttgtttctctttcagggaggaaaccacgaagccatgggcgacgaatggcttaaaacaggaaactgcccaatagcaaaatcatatcgagctgtaagtggtgtggcaccacttgtggcaaagatcctgcaaccccctccaggcatgaaatttaaatgccctcaagcaatagtcacagctcgagcagcgatatcaaaaacacctttcgccaagaacctccgtccacaacctttaccagctaaagtactagtgatcgggatgctgggcatggcgttaaatgtgcctttaggggtctggagagagcacactgaaaagttttcggcatcttggtttatagctcttcacgcagcggttccattcataggaatactgagaaagtcagtgttgatgcctaaaacagctatggtattcaccatagcagcatcagttttgggacaggtgattgggtcaagagcagagaggcggagactcaagtctgtagctgagaagaagttgacattggaggtaccaaatccgtcttctgttgaagcagatcagatgcaatttgccggagtttcatcagatggaagatgcggtgataaagtggtgatgaagtggaatcccatgatgcttgatgttgcaagccctgtgtcttccggagcagctactgttgtctgctaaaaggattttgtaattctcttcgaggatttatatatataattgtttttcttgtatttttttcggctgattgtatttaaaaagtttcttaatgtttgagaaaaacaagaataaagccattttttaaactgttaattgtattttaatgtaaaagacttgtttgattgaataaaaggaaagagaagttggaaatttggtgtttatgcatctcataggcaagttttcaaatatgaacaatgttaaatgagtcgttcaatagtgcttatgatatcgtggttgcaaaacatcagttatagagtggttgatggtgtagtgattaaacattgcatttcgtgatcacttgtttgggtccactcttgcatccttgctaaacctactccaaaattggtaaacctactctgaagtttgcagaactagtctaaaagattttcttaaaaggcaggccactagatagaagagaaatcacttacaagagtttcttaaacttttctttttaaagataagtgattatggaacattaaacttaagtttactctcataacctctattatcatcaaatctccttcttaaattttttttttttttttttgaaacaaatggattttattaaaaatacaaaaaaaattgtatatttggattacgtcaactcttacaattttgctagtctcatagaaagatgtcatacaatgcttgcatgtattgcttataacagtacgtgtgcttttgttatttcttttctagtattgtaattgcgtcgtacaagaaaacttataagatgcgtcggaattcgaaataaaacaaataaggttggaatgtatcacatgattttcatacgtttttacaatttctgataagtcccccttggtatgatggtatcgactttgttttcagaaagttgagtttgtttcttttccgaaaactaacgatgtcaaataatgtgaattcacaacatatataaaaaaatgataagaagagagcttaattttgagcgagtgttacaaattaattaaaaactgtgtctagtttaacacttaaaaaaattgcaatttaaatgataactacccctggattattttcataacaattttgtacatgaaagaatttaagataatatattattttaccaaattagaaaagctaaaaaaataagtactataatttgttgtatttagtgaaagaataaatgttgctgggaaaaaaagtgaaagaataaatgctttgggtatataccttatattaaaaacaaaacgaaaaaaaattaatgatatttgttaccatatatattatatacaatctataaacagaaattaagataatttatctgaaaagtgttttcaatgaggaaaataacaataaacagaaaaaatgaggtgtatgtacaaagatttgttaccaaatttaaagtattcaaacagaaagtacccatctgtttaggcaaaggattcgatcatcaaacgtcctacaatatcttgttttgcgatctcacccacaaatttatttcctataaattctcttcctctgtctgatctcttctattcaagcccacttcttttctctttctcttgtcttcgtggagttttcggatcttacacaacaatatctttgtcttactgtatttcttgtcctttttcttcttacctttctaacaattattaagaagagtaaagcttgaatttaaataaaaatgatgggagacaatgaaggaagaagaactccgttattgaatcttggggttcaagtatcgatgagagtgttaaccatcggagctgcaatggcctcgatgtgggtcatgatcactaaccgtgaagtcgcatctgtttatggcatcgcttttgaggctaaatacagctactcctctgcctttaggtatatatttttttaaatttattctccttttctatcatcatctacttcttattttatgaaggtgcaatgatctagttattgaaataattcatatatgatacaacgaagcatccatctgcatgaaatgtcatcattcacgttgaaaatatgaagaaaacagatcacacattcggtagaaaagattgaaaagatgaacacatttttctaaaaaaaaacatccctcacgtatgatgtaggaagaacaacatgtgggacaaatcataatttggcatttttcattcatcgatatgatcatctttattgaaagtaagagatcgagtgattaaagtgtatgatttgatgtttgacaggtatttggtgtacgcacagatagctgtctgcgccgcgacattgtttacgcttgtatgggcttgtttggcagtccgcagaagaggacttgtttttgcactcttcttctttgatttggtaactatattacatgtttttgatctaaacattttcatttctatacgtgaatactctttatcttttaatttgaattagcatgttcacaaattatataaataaacgttttgagatgggtttgatattttgatgtacagcttacgactttgacggcgatatcagctttctctgctgccttcgcggaaggttacgtagggaagtacggtaacaaacaggccggttggcttccgatctgcggttatgtgcatggttattgcagtcgtgtcactatctccctcgctatgtccttcgcctcttttatcctcttgttcatccttacggtcttaactgcctccgctgctcgtcattactgattttcttacattttatatcatacaattcaattccttctactccaagataattcagtctttgttatatataattggatttcatgagatgcaaaattgatttgatataatgaaatgaaattgtatgattacttgcatgtatttatctttgagatcacttcttctgttctttgctgtgcttaattagtctcctatttgtttttcttggagaaaatctaagaaacaacaaagtattgacaagaaagaaaacgaaattaagatcttggtaatcggaagagcatttttctaaaacgtataattgtacaataatccttctgccaccaaaagagtgataacatgtttcaaacatgcatagataaaacataatcttattaatgttacatatctcttcacaaaatctattcttccacatatttctcctaaatagggttttagcagagccaacagaaaataaaatgcatacgatctcatcatcactgtatgatggatttccaaaagagaatgttacatatatacatcatcataattcataacatttgcatcagaccaggctcaactagatgcaaaagaaccaagatgggcccgttgaagtaacttatattttggactgggcctgtcacttggcaactgtgggacccacatgaacatgtgccgaagataggcctgaatctccgagaacaaacctccgccacaaaaacagaagacttgttgcttgcgtatcataatacgacgccgtatctctacttgctcgaacaaacccaaaaagatacatatcaagagattaaaccttatccaactaagagaagccatttttattttttttgggtctctgagttgtgtattgagcttcatctccttcaaatggcttccttatcaaccacttccctaagcttcaaagctccgtccaccacaatttcacaggtaatttaacaaattcttctcataaatctcagtgtacagtttgttctcattctttttttttggaaggagtcttaatctcaacatatatagtttctttgtcgtaaacatttctcttaactataatttaagggtggatcctgttatttatcaggttttaaggaaagcctcaagttctcagtctgtgacctttggtcgtttcacgtcttcaacaaagagccttcgtcttcaaatcagttgtgccgtaagtaatcattttgactgaagctaaaatttaaattatatgagaaatgcgataagttaattgtagtatcgtgtgagtgtacctacaggcgaaagcagagacggtgcagaaagtgagtgacattgtaaaagaacaattggctttagctgctgatgttccgctcactgctgaatccaagttctctgctcttggtgccgattctctcgacaccgtatgttacactctctctgtttcatatcattgtcatgttatatttcctctgtttcataatgatctgatgtttgagaattaagcaaaaatatcattacctcaatgcaaaaatatgaattttctgttctgattggttacttttgtgttataagttagtagttactctttaagattgttgggtgaatatggatgcaggtggagatagtgatggcgttggaggaaaagtttaacataagtgtggaggaatctgatgctcaaaacattacgaccatccaagaggcggctgatttgatagaggaccttgttcaaaagaaacccgcggcggaaacttcctgaaccggctgtcttttctttcctgacctattcttgccttcagagcgttttattacggtatattagaccgtttgttatttttatttatttcggaagctaagattgggtgttgacaatgagacaactttggtacgttgagattgattctttgtggtgattggtcttatgacgaattcataattgtgtattgtttcactaccacctggtcttttctgtatttgagttatgacatcgttttgttagtcgtggttaggttaagttaactaccctcaaagaatgaaaacgagagttgatcttaggtgagttgggtagtatcaagtagggtaaagcagatgtatactgtctactcaaatagaatgggtgtgaaaaaaacattacctgaaaatatgtatgaatgtaatttgactaggatattgttggttttttggacattcttattgggtaatctcaaatatatttgaggtaatttcaaaagtactaataatatggatatccttaaacttttgagtaattgatttttattttattttgtaatgaacgtatttatgtacttattaaacctaattaatttaaactttatatcaatgaaatcatgcaaaagattctaggtctttaattttcttgcagaacaagtcaccccttctcttcttaaactgtaaattttttatcagcactacaattgcaattgcatagatgatggtagtgtaagcaatcttctagccgcttccgggttgcaaagttaccaaatcttggtagattttatagacgatgtagacaatcaatacatatctccgagatgataccacctccaatattttttatacttaatgatttttgtccaatcttactttgaaaacaaatatgttcaaaccccctaaaacaacccaatcatgatatgagtagtatttctcatccttgtatgttttgccatatagattaatgtttctaatcctccaatttcgtaatggtacagttgcttgagaatctcaagcaatcatcataaaaatatcacttaaatcgatacaaaatataaaataaatcatgttagacatgaagaataaaagacaagagttcattacaatattaatcacaagctttacattcataaatctaccaaaagccaacactacttcacacataaatatttttctcttgattcatatgtaattcaaaattgaatcgataactaattattagtaatctgtattaatgtacccagttgttatttgtggttccataattaatttaaaaggttttaaaaataaaacaattactaatgattttaaaattgcacaaatgggtttagttgaggaaaaaatatattaaagaaatgggtcccacgttctctcaacttcctctcccgccaccattcggtccacgcgtacctcgtttacatcttctcccttcttcttcctcagcagctcaatcgaaaagtctttcccaccttgttgactccgtcgatggcgcggagaccaggaacctccgcttcttcttcacccacgatgtctccgtctcatcggatgagcggcggcggaggaggaatctccggcaaaagcacgctccggaaacaaaacgccgccgagctactcgcgaaggtcatggagaagcgcgaatatgattatgattacgacgatgaagatggaggtgaagatctgtaccaggtacatcttcctcctcttactcagtctcgaagacgagatgataagcgtattggtaagggctcagtcaacgagaaaaaggctccggcgaagaaaccgatcatacttccggcgcctaaatttgatgatgaatccgaagatgatgaaactagagctaattttcgcccaaatccagtgataattcctaaaaagaatgctagggaaccgagaaaagctccggcgacgaaaccggtcgttcttccgccacctaaattttccaatgtgcgccggattccagtggagatttctggaaggaatgctaggggttcgaaagaagcttcgacggtgaaacaagtcgttagtacgcctaaatttgacgatgaatacgacagtgatgaaattacagaggatgttccccggaatccagtggagattaggggtccggtcagaggaaaagtagctccggcggtcaaacccgtagtcgttcttccgactaaatttgacgatgaatacgacagtgatgaaattacagaggatgttccccggaatccagtggagattaggggtaccgtcagaggaaaagtagctccggcggtcaaacccgtagtcgttcttccgactaaatttgacgatgaatacgatagtgatgaaattacagccgatgtgtcccggaatccagtggaggttagggatccagtcagagggaagttagctccggtggtgaaacccgtcgttcttccgactaaatttgacgatgaatacgatagtgacgaaattgcagctgatgtctcccggaaggcagtggagattcctcaaaagaatgaaaagagtacactcagggttagagtcccggcatattcacgtcggaatccgttggaggaatttgagcagaacggagaagacaagcaaaatgttcaatgtgatgtgcctgctaaacaatcggaagctcaattaaagtataagaaaaggtaaagcaaatttttctcaagtcaaagcttcttttgtatatgttgtgtttgacgaaatgactgggaacgaacgattagtttcaggtaccatcctgcaaatattttagcacctaataactctaaccagcaggaagatgatcgagaagcttcagccctgcgtgatgaagtaggtgtttcccaaaatacaagaaaactattttggttacatcactgatctctcatttgaatccaactcattatcattgcagttagacatgcttcaagaagaaaacgataatataatggataaggtcagtgtgaacgctctctttatctctaatgtaggttatttgtttgtgtttgctgcctttttgtacttgatgtgtatattcttgagttacatatgcagcttcagcgcgctgaagaaagacgcgaagctgcagaagcaagggctaaagagcttgagaaacaggtgtttattatatccagtacatttgacttttgtagacatgtttatatacaatgttgatggttacttttaagcttggtatgacttacaacaggttgcttctctaggtgaaggagcaaattttgatgtcaagctcttgaagaggtttgattttctcgtctttattatatagcctttgttcacaaaattgggttttcacgaactttgcgctgatccctccaggaaagaagcagcattgcgtcaaagagaggtccgtaatgcattcatatctaaaggatgttgttgcatttgttcttcgcaatatacatgtcctttattcttctgctagcttgtgttggcagttgctttgacagtaaagttattgaaaaggagaaacataaatctatttgcaggcagcattaagggctgctgaacagaaaagagatggaagaaatagggaaactaatgcccttagctcagaatttcaggtacaatgctctggtaaccaatactcaagctggtactaaacagtagtttactagactttattgtataaacctttcaacttgacaagggaacaatcatctcttctgtgttgtgttatgatcagagtttaaaagatgaagcagagaaatccacggaacagctccaggaggttgaagctgaaataaagtctcttcggacaatgatacatagaacgattttgagtcaagaagaaatggtttgcttacaatctaaactagaattttgtgcattgacggtttaactccaccttctttgtttcatttaactatatgattgaccaaccttgcaggaggaagttgttctaaagagatgctggcttgctcgctactgggaattagctgttcaacatggtaagagaatttttctctcgtaaagatacaattgttttatcctctgttgggtattgacctgcaatgatggatatgatgaagtaacctgttcttctcatgatgatgccaagggttcaaatggttttgaagatctcataaattggtcctattatgattaaaacatgattagagcatatgcatgtttcccattcacgcagtgtacttgtccactaaactgtatactgacatggagaacaactatgtgatccccgctagctgatcatttgcccttatttggaaatgtttacttatgcatttcattgggtcactcttaggaatatgtgaagatatatccacatcaagatatgaacattggtcagctttagctcctcttccctctgaagttgtcctttccgctgcccaaaagtctgaagattcctggcagacaggtttgatcttcaactatcctgccaatatttcccacataatcatttagtttgagtatataaaactaattggtaaaatcacatctcgcaggtggtagcgatcgcacttggagcaaagtcatcagtaatttcagtgatttgaatggagaagggaacattgagagtatgcttgctgttgaaacgggattacgagagatagcatccttgaaggtttatgcacacattttgatctgtttattactaaaaaaaactgtttcccagaaaatacacatctcattcatatcatttcttgcacctcataggttgaggatgctgtaatgcttgcactttcccggtatagacagacaaatgtggctcgacaagccgtcactggtaaaactatatctaaaactgattggcacatataaatactgatgtgatgttatacaacagacactcatctcatcttaatatccagatcccagggtgcaaggggaacctaagttctccgaaacatttggtgagtcacatccttaaactgttttcgttactatctagacagagtatcatataagtaaacaagcctctcaacaaaacctgttttcttgttcttcttcatctatattgtatttgaatcttatgactaagcaggaagggtttattctgaattttgaatgcagagttgagtcatgatgagcaacaagatattctctttaaagaggtaagttacatctttaccgggagagtttagcttttacttagcaggatcatatacattaactcaaaaaacatatatacatggtgtgtataggcatggctgctgtatttctggaaaagagctaaaattcatggcgtggaaagtgatattgcggaagagcgtcttcagttctggatcaaccgactcgggcaacattcatcttcacatgatgcaattgatggtatatttattacttgaagctaaatcagttaaagtaaagaatctgattccttttgtgtttgctgggacagtggaaagaggaatgagggagctaaggaagcttggaatagaacaacaattgtgggaaacatctcgtaaagaactcatcgactcctcttttcttccttcttattccgtttctgactacaatgacgagtgaccacctctactctcctctttgcctccaattttctttattcacgacacacgctcacataaacatacacatacacacacaaaggtaatcaaaatcattttttcctgctcgacaaagcttagaagaaacacaaaagaattcatactacatctgttttgctttcagactgtgttccaattgttgatatatgtttggcttccatgttgttacttgtataatactcttcgttacctcacccaaataacccaaatacaggttttttgagaacaaaaagctgaatttcatatagttaggggcaaaaatataaattttatatagttgagggcaaaactagaaagtttgtgtataaaaaaggtcgaaacgttaaaatatgataaagaaactggtctgtgacataccgcattaagatgggtcccatagaaatcgaaatgtggatcgtctccttccctatcttatccaggataacgataacaacactctctctctcactgcaagagcgcgaaacagagtaaggctcactttgttttagctttctcctctacttcgataatgccgtttgctccttccttgttgtcatcgtcttcctcagtctctcaatttcttcccagattccccaacgcgactagattcaatgtaactccacggagcagagccgccaccgtcgtcgcggcatccgtcaccgacctagccggggtcgacagtacaacaatcgccgtactcggtggaggatccgtagcagcactcgcggcgatggtttccttaacggatccggagaggaggcggaaattgcaggcggaggaagttggcggaggcgataaggaggttgtgagggagtatttcaatagcacggggttcgagaggtggaggaagatctacggtgagactgatgaagtgaatcgagtacagaaggatattcgactcggtcatgctaagacggtggagaacacgatgcttatgctgactgaagatagatccttggccggtgtcacggtttgcgacgccggttgtggaaccggtttgctctcgattccacttgctaaggaaggagcaatcgtctctgcttccgatatttctgctgctatggttgctgaagctgagatgaaggtgagcttcttcgattcaattatgattattggtcaattatgatcaagaaatttttcatatcgaaatgcagaatctagatgctcaatgataagatgttttgagttttgacatagagtttgttaaggaactgcattattagaatctgaatctttgtgcttgtcttgaatatgcataggcaaaggcacaactaccatcagagaatttaccaaaatttgaggtgaatgatttggagagcctaactgggaagtatgataccgttgtatgtctcgacgtgttgatacattacccgcagaacaaagcagacggaatgatcgcacatcttgcttctttagcagagaagagagtgattctgagttttgctccaaagactttttactatgatatcttaaagagaattggagagcttttcccagggccatcaaaagctacaagggcgtatctacactcggaggcggatgtggaaagagcgttgggtaaagtcggctggaaaatcagcaagagaggactcactaccacacagttctacttctctaggctcatcgaagctgttccaatgtagaccaatttgaaaactaggtcagtttttggaaaactattcatttttcattctttaactcgttctggtgttgtcactaagaaactgtttatggtgtcattgttaatgaattgagagccgaatacatgcatgtaccaaatgtactacatctcaactttcgacctcacgagtttattagaatttatgcttcttcatatctttatttggatgcagaaatcaaatttgacggttagctttccgtttggaacttttgcagtagatctctgtatagcatattccgagaaggattttcgtggaagacatgcagattctcctaaattcgctgaagagattctcataaactcttcttatatactaggaggacggtctgtacaaacttgcacttctgcagaccctaattgataattggccaaaatgttcaatgtaatcaacgttatttgttgtgctgcttaactgtgtccaaaaacatgtctatacttttctacccattcttgtgcatagtttaaaataaaaaggaaattgaaataaaatgacaaaatgagtcttgttgagcaagaaaatataaaggatattaaacatggttttgaatattggataaatgcaattcaaacaaaaaagcgcttaaactacacatttcacatagtcatcacaaccgacgttttattcaagaaacaaaaataacaccaaaatttaattttcaaaacacaaatgtaacatacttactcccacaaatttcattaatttgttgaccatcagaagtctatcagcatttttgtgggtataaagctataagcttcaatgtctttagaagttctctttgtggaaagagaatctagtactggtcttgtgtgtgaattccaaagctaattgccttaactccttcgtcaataccggtgctccacaatagaacactcctgcacattatgtatacattttcagtttatatcatttctttgtagtcctgaattagattataagatgatttaaaaacaaaatatcaaatcatattctagacctttgttactataccctgcatgcactaatgcttttgaacgtgtaaaacttatgaagctaagctaaactttttgcatgaactgactgcgatatgatcaagatcatattatcatgcaagttgatgcaagcatgcctataacaaagcatcaaaattaataaggggttactggttgatttgacgagagagaaaaagagcttaccaacattagcgccagggtgatccatggctatctgtttgtagacgtttttccaattaggtcgggcgaaatgggacatgacccttgtcccagcaacaatgtctaaaccattcttggcataattaagagactgaagcatccgtatgagcgcggaacgaacgtctccttcttcgtagacactagtgcaatgattgtgtagttctatgactttacttttgtcccgttctgcgatctcgttcatgatgttcttgaaccaatcaaatgtgccctgctcctttgttacccagtagaagtaagcccttcgagtcttgaaagtttctttattaccttgttgctcttgtggcgatcccttctccatttggctgagttgttccttggtctccgtattgttaataatgtccttgataatgctgatcatcggggtggctccaatgccaagacctatcagcaggaccacctcgtacttcttgtagtcttgagctggtgcgccgtacggaccatcaatcataattttggggaaactgcgcaagaagaggtcattgcatttcaaaattattaacaacgttagaaaatcttaggtagattaattttctaacaacaaagaatcttagggatacacacacacatatgatgaatgcattttcccgtacacatgcattttgatgtatgaaatacatatatctaaatgcggcaaaggtatgatatatgattttaagactcaaacacgaaatggaaacttaaacgcaatgaaagtgtatatcgtcatacatctgaagttctcatctatgtatatttgactattttcatatgcctcactaccaaatgattctttaaataccaaatccacatttaatattatttacggaatgtgatcgtataaattccatattatagtagtagttgttgtaaatgacgtctactttctataaatattttttaatagaaaagccagactggccggctgatcttcagaatccaagacttcgcggacaaagacatagactaataaagagaaccagtaagaacatgcttaatttaatcatttgatgtttcctagtagtctaaatgacaaccaagaataggtaggtgttaaattaggtgttgatctggttcgttttgattttgattttttttttagtttgcgtgtatgactagctagctaaatcttggtttatagatgtttattttcacttatgtttactgtgggtttttatgattgtatgaatagttgaatacacacacataaatgttttttttctcaacaacatgcaatttttttataattcttatatagcaattgcggttattatttgtatattgtgttttataaagaccagctaagtaacatgatattttcttaccaccaatcaaatgtcactcatttacgtatgatgtgacaatacttaccggggactatttgcaccattcaacatgtctccgaccggaggtggcttagacacctgaaatataacatgatgcttctcaactatcttttcccgactctaagacttataaaatatataacttagcgaaatttataagtaaaaaaagacctctgagaaaactccttggatagcctctgtccaatctcccaatgcttttatatgaacgctcagatagtcgtcttgtggtgtagaagttattgaaaatggatgcctggagagatatgtatatagtcacataaattgatattgaaatgggtttagaattgttactgatcttaagattgtttttggcgtaccactcaaacggtgaaactgctggacaatttacaaacatgtattggccgctcatgtatttgaagtttgtaggctttgacatctgcaaagtcaatacttttccaggataagctgccatcttaaggacttttactgtcctgatgctggacctgaatgctcgtatcaatctctcgtatgcataaagagctactggtactgccaagtacatccacgtctataaacaaaaaccccgaattagttacgtttttcaaagattcaaaaatgttgaacattgatcaaatactcaccgttttcttgtaccattccttgttgagatatatgtagtatccgtgaaggacaaggagaatgtagactataacgaacaaatggtgagtgtaccagaaggcattgaagctcgcaagtttctttagtggccctggtagctttttctctagcttcccccgtctaaaccaaggcatagccagtgtaaaagcaataaccatcaagaaaaccattacaagccctgttattccttctgttgacttcacaaaatgcaagtatctctttggttgctcctctccgaagaattttccgagaggcatgtattccgctggagttgccgcgattagcagtggaaaatcacacgccaagtgggacacagagtgtatggctactcctatcgcaattcccaccgctataacctgtaggtttaggcgtcaagttaatataaatgattaacaatgttcttttataactaggttaatataatttcgaagcttgtaagaactatgcttttttttttttcacttaaaaagtcaatatatatagaccaacataaatgtgtggttttaccttgtgaaaattgaggttgtcatcaaaaggaacaaaaacacccaacctagtcttatttctaagccatgtgatggtatttctgcaaacaggtaacagaattagggccatgtttagcttcagcgtctctgctgcacctttagccaagcacacacaaggccccaacacttcatacactgctctattcttgtattgaatatacttgtacgcgaagaggatggccataatcgtgagccataacgctatcacccaaactctttgccaactatccaatacaaagaatcttagttgacaataccatctcctcaaatggttagggtcacgtgtaggcttgagactctcagttagcatgtcgctcagctcctttctttcttcactattaatatctgtgcttacagattttgtttccgcttgcagaagcaatttctttagactctccatctgttttaaattcaccacaaaagttacatatagaagcagtattaagaagaaaacatcggtttaatttcagaccatgatcaagaaagtttaccatgatgtatcccatatgatcagggtcaagctcttccattatcattgctgcatattcatctgccttgttttggatgcatgacagatgattggcagaagaactaagcttgatgatctgccaaacacaaaaatacagagtagagttcaaaaactcttctaacaagtaaacatttttcaaaatttattattcattttttgttttcttaaaggaacttgcaacctttagcaaaatttcgtttgtgtttaaaatttacacacataaacaatgaaatcttttatttgttaaaaatgtgaaaaattttctgcatgtaaacgcagaaatcaacatttgaaataatcaagaccttattggtaaactttttacctctctaacttcgtcttccgtaagtctaccatccgagtctttatccatcctgcatttgaaacaaaccctttggctcaaactttacattcattttacaaaacttgtaaagacccaaagaaatgaaacgaatgaccaaaatgtgtgatgattagaaaaaattacaagtcaaagaacgtgataagccttgaatcaaagcttttatcatttatttgttcccaaaatttcttcaactcggtctcagtaatcacatcccctttcaagtgactttttctagctaaggcgtcaaacaattccaaggcaaattcttttgagttcatccctacaatatgtcatcaatattccaagttagatccaaaccatttatttagttaacaattcctcaaatttacaatgtttacctatgcattcaccgaatttcgaccgaagcagcaatccatcagtattggccgtgatcttcaagtaccgcttctccacgacggtccaggcagcgttaccgtcggtcttactgatgatcttgagccctttcaaggcctgaccggccgttgacttcgaccggtccaatcgaggtgccttactctctccagataccattgtcaagcacttcttgaaccacttcaccaaaccgttctgtttctgcatatcaagtttcggattgttcttcacgctcgatccatcatccaccgcgtttccaacgttttccatcgccggatttcggtaggtcgacggcaaagatccgctcagtatctcgctgctgctcttctccgcctctgtgtcctttacttcaaagctcactctctgcattggttcgtcccctttttaacggacaatctcaaagggaaacaaaacgggggagccaggaaaatgatgattaaacgaaataatttgtttcttgcatctcaagtcaatgctctggcggatttagaaactctttggcatgtaatacgagacgacctgaaattttcgcttagttattctttttaaataaacggctacgtccatcagaccatcacaatcaacaaccactatattagataacgcacaaaatatattccaacatgtatacagagagataaataagctaaacatattcaaagaaaataagacatgggccgactggcccacaatttttttttgccttttttggtcaactctcttcattggtagattaattaaagacccgaatacaaaacctcatcagacaattaacacctaagtattaaaaatgtaatatttcaaaattcttccaacatggttgtccatcttctaattcctttgttaatcattcatctatcaaaagctctaagtcaattacctaaccaacgtcaaaatatcaaaatagtaaacaccaacgtccttaccctgttacagttaacatctttgttttttagttcaagtctaaagtcttccaccttaacattgtaaactgatttgtttatccaaaaatcaaaatgatctattatatcaatatttctcatttttttagcacagcaatgcgagatttgttaacagctatggtgatgaattgtgattttttaatgggacaggggcatccacgttattacaactataaatgtccaattgaataatgggccatgccaaactatgaattactgatggtaggtgccaatttgagtttaataaaggagacgatgaaaaacttgacacacacaaaacgcacacacactcagaaaagagcatgtttaattgttcattacacaagcaaaatgaagaactctgtgacacatacacaacaagagagctgtgtccttattacagcgaccaatattttataagagacttcggtgatgcagaactcactgtcactgaagtcaaattgttcagaaatttgcttaagcagaagcagccttggcggcctcaagtctggcacttacagcttcccaagacacaagattggtcatgaatgtctttatgtaatctggtcttcggttctgctcatatacaaatagattgaaacaatcaacaacacaaagaaactcaagaaaaccttgttgctaacaattatgaataagctgttacctggaagtcaaggtagtaagcatgctgttcatgtagcaaaagaaaacaaaaattatcaataaaatttgtaagaaagaaaataggttttaagacaaacaagctataaaagtgtttatttacctcccagacatcaatggtaagcaatggctgcaagaaaattaaccaagattaaaagttaaggatttgcattaactctacggtgatatttaatcaagtaaattgtgtattcaagttccttaatgaaaaacttacgaaagagccgagcacaaggggattcacagcattgggagttttcactactttgagtttttcatttgaatctgaaagcattgagataagagtaaggaagaagttaatatatttatctaaagctcttaaacatttgaaacacttacaagcaagccaggcccagccagctccaaactgagtggctgcagcagcattgaactcttcatagaacttctcataagaagtgaaatctctttcaagcaaagcaagaagctctcctgatggttttcctccaccacctggtttcattgactcccagaagaactcgtggttccacgcctataaacataaccaatggatcatcagctaaccaatcacacacccattttataatctcaaactaaaaataggtttgttaattatcacctgagcagcgttgttgaaagcagggaggagatcaccattgttgtaagtgctgtggataatgtgctctaagggcttgccttcaagctcggttccaagaacctgtttcttgaggttgtccacgtaagctctgtgatgttttccccagtgaaactccagagtttgtttgctcatatgcggctccaaagcatcctttccaattttatatcaaaaaaacatttcatcatattggctattgctctcactcatgactcaaccaataggtccactagaaggaacgaaaatatcagaccaaggaacatctgaatttgaactaggagtggtcatatactagttaaagatttatgaatctaacattgacattacacaacgtaacaattttcttacaaagtaatatgatttggacagtttagtgtagtttgagtaacgggtcagattgagatagtttttgtatacaaaaacaacaaattttcactagttcaattgagggtcaattaagaatcaatgttctatgaaagctatggtttcaaaatcatttcagatatgttgacccatacctaacccctatggccatacccaaatttcccatttgacaaatgtcggatagtacgtaccaactagaacattcacggcctttacccaatatggaccacccaacttgacccgttcctacaattaatttccgggaaaaacactaatgcgtagattgattcgatttttattttcttcaaatatgaattagaggagttcatttgtaacgcctttttggtattggttttccgttaataatagctgaaaatcatttgtaacgcctttgacgaggatgaaaagatatttttagggctttgtgggagcaacaagttatatcatctagtaatagaaaagcaaaatctatagtccaacgaaaacaaaatgacatttgccgacaatatcaatctttatcataagaaagtaccagtgcgaatggaggtggcttgaggacgtagtttgcggtgacagcacttgaagcagccattctttgtaattgaagctgcacatttcagacaaaacatagcattgaattgattatctatttgcccaaaaaaatgaatcaatatccttacaaagacacatgaaaatgtatacatgcgtttatgttgttgggagaccaaacaaatttctaggtgaaagagtaagagaccagagaaactcgaacatgaactaagatgtggatgagagatagaatcagtacctcaagtttcaaggacgagtgaagtgaggagagcacacgccagtggaatctgtgtgttttgagttttatggttggatggctctgctttttggtaatcgagttgtgtcgtacatgtggcagtacgacgtatcattttgtactatcattatctttttgtagtacattttttttttctggcttcgtggctactattgactcattgtgatttgtgtcatcataaattgtcttgaaacttaataacatttgagtcatcataagtggatcagccaatccggtattaaaaaaaaaaaaaatcatcttatttttcaatactataaagcatttataaattataatttattatcttgtgttttcttttcacttattatctcaaaccttccttgctagaccaaattcatgttagacgtatgacgtatcttatccaatttctacaatgtacctaaaactgtgatagagatatatgaacatagtggaaaaaaatcatgatgcttttaatgaaaatctagagattgagaaaaaagatttaaaatttaataggaatcatattgaaatatttctctgttttcattaagccgaatcaccaccttcactcgtgtgatagaggctgatattggtgaatgttgatgacaatcgagggacgacgagcttacatgcacacaacttaagcaaagtccgtttaaagtcgtaggaacaaaaatatttcggttttaagacggaaaatcgtaaaacaccttgtatcttatacagtttttgtttcttgtttgtttggttgcattaaaattaagatgggtaaaccatatgccaataacaatattaacttcattgatggtatttttcaaagatgatgtctgtttaccatttgatatatttctcaaaactattattttcagttaatgaaaaggccgatataaacatattatgatcttgccccatatatatagcttcactccaagctcaataaagttttttttgttggtctccgaaatttcatactcattcttttgtcttcttaaggtgatattataaagagaagggcttctcatatacagcaaatgcctcgttagcgctcaactgtggttcctgccgaagcaaatccaatataccaacatatcttgtcaacaatgcaaatcaattcacataatcttgctacaaaaatcattcactactatatcaattatatatacatcaagttatatttagaatttataccgatttaattttccattagacaagactaatttcgtgactttaattagtatttccttacatattttctaatcgatccctattatgaattttctttttataggtgagaactacatcattttggatctctaatatctaatgtaaaaatgtgaaatttcaaactaatgtttttgatgtattgaagatgtatgaccaatcattaaaaaactaaaatatgttggtccatgaagatccttctaagttggagatagccataacaatattgcaatattatatgagtgagctctaatgatcataattgttcatgataattaagtttagataaaaataattagtatagatgaatggatcacctgagttttttgaggggcttggtttacttcctcttcctcatcaggaggagaagcgcctaagatgagcaaaccaagaagagtagagagaaaatcagcacctcccacttccacaagctctctacctttgtttttgtcgaagatctcatgaaccgttgatctcattgcattcagcaagctcccataagtcatcccgtggccacgttctatggcctgaatgaatgcataagtcattgcccccgtccatgcgctccctgacaattgctgtagtgcacacacgtttctttgtgaggagtacttttagaatgaaggtatggggtaattactataagactataacatctcggtgaaactataaaatgtggatggtttgactggacttgctaaatactatcaaaagttgtttgaaatctagagagattatttatatggccaatagttgggaatgtaccggagtgtcagccgaggtctggtcatcatcgcagcctgtgaaggagaagacttcaccgccactcgtacctttccacattcctgttttaggccgatggtcttcccattcatagtttccgagcctaaaacgaaggatcaagaaaagaaaaaaaaatgggttacatgtgctatgcataagcagtttcttatttgtgttagttcatagggtatagggtttataaccaatataagaactatatggtctccatttgttttttgtttttttaaacatttctacaagctatcgaggtctgcatacacacgtacataacaagaagtcaataattattgaattcgtacctgtccattctacaaagataaggtaagtccatgacggtaccactatgacaagcgtcgacgatggcatggagcttaactccataagggagcggccgtacgattgtagcattgatctcatcgtccacgatgacacctgaagtcctgtggtccaccgggagaagagtctcatcgaagccgtcaacctcgtcgccgttgtcgtccatctggttgttgccgtgaccggagaagtgaaagacgagggaatctcccggtttgcagctaagaacaagccaatgcatcgccattgttatgttgttcttcgttggccatctcattgggtccgcttcttcttctacaacattttgacacttttaacattacttttacgtgttacacaaattatgacattttatgatatagaataataccggtgagcataagaatgcaagattcagggaattggaaacgcttcatcaacatgaacttcatgcagtttgcgtcattgatacatcctttgagttcgtcctttgtgttcttgtaagaaaccccgactatcaccgctcgcttctgtccatgtaccggcggtggaggacccggcggcgcgtggttgaatggagacgatgctggaggcgcgtgagtgaacgggtaagaatctggaggcgcgtggttgaatggagacggtgcatgcggcgcgtgagtgtacggagaaggtgttggcggcgggtagatgaaagtggatggagccggagatgagttggggaaaggaaaagggctcgccgacgcgtgagattggagacggggctcgggggcgatgagagtgaaggcgtgacaaatggcgcagcggattcgggtggctccgggaggaaggtgaagcggcgtacgacagctggagcagtccaccagcaacaacattattttctataataacccaaaactccttttcttttctcgggaaatccaatttccacccaaagtttcttgaaagttgcagattatagcctttagtttctgatgctgggaaaatcatcaatgatcaaagcattggaactttagaagaagatgccaataaggcaaggaagaaaattctttcgacgactttaagcttatccgctaatgtattcgtcaagacttttgtttgatgatcaaatgaagtcgtctcaacttgcatatatacaacccaagttaaattagcaagttgcgaattataattgttccttcattgcagaagtttggatttgatagtgcgaatgaactaattagaatgtagttgactttgattctaatgagtttgcttgacttttatttataattataattttaccaaccatactagtcatatgaagctgttcttataagaccatcgacatggttaatgtatgtggaggacatgacctttttggaaaacttaagtatagtagactgtttctatatacaaaaaagactgtttagaaaagaaaactcttttgaaaaaaaaaagaaaaaaaaaaaaaaaaaattcattctcgaaagcaaagggcccagatgggccataggcccaataatatcatctatggagaaaaagggggtttcgttgtctctaggttttttcagtctgactgatttcagtcatttcgaattttcccacactttctcgacgaagatcaagggggaagatggagaatctcccaccgaacagaggaatgtggaaccaagagtacagtcatggtcggatttctcaaagcttcaggtcggccaagccgctccttgaccggaaaagaccaattgaaaatgcacctaattcctccaatcctttacctcagaggtccaatactttcttccttgcaatttattcgaatattggtttattcttagcttctttgagccattgaactcagttttacaggggttctagtgggtaattcttgtccaatttctgatatcatcgtatagtgacctcttgctcctacattttgccataccttaggatttggtattttgctattagtataatatgtttggttatattaagctctcccttaaattcaagttactgtttcatcctttatctgatcatcggcattgcttcatcagatttgatgtgaaatctgataaatttcgctacctggatgttgcagaatgaaggaatcaatggatactgaatccgtttctcacaatataaacttcaacagcactcctcttatggagttatctgctaatacaccatacaaacgcctcaaaccagagattgagtcatatgctgatggtcatccttgtggcttgagaacccctcctcctaggtttgatctggataaggagatcattaatggatttcagaccgatatttatgcggacgttggatctttatcagaagcttttgttactcccctgaaagaaccagaaagagttacactaagcaatggttgctctacttcttcaattcttgatgatgactttgatgattccattttagaagagattgacttaatatgtgaacagtcagcgagaaaagcagcttgtcaaactccaactaccagcatatatcagactccgtctaaagataataagagtagtgatcccaaggccagcttagattttagggatgttgaaaagtttgaaccagactctaatgttaaattgaagcttgatgaagagactcctaccattgctgctgatcctgcacttctcaattccatgcctgatgagtgttccaaatatatgttgtctttaaacgatagacagcgtgatgcagcttgtagtaatatttcaactcctttgatggttattgctggtccaggaagtggaaaggttggtatctgatagacttcttttagtatgaggcaagaatttttgtgggttttcatgttatacactcagtactgattatttcttttcccatgttagacttccaccatggttggccgcgtcttagtgctgctaaatgaggtactattatcgtcgctgaatgatttagaacatcttccgtacttgagatcttacatatgaaatcagagttgaagttacctctatattttaaattttgtgttctttctaacttgatagggtctgcttccatcgaatatccttgctatgactttcactaaagcagcaacttctgagatgagagaacgcataggaaaatctgctggaaagaaagcagcgaaagacataacaatcagtacattccattcattttccttgcaactttgtcggatgcatgcagacaagtgagaatatgatttgtgaatttcttggtattttggtagttaatctcaagtctaaatgtaggtagaagacattaaatgatttttcctcaccactggaaaatgtcacttagggggtgttattcgttaatggattttaatagaattgaaatccaacactaatccactgttatttaactaatgattctaaatccagctttaaaatctagtgttattggaactcatatttgtaaatcatgcttaatagattctaaagtttggtgttattcaattaagattttaaatatttcattaaaatccaatgttattcaaaactaaaagacttgtaaaatctttgtatattaattgatttgaaatgaaagctctttggagtttcatgagtaaatcattggaatcaaaatccaagacatattgcagagattttgaaattcatacaaacatattcttaaaagcaatatcagaaaacaaatctaaagcttaaataattgactttaactccataattgaataacaccaccttatattttgttaaattggagttacagtgccaaactgacaagaaatggaagtaattcttgaaaacaagattagtttctaaattctattcttgatagtataactcttaggtgattttactttttttttttttttttcttgtttacatgtgttcgtttgaagttgttagttgcatatcacttgttaacatctttaaagttatagatttatgggattcatttaccctatacctttcctactgtcacaggttacaacgtacatctgagttctcagtgtatgggcatgggcaacaaagaagagcgataatagaagcagtgcgtttatatgaggaggaaaagaagaatggaagcaaaacttctgttccatgcgagtctggagaaggtctaaatggtgcaggagcaggagcagtatgtcctgaatatgccaaggatctatcaaaaaaatggcagaaatttgtgacccaggttgccagtaatgatatagttttactttatgttctattaatagcgagtatatcctgtctttcacatataatctggctcttaaaagtagttgtttttaacttgtttccccattttagggaaaagcttccggtaagagtccagagcagtgtcgtaagatgggcaatgagataggagtaagttagctaatttgttttttcaggcatctctactatgaattaattcatatgatatgattctgtactggtgctgatacaggctaaaattcttggaaactacaacgatatcctaaaagcttgcgatgctctggactatcatgatttgatcagttgttcggtcacactcctctctgactttcctgaaggtgaagccacatagataaattttctgtaagttagatttatgacactgagatttccttgtgttcacatgtatttgctgcatttgataaaagtattcaaggaatgccaagatacctggaaagccatcatagttgatgaatttcaagacactagcacaatgcagtacaagcttttacgaatgctaggctctcataatcacataactattgttggtgatgatgatcaggtgcgtttttttccacacaaaaattacctaatttcagttgaatattcgaagtaagtatgatgtatattttcttgcagtccatcttcggttttaacggggcagacagttcaggatttgattcatttcgccgagatttcccaaactacaaagaggtttggctttttgaggctaactcaatgattataccacatatgattaattagcttgaggaaccaaaagctcccattgaattgtgaatgcataacatttatcttactgcttctgattcaggtcaggcttataaaaaactatcgctcctcccgccatattgtggaagccgcctcttctatcataaaaaacaatacgaagcggtgccaatcaaaaagcatttcgtctgaaaactcccaaggatcgaaggcaagttgaatttttcactatgagaaatcgcatcatttaatcactaaagcactaactttttcgtgttttgtccagtttagattacagtcaaggaatgccataatgaggaagcacagtgtgcatatgtcattgacaaaataattgaaatcactaatgatggctcaacaccttgttgttcccatggagatattgctattctttataggaggcaggtcagtccttttcttttccttgatgacatgctgttagaatgtttaaaattttaacatatttacttatgtgttggtaaaccatgaatgtactgatattcaggtgtcaggtaaagtgtttcaaaatgcattccgccagagaaaaataccatttaacgttcatggtgttgctttctacaggaaaaaggtagattgcctcagaaatatctcatttgttaaactgttgcatgatcactaagtatctcaatgttttgacattgacaattcatccgcatggttattgtagctttatttgtttcggacaataagctccatctactaaacataacagctatcaactttttccacgttaggttgtccaagtcattttggccatgctgaagacaacattttccgaatgtgatgatgcttcttataggcgagtgtttaaggcattacttccttttgagaaagaggaaaagaaaagggtgtgtacctcatttggtctcgttttatttcatttgcatgactatctacgatttactgcttatttctcagctgaagctatcaggacataagctgtttgtaattaatttattaccaccgtttgcagattatagaacatattgaaaaaatctccactagtaggaaatgcagcttcatttcagcggcaagtgatatcttcaatgccaagatttctggtaccttcaagaggtattgcttgatgaaattcattaagaaagcaatataatactgctttagttttaattctgaattgggaatatcatttgcttttaggttttctaaccaggacatagatacaagatttctcatataagtgtgtctgcttttatacatgatccatactatagcgatacatatgggtcgttttgtaatccagatgtaagtagtattgtgtgtatatgtgtatatacagattctaagaataggatgctgcacattatattccctcagtattgttatttttattcatgtttgtctcctgttaagcttcttaagttagtttgaatttgaattaaccacaggagccagcttacccagggacgcaaagttttgcaaactcttgacatggtagcaaagctggttgatagggtaagatatttgttttccggtccttgagatactatgaacgcactatcactagttgaagtgatcatgcttatttcaacttagcagtacgaatcccttacttctcatctatttacaggaacaatcactttcagctgtagtaacatgtgtggcaaatatgataccgcaggtaattaatttttctgtcttaagtgatgacatgcttataactattaaccaacattgtcatctccggagtcatatatagaaaattatgccgggaacttttagaatgttttgtttgctaatcaagacatatatacaaaaattggacattatgcttgacaattcaatctcatttttgaaagtttgtagaaatcgtgattataggcttaagttataactttcactgaaaatagtttttgaacacgtgactttgctttgaagatttactgtgtctttccttacaacttttagaaataccttcttgagcaacgagcagttgtggataatgatggaggaaaactgcttaatgaagacaacgatcttagatctgtaagtggggaatcgttttttttccagtacttatgtatgtattaaaactattttggggaataatttcctgttttgcaggtactccagtacttaatggatgatgtagctgagtttatttccactcattgcactacaacagaagaagaggatgcaatcaaagaaaaaaaaggctgcaatcaacttcattcatttatcaactatatctccgagcgggaaactgaaaattttcgttcaagaagacgtgacaatgaaaattctgtcacattgaccaccattcatcaggtgtttttcatccactcgagcagttcacagtttgttatcaattggtgttagaattagcttctttaggtagtaatggaaatattggctaatatctcttgtatgtctttacgcagtcgaaaggtttggaatgggacatagttttcatagtcaaggtacatatcatcttctctggatttctttgccgagttattggcagttatggaccaagcaagatatgaaatactttttttatagaatcaatgaataaaaaagtccttggcccacttttaatcaattttttggtaaacaggctaatgaaaatgaaattcccctattacatgagtctaacggcaatgcatcagagagtggaacctcacttgaggtatcacttttccttctcatgaactctctatccgtttcccacctctgcgaactctacaaatatatatatttaaccatgcattgtctgtttaaattgtaggaggaacgtcgccttctgtatgttgctatgactcgtgctcgcaagaaactattttttttgtacgtgacagtggattcgaactggcaggttagtactacacatggtttatgaattagtcctctcaaactttgtctctgactaatgatgttcttccatctaggtgctccaaccctcacgatttcttaaagagattccaggccatcttctacaggttcaggtctcagtctgtttgcaactttatgcatgataatgtgatagcactaacaagaactctcaataatgttctgtagggagacatgagcgtaaatgactgcagaaaagttcatgaaaatcttcctaacaaaactgagcagagtgtctccagttttggaacagatataaaacatgaagaaagtaaactaacggacaatgatgtgatgaacattccagaggattatgcctccgaggagtcaatagccgcatatgcactcaatggaaacaactttcttaagaggttacatgcttaaaacgaacagaactatataatttggcactcttggtctggttcatgattcaaaggtgtagaactttcatcccaaacaggtttgatgtggaggttagatcagttgtctctcacttatttcacaactgggctaagaaacaagcattccaggaaccaaagaggctgattgacaaggtgagtatcgcatacgctgcaacatttctccatcaactaatgtaagcgccagtcaattttcttacttcttacttcttacctttcatgtcaatgttttcgtacatgcaggtacggtttgtgattggtgaacgtttggccatcaagaagaacaaacacaaggttgtacgtctatagtcttattcactataacaagttctgacagtagttttcttgtttggttacttattatgaagcttaatggtaaaagtctactgagccataccgagagttgaaatatgctttggtcactaactggatactgcactattttgttaggatgtcttacgagctctcaaatcatcattgacttctgaggaagcgttccaatatgcagaacatgtaagcaatattatctgaaaaacactgttacactaatgaattgataaaaaggaaaactgagacggtgctcatgttcctgtgtacttttggggatatcaggtacttaggtgggaacaacttcctgcagacacacgggctcatatagtgcgtgagaaacaggtaatacatatagctgttttgagaaagcaagaagttataggttaactcactccataaccttgggaaaaaaaaatctgtttcaggaacatttccaaaaactgagaattgaaaactcaatgggcacttcggaagcaacgagtaaacaggtaaaaactcatcaagctctcacatttttgtcaaccgaaatatagaacatcatacatttttgtttatgttttttgaaatggcagatcgcatttctgcatagtctaggatgcacagtggtcccaacatcacgtctccatgcgtcccgcttgattgaacagtacaaatcactctgagattgtatgtgtttatatatgtagtctcatacgttcatatgtattaaacaaaggagcctggaaatgatctcgatttcctaatcttaaatataaaagaacaaacaatggtaattgtaatagtgtattttgtgaaagaaatgatggaaactgttttggtgttgacgtgaaatacactcaaatggccattcatgtatatttggatccaaatgatgtttcgaccattgctcaatcattcataacgttgaattgtcaaaactcataaatcaaaagaaaacccgaaattgttgagaacttcccaaattgtattaccagtactgtagtatcaaattgaaattgatttggacaaagccttgattcatataagcataggatgcatcataaccattggttgcataacaaagacaagaaacaaatgtgatctacagattattgtatttttcatgagacaactcacttctttttatgtgcttgagggaagactgacttagtttcttagccatagcatcggattggatccttgcaacctttctcagctgattgtcttaaacccatgcgacccccttttgccaggtattgctggtggtaattttctgctctgtagaatttcgtagcgggaagtatctctgtgacaatcctcttgttcaatatcttctgctgtttctcaacagcttcacgagctatgcgctcttgctcgtctgtgtagtagtatatacctgatcgatactgcgttcccacatccccaccctacttagatcaacacataaaagttagtaagtgaagaaccacaacaacaacactagattcatcttcaagtgtatgtaggtatagtaacatgaacaagaacagactcaagtacaagatcgcatacgaaaatggaaatggcaatgtcacttccacataatcaaacacgaatcctcatatcaacaaggcctgagattctaactagctcataacaacttagccaatagttacttgagactaccaaatgtatgtagaactaaagactaagggacagagagttcgtctaaacaggtgaatctagtcgttgttatctaataaacaattcagccccaaatgcagaacacacatagagctctctattgattcaaattacgatctgatactgataacgtctagatttttagggttaaagcaatcaatcacctgacgattcaaggtggttggatcatgacgattccagaaaacatcaagcaagctctcaaagctacactctttgggatcatactgaactctaacaacctcgttatgtcccgtagtgccagtacagacatcctcgtaactcggattgtgcacgatgccatggctatacccaacctcggtcttggtcacaccaggaactctctggtaagctagctccactccccagaaacaaccggcgccaaattgcgcgaattgctgacctgaagacggaacatcatcgtcgggtccttgggcgattgcggcggaagatgggtcagcttgggcttgaggacgagacccgaatccgagtctgttgaaaaggttgttcattggggatttgtatacggagattggtcgtcgagaggtttgagggaaaggacaaatgggtttggctctggagaaagagagtgcggctttagagagagaattgagaggtttagagagagatgcggcggcgatgagcggaggagagacgacgaggacctgcattatcaaagcagtgacgtggtgaaatttggaacttttaagaggcagatagatttattatttgtatccattttcttcattgttctagaatgtcgcggaacaaattttaaaactaaatcctaaatttttctaattttgttgccaatagtggatatgtgggccgtatagaaggaatctattgaaggcccaaacccatactgacgagcccaaaggttcgttttgcgttttatgtttcggttcgatgccaacgccacattctgagctaggcaaaaaacaaacgtgtctttgaatagactcctctcgttaacacatgcagcggctgcatggtgacgccattaacacgtggcctacaattgcatgatgtctccattgacacgtgacttctcgtctcctttcttaatatatctaacaaacactcctacctcttccaaaatatatacacatctttttgatcaatctctcattcaaaatctcattctctctagtaaacaagaacaaaaaaatggcggatacagctagaggaacccatcacgatatcatcggcagagaccagtacccgatgatgggccgagaccgagaccagtaccagatgtccggacgaggatctgactactccaagtctaggcagattgctaaagctgcaactgctgtcacagctggtggttccctccttgttctctccagccttacccttgttggaactgtcatagctttgactgttgcaacacctctgctcgttatcttcagcccaatccttgtcccggctctcatcacagttgcactcctcatcaccggttttctttcctctggagggtttggcattgccgctataaccgttttctcttggatttacaagtaagcacacatttatcatcttacttcataattttgtgcaatatgtgcatgcatgtgttgagccagtagctttggatcaatttttttggtcgaataacaaatgtaacaataagaaattgcaaattctagggaacatttggttaactaaatacgaaatttgacctagctagcttgaatgtgtctgtgtatatcatctatataggtaaaatgcttggtatgatacctattgattgtgaataggtacgcaacgggagagcacccacagggatcagacaagttggacagtgcaaggatgaagttgggaagcaaagctcaggatctgaaagacagagctcagtactacggacagcaacatactggtggggaacatgaccgtgaccgtactcgtggtggccagcacactacttaagttaccccactgatgtcatcgtcatagtccaataactccaatgtcggggagttagtttatgaggaataaagtgtttagaatttgatcagggggagataataaaagccgagtttgaatctttttgttataagtaatgtttatgtgtgtttctatatgttgtcaaatggtaccatgttttttttcctctctttttgtaacttgcaagtgttgtgttgtactttatttggcttctttgtaagttggtaacggtggtctatatatggaaaaggtcttgttttgttaaacttatgttagttaactggattcgtctttaaccacaaaaagttttcaataagctacaaatttagacacgcaagccgatgcagtcattagtacatatatttattgcaagtgattacatggcaacccaaacttcaaaaacagtaggttgctccatttagtaacctgaattgcctcctgattctagttgatccccttcaggggatataatacattggatttggaagtttgaaggatctttctgacattgcagaacccaacaaatcactccattggtcacctgaattgcctctgatcctatacccttctttcaccatctcctctctcttctctgacttgtacatggtcgctgttttgttccgatcatccaacgatctattaacattaagcagcaaaccaaagcgtcaatcatccattcaaacccaagattacaatccaagatcaaacaacgtcatgttaccacaaccatggatccagatcaatagttggttaaaaactgtatgagctacattgtaatggaggtccaaaagtagagtatgcatacctcagaataagcttgtcccagttatggaaaccggcattgcgcaggttttcgacagtgataacccggtggttctctctacgccctgtaagcaagataactttgtaccccaaatgtataaccttttggtaaagcttcaagcttggtgctatagcaggtgctatccctttctctacccacatatcaaactttgaatgatcaaaaacttccaacctgcaaattcccaaacagaacaaacattcacatttatcatacatagacaaacaagcaaagaaaaagacagacaacaacacatacctcaaatcttaactaattcgacatagtaaaaagacaaatccatctatacaattatcaaggaaccaactttttatagcaatgttgtaaaatgaaagatttaagataaattacccacaaccgtgttccatgtaataaggaagattcgacaataacgtctcatcaatatcgaaaatccaaatgtctttcccgtcaccgttagattcgaagctgctcgcgtaaaccttagcttcttcggagactctctccacatcgacgacgtaaccttcacccatcaggtaatctttcacgtaatcggcgcattcagctggaatggttttccatggagcgagattgtttgtctccgccgcgaatctccagctcgtgcaatgtagattgacattgtcgtttatgttcttgagctgggtttcgaagatcaatggtcgcgcaatgagatacgagctggagttttcattggagaacgccagaggaatcaaggagaagagaatgagattcacgagaatccgcattgtatatcgccggaaacgccgggagaaaaaaagttgagattttttcaattgggtcttcaagagattcaggacataagcgaaatccgaagaaatatcaaagagaagaggagattttccattctctaatgatgaggaagtggattataagaaccctagaaacagtgaaacatttcctctcaaggtccttttttcaacggagaaatgaggattctcggagaaaagtttctgtttctttttgggcaatggaaaggaagagagacaaaaaagaccaaaataccaaaatgaaaaataaagggcaatggttttgtgttcttatttggaggcaaattaacggatggatccgaatattcgtttacaagatgattaaggtttcgtttcggtttatatttttgattcagcatgtgtgtagtagtagtacaaagcaaaacgtcttgccgtttatatatccacaaaaacgctacacagtttggcttactactatcgtgtagacctccattccatgatggctgtgtaaagagtataattgggtaaaaggttcttgctatgcaacggtgaatccgtcatcggcgatgtgttgtgctccttaagccactcctctatcgcatgacggtcgtatgtgtatccgtctgctgcaacgcacggctcgttcatcacgtcctgcattataccacacaagctcacacattttcaccacaacacactgagatgagatgtttcaacattgaacaaggttttatatagagtttaccttaagtaatgggcagatgaaatgagtgggaggctgtgtcgatacgccggaaaatgagttccttgccttttcagctactttctttaggttttcgagcgctggaagaatctgatctttcaaatcaggtctatctttcccgcgtagctctgtacaacacaaagctaatgcggccaattcccgggtttcttcaatcggccagttaccggctttctgatctaagatcttaaggaactcatcattactatccattgcgctctcaacgaaatgtgtcaatgcaatagcaggttttgctgtgagaagctgaagaagaatcattccaaaggagtagatatctgatttcgatgatatccttccagtgcgctgatattccggatcaatatagcataacgttcccacggggcttgtttgtttgtatatagtgaatttagttgatagaggatcgacttgaaccatcgttgagagtcccacgtctccaactttgctgacaaagttgtgatcaagtaagatgtttgcaggtttaagatcacggtgaatgattggtttaggctttgatttgtggaggaagacaagagccgctgcaacttcccaagcaatcctaaaccgctcaaaccacgggagtggcggactgttgttgacctggaaaagtctgtcctccaagctaccgttttccatgtactcataaactaaagcaccttgctccgggcacgctcctagaaggagaaccaaatgtggatgcctaatcttgctcaagatttcgagctgcaaattagagaggccagtgagataaatgtagactcttatccacaagaattgaaattaaaatcagaaaacttccatatagtgaaaggcacaaaatctcaaacaaagttccttaaaccaaatttgagctcacttccatacctcttgttggaattgtttggaaagttgattttcagctgactgcaaaactttgacaactgcagttgtatgatgcagattacacttgtaaacagctccgtaagctcccattccgatcttcagttcttctgagaatgatgaagtggcagccataatttcttcccaagcaaagtgctgatattgcagctgaggagacccgagagtgccctcgagcttctctttctctttagtatcacgtgcggatttcctttcggcttctcttctctgcgcaatttctctctctgctctttctctcatgctctctgcatctctccttgccttctcaaaattctgcttttccttttctgctaactctcgagcttcatactccttcagctttagctcttcaagctttatggcttcttctaaccgacgttggttaagttcaccaagctgaaacattttcagaaaagcattgagcacaatttaataagtttcatcaaatgcaaagatatatgatattatgaggccttcacctttcgagaagcatcaaaggtttcggtttgagccacagcatacatttcttgaacgtgtctaagctcagctctcaacttctcaacctcaaagtttaggtttacctgaacaaataatcttatattattccgattcacaagacaatgtcgaaattaaaactccattttatacctggttgtctgtataggattgttcacttagagcatcagacatgttggaagcttgttgagaagcccgagagtgtgtagtatcgacacccatgccactccaactaaacctagtaccaaaattcccgtattcacggttgctcgaagaagaactcatagcttcttttctctcctcataatctctacgccgaggagtccaacgtgatgtagtatctgtgctgcttctattgatacttgaaacatctctagcttcctctgcatccaaagacatgcacctggtttcatccgagccaacagaactcgtttccattggaactgatgcctgtcctgcaattgcagggaaatgttgcattctcctgaccggaagggatagaggacgagattgagagtcatgcgcacttgacattacatctgatgaatctagaagagaaaatggggtaacagaattagatatacacaccatttctagtagagtattcacacaaatacattgatgagtcatggacctgaggtgggaccagaagaaccgcttgaagaatttgttctctcactaccatcttctcttatagtagcatttccgtctgagtctgatggtcggacgcatgacaatttaccttttgaaacaacatagactgtacaaaagtttggcatcaaagctgatatcaccgagcaaatatcagctttcctggaattttcaaaacagattcattggtacacggaatagaaagaacaaaggtcgaaagctagcagcagggtggtagtgtaccttgagaaaaaactacgggatgagcctccaatgacaattctgtctattgaatcccgagtcacttcttcagctattgcggctgccacattatctgattcgatcacaagaacttctactgcaacctttcattaaggtaattcaatgagttcatgtaaccttgaaattttcattaaagaagagcgtaagatatctcattataccaaagaaaatacctttctccgcacgaacagttttgtgtaaggtttaagcatttcttcagactgccacagtatttcctgtctatatgcagttactacatcatctcgtacctcggaaatcgggattgcatttcccacttgagaaggagcaagaaatgtacatcaggctttttatcagttacaataagtcttgattttgttttacacaacaataccaaatagaaaaaagggaaacacaggaagaagtcctgagtacaagaaagaaagaaacagaaatacaaggcatagttggaactttacttggtgtaggtacagaagtaatcattggatggatgtgaagcagcttgaagccaacatttccttcagtagcaaatttttcgatcgcccatgtaactacatatttgcttttactgctcccacttagagccacaacgacggtacgagatgggggaggaggaggaggaggaggaagagcaagcttgtctggtgatctactcattgttaatcttttgtgttcttgtttctattgaccctgcacactacaaccatttcagacactgcaaaacaatgttctaaaaagagtgttttgttcctaaagtagagataacatgaaagaaagggaaagctaaaactctccagtcagtgggaatcaacagacagtaattatatttgaactcacatagctgaatgttgaatatcaactcatcaaaccgaaaaggcaaataataataagtattgacagaatctaacggaggtataccgatcatgagatactcttaatagcgttgaaagtcaaatgtctcagagtctaatttggacgaccaaaaggatcgtaaagcaacaacactcaacgaccatcgaagctaacaaatagctagcttcttataaagataaaaaaaaaaactcaaactttccaataaaaatgtcaactttgagcacaatgcaattgcagagaattc

SEQ ID NO: 624 - DNA, 92073 bp, Arabidopsis thaliana
gaattcacaacatatataaaaaaatgataagaagagagcttaattttgagcgagtgttacaaattaattaaaaactgtgtctagtttaacacttaaaaaaattgcaatttaaatgataactacccctggattattttcataacaattttgtacatgaaagaatttaagataatatattattttaccaaattagaaaagctaaaaaaataagtactataatttgttgtatttagtgaaagaataaatgttgctgggaaaaaaagtgaaagaataaatgctttgggtatataccttatattaaaaacaaaacgaaaaaaaattaatgatatttgttaccatatatattatatacaatctataaacagaaattaagataatttatctgaaaagtgttttcaatgaggaaaataacaataaacagaaaaaatgaggtgtatgtacaaagatttgttaccaaatttaaagtattcaaacagaaagtacccatctgtttaggcaaaggattcgatcatcaaacgtcctacaatatcttgttttgcgatctcacccacaaatttatttcctataaattctcttcctctgtctgatctcttctattcaagcccacttcttttctctttctcttgtcttcgtggagttttcggatcttacacaacaatatctttgtcttactgtatttcttgtcctttttcttcttacctttctaacaattattaagaagagtaaagcttgaatttaaataaaaatgatgggagacaatgaaggaagaagaactccgttattgaatcttggggttcaagtatcgatgagagtgttaaccatcggagctgcaatggcctcgatgtgggtcatgatcactaaccgtgaagtcgcatctgtttatggcatcgcttttgaggctaaatacagctactcctctgcctttaggtatatatttttttaaatttattctccttttctatcatcatctacttcttattttatgaaggtgcaatgatctagttattgaaataattcatatatgatacaacgaagcatccatctgcatgaaatgtcatcattcacgttgaaaatatgaagaaaacagatcacacattcggtagaaaagattgaaaagatgaacacatttttctaaaaaaaaacatccctcacgtatgatgtaggaagaacaacatgtgggacaaatcataatttggcatttttcattcatcgatatgatcatctttattgaaagtaagagatcgagtgattaaagtgtatgatttgatgtttgacaggtatttggtgtacgcacagatagctgtctgcgccgcgacattgtttacgcttgtatgggcttgtttggcagtccgcagaagaggacttgtttttgcactcttcttctttgatttggtaactatattacatgtttttgatctaaacattttcatttctatacgtgaatactctttatcttttaatttgaattagcatgttcacaaattatataaataaacgttttgagatgggtttgatattttgatgtacagcttacgactttgacggcgatatcagctttctctgctgccttcgcggaaggttacgtagggaagtacggtaacaaacaggccggttggcttccgatctgcggttatgtgcatggttattgcagtcgtgtcactatctccctcgctatgtccttcgcctcttttatcctcttgttcatccttacggtcttaactgcctccgctgctcgtcattactgattttcttacattttatatcatacaattcaattccttctactccaagataattcagtctttgttatatataattggatttcatgagatgcaaaattgatttgatataatgaaatgaaattgtatgattacttgcatgtatttatctttgagatcacttcttctgttctttgctgtgcttaattagtctcctatttgtttttcttggagaaaatctaagaaacaacaaagtattgacaagaaagaaaacgaaattaagatcttggtaatcggaagagcatttttctaaaacgtataattgtacaataatccttctgccaccaaaagagtgataacatgtttcaaacatgcatagataaaacataatcttattaatgttacatatctcttcacaaaatctattcttccacatatttctcctaaatagggttttagcagagccaacagaaaataaaatgcatacgatctcatcatcactgtatgatggatttccaaaagagaatgttacatatatacatcatcataattcataacatttgcatcagaccaggctcaactagatgcaaaagaaccaagatgggcccgttgaagtaacttatattttggactgggcctgtcacttggcaactgtgggacccacatgaacatgtgccgaagataggcctgaatctccgagaacaaacctccgccacaaaaacagaagacttgttgcttgcgtatcataatacgacgccgtatctctacttgctcgaacaaacccaaaaagatacatatcaagagattaaaccttatccaactaagagaagccatttttattttttttgggtctctgagttgtgtattgagcttcatctccttcaaatggcttccttatcaaccacttccctaagcttcaaagctccgtccaccacaatttcacaggtaatttaacaaattcttctcataaatctcagtgtacagtttgttctcattctttttttttggaaggagtcttaatctcaacatatatagtttctttgtcgtaaacatttctcttaactataatttaagggtggatcctgttatttatcaggttttaaggaaagcctcaagttctcagtctgtgacctttggtcgtttcacgtcttcaacaaagagccttcgtcttcaaatcagttgtgccgtaagtaatcattttgactgaagctaaaatttaaattatatgagaaatgcgataagttaattgtagtatcgtgtgagtgtacctacaggcgaaagcagagacggtgcagaaagtgagtgacattgtaaaagaacaattggctttagctgctgatgttccgctcactgctgaatccaagttctctgctcttggtgccgattctctcgacaccgtatgttacactctctctgtttcatatcattgtcatgttatatttcctctgtttcataatgatctgatgtttgagaattaagcaaaaatatcattacctcaatgcaaaaatatgaattttctgttctgattggttacttttgtgttataagttagtagttactctttaagattgttgggtgaatatggatgcaggtggagatagtgatggcgttggaggaaaagtttaacataagtgtggaggaatctgatgctcaaaacattacgaccatccaagaggcggctgatttgatagaggaccttgttcaaaagaaacccgcggcggaaacttcctgaaccggctgtcttttctttcctgacctattcttgccttcagagcgttttattacggtatattagaccgtttgttatttttatttatttcggaagctaagattgggtgttgacaatgagacaactttggtacgttgagattgattctttgtggtgattggtcttatgacgaattcataattgtgtattgtttcactaccacctggtcttttctgtatttgagttatgacatcgttttgttagtcgtggttaggttaagttaactaccctcaaagaatgaaaacgagagttgatcttaggtgagttgggtagtatcaagtagggtaaagcagatgtatactgtctactcaaatagaatgggtgtgaaaaaaacattacctgaaaatatgtatgaatgtaatttgactaggatattgttggttttttggacattcttattgggtaatctcaaatatatttgaggtaatttcaaaagtactaataatatggatatccttaaacttttgagtaattgatttttattttattttgtaatgaacgtatttatgtacttattaaacctaattaatttaaactttatatcaatgaaatcatgcaaaagattctaggtctttaattttcttgcagaacaagtcaccccttctcttcttaaactgtaaattttttatcagcactacaattgcaattgcatagatgatggtagtgtaagcaatcttctagccgcttccgggttgcaaagttaccaaatcttggtagattttatagacgatgtagacaatcaatacatatctccgagatgataccacctccaatattttttatacttaatgatttttgtccaatcttactttgaaaacaaatatgttcaaaccccctaaaacaacccaatcatgatatgagtagtatttctcatccttgtatgttttgccatatagattaatgtttctaatcctccaatttcgtaatggtacagttgcttgagaatctcaagcaatcatcataaaaatatcacttaaatcgatacaaaatataaaataaatcatgttagacatgaagaataaaagacaagagttcattacaatattaatcacaagctttacattcataaatctaccaaaagccaacactacttcacacataaatatttttctcttgattcatatgtaattcaaaattgaatcgataactaattattagtaatctgtattaatgtacccagttgttatttgtggttccataattaatttaaaaggttttaaaaataaaacaattactaatgattttaaaattgcacaaatgggtttagttgaggaaaaaatatattaaagaaatgggtcccacgttctctcaacttcctctcccgccaccattcggtccacgcgtacctcgtttacatcttctcccttcttcttcctcagcagctcaatcgaaaagtctttcccaccttgttgactccgtcgatggcgcggagaccaggaacctccgcttcttcttcacccacgatgtctccgtctcatcggatgagcggcggcggaggaggaatctccggcaaaagcacgctccggaaacaaaacgccgccgagctactcgcgaaggtcatggagaagcgcgaatatgattatgattacgacgatgaagatggaggtgaagatctgtaccaggtacatcttcctcctcttactcagtctcgaagacgagatgataagcgtattggtaagggctcagtcaacgagaaaaaggctccggcgaagaaaccgatcatacttccggcgcctaaatttgatgatgaatccgaagatgatgaaactagagctaattttcgcccaaatccagtgataattcctaaaaagaatgctagggaaccgagaaaagctccggcgacgaaaccggtcgttcttccgccacctaaattttccaatgtgcgccggattccagtggagatttctggaaggaatgctaggggttcgaaagaagcttcgacggtgaaacaagtcgttagtacgcctaaatttgacgatgaatacgacagtgatgaaattacagaggatgttccccggaatccagtggagattaggggtccggtcagaggaaaagtagctccggcggtcaaacccgtagtcgttcttccgactaaatttgacgatgaatacgacagtgatgaaattacagaggatgttccccggaatccagtggagattaggggtaccgtcagaggaaaagtagctccggcggtcaaacccgtagtcgttcttccgactaaatttgacgatgaatacgatagtgatgaaattacagccgatgtgtcccggaatccagtggaggttagggatccagtcagagggaagttagctccggtggtgaaacccgtcgttcttccgactaaatttgacgatgaatacgatagtgacgaaattgcagctgatgtctcccggaaggcagtggagattcctcaaaagaatgaaaagagtacactcagggttagagtcccggcatattcacgtcggaatccgttggaggaatttgagcagaacggagaagacaagcaaaatgttcaatgtgatgtgcctgctaaacaatcggaagctcaattaaagtataagaaaaggtaaagcaaatttttctcaagtcaaagcttcttttgtatatgttgtgtttgacgaaatgactgggaacgaacgattagtttcaggtaccatcctgcaaatattttagcacctaataactctaaccagcaggaagatgatcgagaagcttcagccctgcgtgatgaagtaggtgtttcccaaaatacaagaaaactattttggttacatcactgatctctcatttgaatccaactcattatcattgcagttagacatgcttcaagaagaaaacgataatataatggataaggtcagtgtgaacgctctctttatctctaatgtaggttatttgtttgtgtttgctgcctttttgtacttgatgtgtatattcttgagttacatatgcagcttcagcgcgctgaagaaagacgcgaagctgcagaagcaagggctaaagagcttgagaaacaggtgtttattatatccagtacatttgacttttgtagacatgtttatatacaatgttgatggttacttttaagcttggtatgacttacaacaggttgcttctctaggtgaaggagcaaattttgatgtcaagctcttgaagaggtttgattttctcgtctttattatatagcctttgttcacaaaattgggttttcacgaactttgcgctgatccctccaggaaagaagcagcattgcgtcaaagagaggtccgtaatgcattcatatctaaaggatgttgttgcatttgttcttcgcaatatacatgtcctttattcttctgctagcttgtgttggcagttgctttgacagtaaagttattgaaaaggagaaacataaatctatttgcaggcagcattaagggctgctgaacagaaaagagatggaagaaatagggaaactaatgcccttagctcagaatttcaggtacaatgctctggtaaccaatactcaagctggtactaaacagtagtttactagactttattgtataaacctttcaacttgacaagggaacaatcatctcttctgtgttgtgttatgatcagagtttaaaagatgaagcagagaaatccacggaacagctccaggaggttgaagctgaaataaagtctcttcggacaatgatacatagaacgattttgagtcaagaagaaatggtttgcttacaatctaaactagaattttgtgcattgacggtttaactccaccttctttgtttcatttaactatatgattgaccaaccttgcaggaggaagttgttctaaagagatgctggcttgctcgctactgggaattagctgttcaacatggtaagagaatttttctctcgtaaagatacaattgttttatcctctgttgggtattgacctgcaatgatggatatgatgaagtaacctgttcttctcatgatgatgccaagggttcaaatggttttgaagatctcataaattggtcctattatgattaaaacatgattagagcatatgcatgtttcccattcacgcagtgtacttgtccactaaactgtatactgacatggagaacaactatgtgatccccgctagctgatcatttgcccttatttggaaatgtttacttatgcatttcattgggtcactcttaggaatatgtgaagatatatccacatcaagatatgaacattggtcagctttagctcctcttccctctgaagttgtcctttccgctgcccaaaagtctgaagattcctggcagacaggtttgatcttcaactatcctgccaatatttcccacataatcatttagtttgagtatataaaactaattggtaaaatcacatctcgcaggtggtagcgatcgcacttggagcaaagtcatcagtaatttcagtgatttgaatggagaagggaacattgagagtatgcttgctgttgaaacgggattacgagagatagcatccttgaaggtttatgcacacattttgatctgtttattactaaaaaaaactgtttcccagaaaatacacatctcattcatatcatttcttgcacctcataggttgaggatgctgtaatgcttgcactttcccggtatagacagacaaatgtggctcgacaagccgtcactggtaaaactatatctaaaactgattggcacatataaatactgatgtgatgttatacaacagacactcatctcatcttaatatccagatcccagggtgcaaggggaacctaagttctccgaaacatttggtgagtcacatccttaaactgttttcgttactatctagacagagtatcatataagtaaacaagcctctcaacaaaacctgttttcttgttcttcttcatctatattgtatttgaatcttatgactaagcaggaagggtttattctgaattttgaatgcagagttgagtcatgatgagcaacaagatattctctttaaagaggtaagttacatctttaccgggagagtttagcttttacttagcaggatcatatacattaactcaaaaaacatatatacatggtgtgtataggcatggctgctgtatttctggaaaagagctaaaattcatggcgtggaaagtgatattgcggaagagcgtcttcagttctggatcaaccgactcgggcaacattcatcttcacatgatgcaattgatggtatatttattacttgaagctaaatcagttaaagtaaagaatctgattccttttgtgtttgctgggacagtggaaagaggaatgagggagctaaggaagcttggaatagaacaacaattgtgggaaacatctcgtaaagaactcatcgactcctcttttcttccttcttattccgtttctgactacaatgacgagtgaccacctctactctcctctttgcctccaattttctttattcacgacacacgctcacataaacatacacatacacacacaaaggtaatcaaaatcattttttcctgctcgacaaagcttagaagaaacacaaaagaattcatactacatctgttttgctttcagactgtgttccaattgttgatatatgtttggcttccatgttgttacttgtataatactcttcgttacctcacccaaataacccaaatacaggttttttgagaacaaaaagctgaatttcatatagttaggggcaaaaatataaattttatatagttgagggcaaaactagaaagtttgtgtataaaaaaggtcgaaacgttaaaatatgataaagaaactggtctgtgacataccgcattaagatgggtcccatagaaatcgaaatgtggatcgtctccttccctatcttatccaggataacgataacaacactctctctctcactgcaagagcgcgaaacagagtaaggctcactttgttttagctttctcctctacttcgataatgccgtttgctccttccttgttgtcatcgtcttcctcagtctctcaatttcttcccagattccccaacgcgactagattcaatgtaactccacggagcagagccgccaccgtcgtcgcggcatccgtcaccgacctagccggggtcgacagtacaacaatcgccgtactcggtggaggatccgtagcagcactcgcggcgatggtttccttaacggatccggagaggaggcggaaattgcaggcggaggaagttggcggaggcgataaggaggttgtgagggagtatttcaatagcacggggttcgagaggtggaggaagatctacggtgagactgatgaagtgaatcgagtacagaaggatattcgactcggtcatgctaagacggtggagaacacgatgcttatgctgactgaagatagatccttggccggtgtcacggtttgcgacgccggttgtggaaccggtttgctctcgattccacttgctaaggaaggagcaatcgtctctgcttccgatatttctgctgctatggttgctgaagctgagatgaaggtgagcttcttcgattcaattatgattattggtcaattatgatcaagaaatttttcatatcgaaatgcagaatctagatgctcaatgataagatgttttgagttttgacatagagtttgttaaggaactgcattattagaatctgaatctttgtgcttgtcttgaatatgcataggcaaaggcacaactaccatcagagaatttaccaaaatttgaggtgaatgatttggagagcctaactgggaagtatgataccgttgtatgtctcgacgtgttgatacattacccgcagaacaaagcagacggaatgatcgcacatcttgcttctttagcagagaagagagtgattctgagttttgctccaaagactttttactatgatatcttaaagagaattggagagcttttcccagggccatcaaaagctacaagggcgtatctacactcggaggcggatgtggaaagagcgttgggtaaagtcggctggaaaatcagcaagagaggactcactaccacacagttctacttctctaggctcatcgaagctgttccaatgtagaccaatttgaaaactaggtcagtttttggaaaactattcatttttcattctttaactcgttctggtgttgtcactaagaaactgtttatggtgtcattgttaatgaattgagagccgaatacatgcatgtaccaaatgtactacatctcaactttcgacctcacgagtttattagaatttatgcttcttcatatctttatttggatgcagaaatcaaatttgacggttagctttccgtttggaacttttgcagtagatctctgtatagcatattccgagaaggattttcgtggaagacatgcagattctcctaaattcgctgaagagattctcataaactcttcttatatactaggaggacggtctgtacaaacttgcacttctgcagaccctaattgataattggccaaaatgttcaatgtaatcaacgttatttgttgtgctgcttaactgtgtccaaaaacatgtctatacttttctacccattcttgtgcatagtttaaaataaaaaggaaattgaaataaaatgacaaaatgagtcttgttgagcaagaaaatataaaggatattaaacatggttttgaatattggataaatgcaattcaaacaaaaaagcgcttaaactacacatttcacatagtcatcacaaccgacgttttattcaagaaacaaaaataacaccaaaatttaattttcaaaacacaaatgtaacatacttactcccacaaatttcattaatttgttgaccatcagaagtctatcagcatttttgtgggtataaagctataagcttcaatgtctttagaagttctctttgtggaaagagaatctagtactggtcttgtgtgtgaattccaaagctaattgccttaactccttcgtcaataccggtgctccacaatagaacactcctgcacattatgtatacattttcagtttatatcatttctttgtagtcctgaattagattataagatgatttaaaaacaaaatatcaaatcatattctagacctttgttactataccctgcatgcactaatgcttttgaacgtgtaaaacttatgaagctaagctaaactttttgcatgaactgactgcgatatgatcaagatcatattatcatgcaagttgatgcaagcatgcctataacaaagcatcaaaattaataaggggttactggttgatttgacgagagagaaaaagagcttaccaacattagcgccagggtgatccatggctatctgtttgtagacgtttttccaattaggtcgggcgaaatgggacatgacccttgtcccagcaacaatgtctaaaccattcttggcataattaagagactgaagcatccgtatgagcgcggaacgaacgtctccttcttcgtagacactagtgcaatgattgtgtagttctatgactttacttttgtcccgttctgcgatctcgttcatgatgttcttgaaccaatcaaatgtgccctgctcctttgttacccagtagaagtaagcccttcgagtcttgaaagtttctttattaccttgttgctcttgtggcgatcccttctccatttggctgagttgttccttggtctccgtattgttaataatgtccttgataatgctgatcatcggggtggctccaatgccaagacctatcagcaggaccacctcgtacttcttgtagtcttgagctggtgcgccgtacggaccatcaatcataattttggggaaactgcgcaagaagaggtcattgcatttcaaaattattaacaacgttagaaaatcttaggtagattaattttctaacaacaaagaatcttagggatacacacacacatatgatgaatgcattttcccgtacacatgcattttgatgtatgaaatacatatatctaaatgcggcaaaggtatgatatatgattttaagactcaaacacgaaatggaaacttaaacgcaatgaaagtgtatatcgtcatacatctgaagttctcatctatgtatatttgactattttcatatgcctcactaccaaatgattctttaaataccaaatccacatttaatattatttacggaatgtgatcgtataaattccatattatagtagtagttgttgtaaatgacgtctactttctataaatattttttaatagaaaagccagactggccggctgatcttcagaatccaagacttcgcggacaaagacatagactaataaagagaaccagtaagaacatgcttaatttaatcatttgatgtttcctagtagtctaaatgacaaccaagaataggtaggtgttaaattaggtgttgatctggttcgttttgattttgattttttttttagtttgcgtgtatgactagctagctaaatcttggtttatagatgtttattttcacttatgtttactgtgggtttttatgattgtatgaatagttgaatacacacacataaatgttttttttctcaacaacatgcaatttttttataattcttatatagcaattgcggttattatttgtatattgtgttttataaagaccagctaagtaacatgatattttcttaccaccaatcaaatgtcactcatttacgtatgatgtgacaatacttaccggggactatttgcaccattcaacatgtctccgaccggaggtggcttagacacctgaaatataacatgatgcttctcaactatcttttcccgactctaagacttataaaatatataacttagcgaaatttataagtaaaaaaagacctctgagaaaactccttggatagcctctgtccaatctcccaatgcttttatatgaacgctcagatagtcgtcttgtggtgtagaagttattgaaaatggatgcctggagagatatgtatatagtcacataaattgatattgaaatgggtttagaattgttactgatcttaagattgtttttggcgtaccactcaaacggtgaaactgctggacaatttacaaacatgtattggccgctcatgtatttgaagtttgtaggctttgacatctgcaaagtcaatacttttccaggataagctgccatcttaaggacttttactgtcctgatgctggacctgaatgctcgtatcaatctctcgtatgcataaagagctactggtactgccaagtacatccacgtctataaacaaaaaccccgaattagttacgtttttcaaagattcaaaaatgttgaacattgatcaaatactcaccgttttcttgtaccattccttgttgagatatatgtagtatccgtgaaggacaaggagaatgtagactataacgaacaaatggtgagtgtaccagaaggcattgaagctcgcaagtttctttagtggccctggtagctttttctctagcttcccccgtctaaaccaaggcatagccagtgtaaaagcaataaccatcaagaaaaccattacaagccctgttattccttctgttgacttcacaaaatgcaagtatctctttggttgctcctctccgaagaattttccgagaggcatgtattccgctggagttgccgcgattagcagtggaaaatcacacgccaagtgggacacagagtgtatggctactcctatcgcaattcccaccgctataacctgtaggtttaggcgtcaagttaatataaatgattaacaatgttcttttataactaggttaatataatttcgaagcttgtaagaactatgcttttttttttttcacttaaaaagtcaatatatatagaccaacataaatgtgtggttttaccttgtgaaaattgaggttgtcatcaaaaggaacaaaaacacccaacctagtcttatttctaagccatgtgatggtatttctgcaaacaggtaacagaattagggccatgtttagcttcagcgtctctgctgcacctttagccaagcacacacaaggccccaacacttcatacactgctctattcttgtattgaatatacttgtacgcgaagaggatggccataatcgtgagccataacgctatcacccaaactctttgccaactatccaatacaaagaatcttagttgacaataccatctcctcaaatggttagggtcacgtgtaggcttgagactctcagttagcatgtcgctcagctcctttctttcttcactattaatatctgtgcttacagattttgtttccgcttgcagaagcaatttctttagactctccatctgttttaaattcaccacaaaagttacatatagaagcagtattaagaagaaaacatcggtttaatttcagaccatgatcaagaaagtttaccatgatgtatcccatatgatcagggtcaagctcttccattatcattgctgcatattcatctgccttgttttggatgcatgacagatgattggcagaagaactaagcttgatgatctgccaaacacaaaaatacagagtagagttcaaaaactcttctaacaagtaaacatttttcaaaatttattattcattttttgttttcttaaaggaacttgcaacctttagcaaaatttcgtttgtgtttaaaatttacacacataaacaatgaaatcttttatttgttaaaaatgtgaaaaattttctgcatgtaaacgcagaaatcaacatttgaaataatcaagaccttattggtaaactttttacctctctaacttcgtcttccgtaagtctaccatccgagtctttatccatcctgcatttgaaacaaaccctttggctcaaactttacattcattttacaaaacttgtaaagacccaaagaaatgaaacgaatgaccaaaatgtgtgatgattagaaaaaattacaagtcaaagaacgtgataagccttgaatcaaagcttttatcatttatttgttcccaaaatttcttcaactcggtctcagtaatcacatcccctttcaagtgactttttctagctaaggcgtcaaacaattccaaggcaaattcttttgagttcatccctacaatatgtcatcaatattccaagttagatccaaaccatttatttagttaacaattcctcaaatttacaatgtttacctatgcattcaccgaatttcgaccgaagcagcaatccatcagtattggccgtgatcttcaagtaccgcttctccacgacggtccaggcagcgttaccgtcggtcttactgatgatcttgagccctttcaaggcctgaccggccgttgacttcgaccggtccaatcgaggtgccttactctctccagataccattgtcaagcacttcttgaaccacttcaccaaaccgttctgtttctgcatatcaagtttcggattgttcttcacgctcgatccatcatccaccgcgtttccaacgttttccatcgccggatttcggtaggtcgacggcaaagatccgctcagtatctcgctgctgctcttctccgcctctgtgtcctttacttcaaagctcactctctgcattggttcgtcccctttttaacggacaatctcaaagggaaacaaaacgggggagccaggaaaatgatgattaaacgaaataatttgtttcttgcatctcaagtcaatgctctggcggatttagaaactctttggcatgtaatacgagacgacctgaaattttcgcttagttattctttttaaataaacggctacgtccatcagaccatcacaatcaacaaccactatattagataacgcacaaaatatattccaacatgtatacagagagataaataagctaaacatattcaaagaaaataagacatgggccgactggcccacaatttttttttgccttttttggtcaactctcttcattggtagattaattaaagacccgaatacaaaacctcatcagacaattaacacctaagtattaaaaatgtaatatttcaaaattcttccaacatggttgtccatcttctaattcctttgttaatcattcatctatcaaaagctctaagtcaattacctaaccaacgtcaaaatatcaaaatagtaaacaccaacgtccttaccctgttacagttaacatctttgttttttagttcaagtctaaagtcttccaccttaacattgtaaactgatttgtttatccaaaaatcaaaatgatctattatatcaatatttctcatttttttagcacagcaatgcgagatttgttaacagctatggtgatgaattgtgattttttaatgggacaggggcatccacgttattacaactataaatgtccaattgaataatgggccatgccaaactatgaattactgatggtaggtgccaatttgagtttaataaaggagacgatgaaaaacttgacacacacaaaacgcacacacactcagaaaagagcatgtttaattgttcattacacaagcaaaatgaagaactctgtgacacatacacaacaagagagctgtgtccttattacagcgaccaatattttataagagacttcggtgatgcagaactcactgtcactgaagtcaaattgttcagaaatttgcttaagcagaagcagccttggcggcctcaagtctggcacttacagcttcccaagacacaagattggtcatgaatgtctttatgtaatctggtcttcggttctgctcatatacaaatagattgaaacaatcaacaacacaaagaaactcaagaaaaccttgttgctaacaattatgaataagctgttacctggaagtcaaggtagtaagcatgctgttcatgtagcaaaagaaaacaaaaattatcaataaaatttgtaagaaagaaaataggttttaagacaaacaagctataaaagtgtttatttacctcccagacatcaatggtaagcaatggctgcaagaaaattaaccaagattaaaagttaaggatttgcattaactctacggtgatatttaatcaagtaaattgtgtattcaagttccttaatgaaaaacttacgaaagagccgagcacaaggggattcacagcattgggagttttcactactttgagtttttcatttgaatctgaaagcattgagataagagtaaggaagaagttaatatatttatctaaagctcttaaacatttgaaacacttacaagcaagccaggcccagccagctccaaactgagtggctgcagcagcattgaactcttcatagaacttctcataagaagtgaaatctctttcaagcaaagcaagaagctctcctgatggttttcctccaccacctggtttcattgactcccagaagaactcgtggttccacgcctataaacataaccaatggatcatcagctaaccaatcacacacccattttataatctcaaactaaaaataggtttgttaattatcacctgagcagcgttgttgaaagcagggaggagatcaccattgttgtaagtgctgtggataatgtgctctaagggcttgccttcaagctcggttccaagaacctgtttcttgaggttgtccacgtaagctctgtgatgttttccccagtgaaactccagagtttgtttgctcatatgcggctccaaagcatcctttccaattttatatcaaaaaaacatttcatcatattggctattgctctcactcatgactcaaccaataggtccactagaaggaacgaaaatatcagaccaaggaacatctgaatttgaactaggagtggtcatatactagttaaagatttatgaatctaacattgacattacacaacgtaacaattttcttacaaagtaatatgatttggacagtttagtgtagtttgagtaacgggtcagattgagatagtttttgtatacaaaaacaacaaattttcactagttcaattgagggtcaattaagaatcaatgttctatgaaagctatggtttcaaaatcatttcagatatgttgacccatacctaacccctatggccatacccaaatttcccatttgacaaatgtcggatagtacgtaccaactagaacattcacggcctttacccaatatggaccacccaacttgacccgttcctacaattaatttccgggaaaaacactaatgcgtagattgattcgatttttattttcttcaaatatgaattagaggagttcatttgtaacgcctttttggtattggttttccgttaataatagctgaaaatcatttgtaacgcctttgacgaggatgaaaagatatttttagggctttgtgggagcaacaagttatatcatctagtaatagaaaagcaaaatctatagtccaacgaaaacaaaatgacatttgccgacaatatcaatctttatcataagaaagtaccagtgcgaatggaggtggcttgaggacgtagtttgcggtgacagcacttgaagcagccattctttgtaattgaagctgcacatttcagacaaaacatagcattgaattgattatctatttgcccaaaaaaatgaatcaatatccttacaaagacacatgaaaatgtatacatgcgtttatgttgttgggagaccaaacaaatttctaggtgaaagagtaagagaccagagaaactcgaacatgaactaagatgtggatgagagatagaatcagtacctcaagtttcaaggacgagtgaagtgaggagagcacacgccagtggaatctgtgtgttttgagttttatggttggatggctctgctttttggtaatcgagttgtgtcgtacatgtggcagtacgacgtatcattttgtactatcattatctttttgtagtacattttttttttctggcttcgtggctactattgactcattgtgatttgtgtcatcataaattgtcttgaaacttaataacatttgagtcatcataagtggatcagccaatccggtattaaaaaaaaaaaaaatcatcttatttttcaatactataaagcatttataaattataatttattatcttgtgttttcttttcacttattatctcaaaccttccttgctagaccaaattcatgttagacgtatgacgtatcttatccaatttctacaatgtacctaaaactgtgatagagatatatgaacatagtggaaaaaaatcatgatgcttttaatgaaaatctagagattgagaaaaaagatttaaaatttaataggaatcatattgaaatatttctctgttttcattaagccgaatcaccaccttcactcgtgtgatagaggctgatattggtgaatgttgatgacaatcgagggacgacgagcttacatgcacacaacttaagcaaagtccgtttaaagtcgtaggaacaaaaatatttcggttttaagacggaaaatcgtaaaacaccttgtatcttatacagtttttgtttcttgtttgtttggttgcattaaaattaagatgggtaaaccatatgccaataacaatattaacttcattgatggtatttttcaaagatgatgtctgtttaccatttgatatatttctcaaaactattattttcagttaatgaaaaggccgatataaacatattatgatcttgccccatatatatagcttcactccaagctcaataaagttttttttgttggtctccgaaatttcatactcattcttttgtcttcttaaggtgatattataaagagaagggcttctcatatacagcaaatgcctcgttagcgctcaactgtggttcctgccgaagcaaatccaatataccaacatatcttgtcaacaatgcaaatcaattcacataatcttgctacaaaaatcattcactactatatcaattatatatacatcaagttatatttagaatttataccgatttaattttccattagacaagactaatttcgtgactttaattagtatttccttacatattttctaatcgatccctattatgaattttctttttataggtgagaactacatcattttggatctctaatatctaatgtaaaaatgtgaaatttcaaactaatgtttttgatgtattgaagatgtatgaccaatcattaaaaaactaaaatatgttggtccatgaagatccttctaagttggagatagccataacaatattgcaatattatatgagtgagctctaatgatcataattgttcatgataattaagtttagataaaaataattagtatagatgaatggatcacctgagttttttgaggggcttggtttacttcctcttcctcatcaggaggagaagcgcctaagatgagcaaaccaagaagagtagagagaaaatcagcacctcccacttccacaagctctctacctttgtttttgtcgaagatctcatgaaccgttgatctcattgcattcagcaagctcccataagtcatcccgtggccacgttctatggcctgaatgaatgcataagtcattgcccccgtccatgcgctccctgacaattgctgtagtgcacacacgtttctttgtgaggagtacttttagaatgaaggtatggggtaattactataagactataacatctcggtgaaactataaaatgtggatggtttgactggacttgctaaatactatcaaaagttgtttgaaatctagagagattatttatatggccaatagttgggaatgtaccggagtgtcagccgaggtctggtcatcatcgcagcctgtgaaggagaagacttcaccgccactcgtacctttccacattcctgttttaggccgatggtcttcccattcatagtttccgagcctaaaacgaaggatcaagaaaagaaaaaaaaatgggttacatgtgctatgcataagcagtttcttatttgtgttagttcatagggtatagggtttataaccaatataagaactatatggtctccatttgttttttgtttttttaaacatttctacaagctatcgaggtctgcatacacacgtacataacaagaagtcaataattattgaattcgtacctgtccattctacaaagataaggtaagtccatgacggtaccactatgacaagcgtcgacgatggcatggagcttaactccataagggagcggccgtacgattgtagcattgatctcatcgtccacgatgacacctgaagtcctgtggtccaccgggagaagagtctcatcgaagccgtcaacctcgtcgccgttgtcgtccatctggttgttgccgtgaccggagaagtgaaagacgagggaatctcccggtttgcagctaagaacaagccaatgcatcgccattgttatgttgttcttcgttggccatctcattgggtccgcttcttcttctacaacattttgacacttttaacattacttttacgtgttacacaaattatgacattttatgatatagaataataccggtgagcataagaatgcaagattcagggaattggaaacgcttcatcaacatgaacttcatgcagtttgcgtcattgatacatcctttgagttcgtcctttgtgttcttgtaagaaaccccgactatcaccgctcgcttctgtccatgtaccggcggtggaggacccggcggcgcgtggttgaatggagacgatgctggaggcgcgtgagtgaacgggtaagaatctggaggcgcgtggttgaatggagacggtgcatgcggcgcgtgagtgtacggagaaggtgttggcggcgggtagatgaaagtggatggagccggagatgagttggggaaaggaaaagggctcgccgacgcgtgagattggagacggggctcgggggcgatgagagtgaaggcgtgacaaatggcgcagcggattcgggtggctccgggaggaaggtgaagcggcgtacgacagctggagcagtccaccagcaacaacattattttctataataacccaaaactccttttcttttctcgggaaatccaatttccacccaaagtttcttgaaagttgcagattatagcctttagtttctgatgctgggaaaatcatcaatgatcaaagcattggaactttagaagaagatgccaataaggcaaggaagaaaattctttcgacgactttaagcttatccgctaatgtattcgtcaagacttttgtttgatgatcaaatgaagtcgtctcaacttgcatatatacaacccaagttaaattagcaagttgcgaattataattgttccttcattgcagaagtttggatttgatagtgcgaatgaactaattagaatgtagttgactttgattctaatgagtttgcttgacttttatttataattataattttaccaaccatactagtcatatgaagctgttcttataagaccatcgacatggttaatgtatgtggaggacatgacctttttggaaaacttaagtatagtagactgtttctatatacaaaaaagactgtttagaaaagaaaactcttttgaaaaaaaaaagaaaaaaaaaaaaaaaaaattcattctcgaaagcaaagggcccagatgggccataggcccaataatatcatctatggagaaaaagggggtttcgttgtctctaggttttttcagtctgactgatttcagtcatttcgaattttcccacactttctcgacgaagatcaagggggaagatggagaatctcccaccgaacagaggaatgtggaaccaagagtacagtcatggtcggatttctcaaagcttcaggtcggccaagccgctccttgaccggaaaagaccaattgaaaatgcacctaattcctccaatcctttacctcagaggtccaatactttcttccttgcaatttattcgaatattggtttattcttagcttctttgagccattgaactcagttttacaggggttctagtgggtaattcttgtccaatttctgatatcatcgtatagtgacctcttgctcctacattttgccataccttaggatttggtattttgctattagtataatatgtttggttatattaagctctcccttaaattcaagttactgtttcatcctttatctgatcatcggcattgcttcatcagatttgatgtgaaatctgataaatttcgctacctggatgttgcagaatgaaggaatcaatggatactgaatccgtttctcacaatataaacttcaacagcactcctcttatggagttatctgctaatacaccatacaaacgcctcaaaccagagattgagtcatatgctgatggtcatccttgtggcttgagaacccctcctcctaggtttgatctggataaggagatcattaatggatttcagaccgatatttatgcggacgttggatctttatcagaagcttttgttactcccctgaaagaaccagaaagagttacactaagcaatggttgctctacttcttcaattcttgatgatgactttgatgattccattttagaagagattgacttaatatgtgaacagtcagcgagaaaagcagcttgtcaaactccaactaccagcatatatcagactccgtctaaagataataagagtagtgatcccaaggccagcttagattttagggatgttgaaaagtttgaaccagactctaatgttaaattgaagcttgatgaagagactcctaccattgctgctgatcctgcacttctcaattccatgcctgatgagtgttccaaatatatgttgtctttaaacgatagacagcgtgatgcagcttgtagtaatatttcaactcctttgatggttattgctggtccaggaagtggaaaggttggtatctgatagacttcttttagtatgaggcaagaatttttgtgggttttcatgttatacactcagtactgattatttcttttcccatgttagacttccaccatggttggccgcgtcttagtgctgctaaatgaggtactattatcgtcgctgaatgatttagaacatcttccgtacttgagatcttacatatgaaatcagagttgaagttacctctatattttaaattttgtgttctttctaacttgatagggtctgcttccatcgaatatccttgctatgactttcactaaagcagcaacttctgagatgagagaacgcataggaaaatctgctggaaagaaagcagcgaaagacataacaatcagtacattccattcattttccttgcaactttgtcggatgcatgcagacaagtgagaatatgatttgtgaatttcttggtattttggtagttaatctcaagtctaaatgtaggtagaagacattaaatgatttttcctcaccactggaaaatgtcacttagggggtgttattcgttaatggattttaatagaattgaaatccaacactaatccactgttatttaactaatgattctaaatccagctttaaaatctagtgttattggaactcatatttgtaaatcatgcttaatagattctaaagtttggtgttattcaattaagattttaaatatttcattaaaatccaatgttattcaaaactaaaagacttgtaaaatctttgtatattaattgatttgaaatgaaagctctttggagtttcatgagtaaatcattggaatcaaaatccaagacatattgcagagattttgaaattcatacaaacatattcttaaaagcaatatcagaaaacaaatctaaagcttaaataattgactttaactccataattgaataacaccaccttatattttgttaaattggagttacagtgccaaactgacaagaaatggaagtaattcttgaaaacaagattagtttctaaattctattcttgatagtataactcttaggtgattttactttttttttttttttttcttgtttacatgtgttcgtttgaagttgttagttgcatatcacttgttaacatctttaaagttatagatttatgggattcatttaccctatacctttcctactgtcacaggttacaacgtacatctgagttctcagtgtatgggcatgggcaacaaagaagagcgataatagaagcagtgcgtttatatgaggaggaaaagaagaatggaagcaaaacttctgttccatgcgagtctggagaaggtctaaatggtgcaggagcaggagcagtatgtcctgaatatgccaaggatctatcaaaaaaatggcagaaatttgtgacccaggttgccagtaatgatatagttttactttatgttctattaatagcgagtatatcctgtctttcacatataatctggctcttaaaagtagttgtttttaacttgtttccccattttagggaaaagcttccggtaagagtccagagcagtgtcgtaagatgggcaatgagataggagtaagttagctaatttgttttttcaggcatctctactatgaattaattcatatgatatgattctgtactggtgctgatacaggctaaaattcttggaaactacaacgatatcctaaaagcttgcgatgctctggactatcatgatttgatcagttgttcggtcacactcctctctgactttcctgaaggtgaagccacatagataaattttctgtaagttagatttatgacactgagatttccttgtgttcacatgtatttgctgcatttgataaaagtattcaaggaatgccaagatacctggaaagccatcatagttgatgaatttcaagacactagcacaatgcagtacaagcttttacgaatgctaggctctcataatcacataactattgttggtgatgatgatcaggtgcgtttttttccacacaaaaattacctaatttcagttgaatattcgaagtaagtatgatgtatattttcttgcagtccatcttcggttttaacggggcagacagttcaggatttgattcatttcgccgagatttcccaaactacaaagaggtttggctttttgaggctaactcaatgattataccacatatgattaattagcttgaggaaccaaaagctcccattgaattgtgaatgcataacatttatcttactgcttctgattcaggtcaggcttataaaaaactatcgctcctcccgccatattgtggaagccgcctcttctatcataaaaaacaatacgaagcggtgccaatcaaaaagcatttcgtctgaaaactcccaaggatcgaaggcaagttgaatttttcactatgagaaatcgcatcatttaatcactaaagcactaactttttcgtgttttgtccagtttagattacagtcaaggaatgccataatgaggaagcacagtgtgcatatgtcattgacaaaataattgaaatcactaatgatggctcaacaccttgttgttcccatggagatattgctattctttataggaggcaggtcagtccttttcttttccttgatgacatgctgttagaatgtttaaaattttaacatatttacttatgtgttggtaaaccatgaatgtactgatattcaggtgtcaggtaaagtgtttcaaaatgcattccgccagagaaaaataccatttaacgttcatggtgttgctttctacaggaaaaaggtagattgcctcagaaatatctcatttgttaaactgttgcatgatcactaagtatctcaatgttttgacattgacaattcatccgcatggttattgtagctttatttgtttcggacaataagctccatctactaaacataacagctatcaactttttccacgttaggttgtccaagtcattttggccatgctgaagacaacattttccgaatgtgatgatgcttcttataggcgagtgtttaaggcattacttccttttgagaaagaggaaaagaaaagggtgtgtacctcatttggtctcgttttatttcatttgcatgactatctacgatttactgcttatttctcagctgaagctatcaggacataagctgtttgtaattaatttattaccaccgtttgcagattatagaacatattgaaaaaatctccactagtaggaaatgcagcttcatttcagcggcaagtgatatcttcaatgccaagatttctggtaccttcaagaggtattgcttgatgaaattcattaagaaagcaatataatactgctttagttttaattctgaattgggaatatcatttgcttttaggttttctaaccaggacatagatacaagatttctcatataagtgtgtctgcttttatacatgatccatactatagcgatacatatgggtcgttttgtaatccagatgtaagtagtattgtgtgtatatgtgtatatacagattctaagaataggatgctgcacattatattccctcagtattgttatttttattcatgtttgtctcctgttaagcttcttaagttagtttgaatttgaattaaccacaggagccagcttacccagggacgcaaagttttgcaaactcttgacatggtagcaaagctggttgatagggtaagatatttgttttccggtccttgagatactatgaacgcactatcactagttgaagtgatcatgcttatttcaacttagcagtacgaatcccttacttctcatctatttacaggaacaatcactttcagctgtagtaacatgtgtggcaaatatgataccgcaggtaattaatttttctgtcttaagtgatgacatgcttataactattaaccaacattgtcatctccggagtcatatatagaaaattatgccgggaacttttagaatgttttgtttgctaatcaagacatatatacaaaaattggacattatgcttgacaattcaatctcatttttgaaagtttgtagaaatcgtgattataggcttaagttataactttcactgaaaatagtttttgaacacgtgactttgctttgaagatttactgtgtctttccttacaacttttagaaataccttcttgagcaacgagcagttgtggataatgatggaggaaaactgcttaatgaagacaacgatcttagatctgtaagtggggaatcgttttttttccagtacttatgtatgtattaaaactattttggggaataatttcctgttttgcaggtactccagtacttaatggatgatgtagctgagtttatttccactcattgcactacaacagaagaagaggatgcaatcaaagaaaaaaaaggctgcaatcaacttcattcatttatcaactatatctccgagcgggaaactgaaaattttcgttcaagaagacgtgacaatgaaaattctgtcacattgaccaccattcatcaggtgtttttcatccactcgagcagttcacagtttgttatcaattggtgttagaattagcttctttaggtagtaatggaaatattggctaatatctcttgtatgtctttacgcagtcgaaaggtttggaatgggacatagttttcatagtcaaggtacatatcatcttctctggatttctttgccgagttattggcagttatggaccaagcaagatatgaaatactttttttatagaatcaatgaataaaaaagtccttggcccacttttaatcaattttttggtaaacaggctaatgaaaatgaaattcccctattacatgagtctaacggcaatgcatcagagagtggaacctcacttgaggtatcacttttccttctcatgaactctctatccgtttcccacctctgcgaactctacaaatatatatatttaaccatgcattgtctgtttaaattgtaggaggaacgtcgccttctgtatgttgctatgactcgtgctcgcaagaaactattttttttgtacgtgacagtggattcgaactggcaggttagtactacacatggtttatgaattagtcctctcaaactttgtctctgactaatgatgttcttccatctaggtgctccaaccctcacgatttcttaaagagattccaggccatcttctacaggttcaggtctcagtctgtttgcaactttatgcatgataatgtgatagcactaacaagaactctcaataatgttctgtagggagacatgagcgtaaatgactgcagaaaagttcatgaaaatcttcctaacaaaactgagcagagtgtctccagttttggaacagatataaaacatgaagaaagtaaactaacggacaatgatgtgatgaacattccagaggattatgcctccgaggagtcaatagccgcatatgcactcaatggaaacaactttcttaagaggttacatgcttaaaacgaacagaactatataatttggcactcttggtctggttcatgattcaaaggtgtagaactttcatcccaaacaggtttgatgtggaggttagatcagttgtctctcacttatttcacaactgggctaagaaacaagcattccaggaaccaaagaggctgattgacaaggtgagtatcgcatacgctgcaacatttctccatcaactaatgtaagcgccagtcaattttcttacttcttacttcttacctttcatgtcaatgttttcgtacatgcaggtacggtttgtgattggtgaacgtttggccatcaagaagaacaaacacaaggttgtacgtctatagtcttattcactataacaagttctgacagtagttttcttgtttggttacttattatgaagcttaatggtaaaagtctactgagccataccgagagttgaaatatgctttggtcactaactggatactgcactattttgttaggatgtcttacgagctctcaaatcatcattgacttctgaggaagcgttccaatatgcagaacatgtaagcaatattatctgaaaaacactgttacactaatgaattgataaaaaggaaaactgagacggtgctcatgttcctgtgtacttttggggatatcaggtacttaggtgggaacaacttcctgcagacacacgggctcatatagtgcgtgagaaacaggtaatacatatagctgttttgagaaagcaagaagttataggttaactcactccataaccttgggaaaaaaaaatctgtttcaggaacatttccaaaaactgagaattgaaaactcaatgggcacttcggaagcaacgagtaaacaggtaaaaactcatcaagctctcacatttttgtcaaccgaaatatagaacatcatacatttttgtttatgttttttgaaatggcagatcgcatttctgcatagtctaggatgcacagtggtcccaacatcacgtctccatgcgtcccgcttgattgaacagtacaaatcactctgagattgtatgtgtttatatatgtagtctcatacgttcatatgtattaaacaaaggagcctggaaatgatctcgatttcctaatcttaaatataaaagaacaaacaatggtaattgtaatagtgtattttgtgaaagaaatgatggaaactgttttggtgttgacgtgaaatacactcaaatggccattcatgtatatttggatccaaatgatgtttcgaccattgctcaatcattcataacgttgaattgtcaaaactcataaatcaaaagaaaacccgaaattgttgagaacttcccaaattgtattaccagtactgtagtatcaaattgaaattgatttggacaaagccttgattcatataagcataggatgcatcataaccattggttgcataacaaagacaagaaacaaatgtgatctacagattattgtatttttcatgagacaactcacttctttttatgtgcttgagggaagactgacttagtttcttagccatagcatcggattggatccttgcaacctttctcagctgattgtcttaaacccatgcgacccccttttgccaggtattgctggtggtaattttctgctctgtagaatttcgtagcgggaagtatctctgtgacaatcctcttgttcaatatcttctgctgtttctcaacagcttcacgagctatgcgctcttgctcgtctgtgtagtagtatatacctgatcgatactgcgttcccacatccccaccctacttagatcaacacataaaagttagtaagtgaagaaccacaacaacaacactagattcatcttcaagtgtatgtaggtatagtaacatgaacaagaacagactcaagtacaagatcgcatacgaaaatggaaatggcaatgtcacttccacataatcaaacacgaatcctcatatcaacaaggcctgagattctaactagctcataacaacttagccaatagttacttgagactaccaaatgtatgtagaactaaagactaagggacagagagttcgtctaaacaggtgaatctagtcgttgttatctaataaacaattcagccccaaatgcagaacacacatagagctctctattgattcaaattacgatctgatactgataacgtctagatttttagggttaaagcaatcaatcacctgacgattcaaggtggttggatcatgacgattccagaaaacatcaagcaagctctcaaagctacactctttgggatcatactgaactctaacaacctcgttatgtcccgtagtgccagtacagacatcctcgtaactcggattgtgcacgatgccatggctatacccaacctcggtcttggtcacaccaggaactctctggtaagctagctccactccccagaaacaaccggcgccaaattgcgcgaattgctgacctgaagacggaacatcatcgtcgggtccttgggcgattgcggcggaagatgggtcagcttgggcttgaggacgagacccgaatccgagtctgttgaaaaggttgttcattggggatttgtatacggagattggtcgtcgagaggtttgagggaaaggacaaatgggtttggctctggagaaagagagtgcggctttagagagagaattgagaggtttagagagagatgcggcggcgatgagcggaggagagacgacgaggacctgcattatcaaagcagtgacgtggtgaaatttggaacttttaagaggcagatagatttattatttgtatccattttcttcattgttctagaatgtcgcggaacaaattttaaaactaaatcctaaatttttctaattttgttgccaatagtggatatgtgggccgtatagaaggaatctattgaaggcccaaacccatactgacgagcccaaaggttcgttttgcgttttatgtttcggttcgatgccaacgccacattctgagctaggcaaaaaacaaacgtgtctttgaatagactcctctcgttaacacatgcagcggctgcatggtgacgccattaacacgtggcctacaattgcatgatgtctccattgacacgtgacttctcgtctcctttcttaatatatctaacaaacactcctacctcttccaaaatatatacacatctttttgatcaatctctcattcaaaatctcattctctctagtaaacaagaacaaaaaaatggcggatacagctagaggaacccatcacgatatcatcggcagagaccagtacccgatgatgggccgagaccgagaccagtaccagatgtccggacgaggatctgactactccaagtctaggcagattgctaaagctgcaactgctgtcacagctggtggttccctccttgttctctccagccttacccttgttggaactgtcatagctttgactgttgcaacacctctgctcgttatcttcagcccaatccttgtcccggctctcatcacagttgcactcctcatcaccggttttctttcctctggagggtttggcattgccgctataaccgttttctcttggatttacaagtaagcacacatttatcatcttacttcataattttgtgcaatatgtgcatgcatgtgttgagccagtagctttggatcaatttttttggtcgaataacaaatgtaacaataagaaattgcaaattctagggaacatttggttaactaaatacgaaatttgacctagctagcttgaatgtgtctgtgtatatcatctatataggtaaaatgcttggtatgatacctattgattgtgaataggtacgcaacgggagagcacccacagggatcagacaagttggacagtgcaaggatgaagttgggaagcaaagctcaggatctgaaagacagagctcagtactacggacagcaacatactggtggggaacatgaccgtgaccgtactcgtggtggccagcacactacttaagttaccccactgatgtcatcgtcatagtccaataactccaatgtcggggagttagtttatgaggaataaagtgtttagaatttgatcagggggagataataaaagccgagtttgaatctttttgttataagtaatgtttatgtgtgtttctatatgttgtcaaatggtaccatgttttttttcctctctttttgtaacttgcaagtgttgtgttgtactttatttggcttctttgtaagttggtaacggtggtctatatatggaaaaggtcttgttttgttaaacttatgttagttaactggattcgtctttaaccacaaaaagttttcaataagctacaaatttagacacgcaagccgatgcagtcattagtacatatatttattgcaagtgattacatggcaacccaaacttcaaaaacagtaggttgctccatttagtaacctgaattgcctcctgattctagttgatccccttcaggggatataatacattggatttggaagtttgaaggatctttctgacattgcagaacccaacaaatcactccattggtcacctgaattgcctctgatcctatacccttctttcaccatctcctctctcttctctgacttgtacatggtcgctgttttgttccgatcatccaacgatctattaacattaagcagcaaaccaaagcgtcaatcatccattcaaacccaagattacaatccaagatcaaacaacgtcatgttaccacaaccatggatccagatcaatagttggttaaaaactgtatgagctacattgtaatggaggtccaaaagtagagtatgcatacctcagaataagcttgtcccagttatggaaaccggcattgcgcaggttttcgacagtgataacccggtggttctctctacgccctgtaagcaagataactttgtaccccaaatgtataaccttttggtaaagcttcaagcttggtgctatagcaggtgctatccctttctctacccacatatcaaactttgaatgatcaaaaacttccaacctgcaaattcccaaacagaacaaacattcacatttatcatacatagacaaacaagcaaagaaaaagacagacaacaacacatacctcaaatcttaactaattcgacatagtaaaaagacaaatccatctatacaattatcaaggaaccaactttttatagcaatgttgtaaaatgaaagatttaagataaattacccacaaccgtgttccatgtaataaggaagattcgacaataacgtctcatcaatatcgaaaatccaaatgtctttcccgtcaccgttagattcgaagctgctcgcgtaaaccttagcttcttcggagactctctccacatcgacgacgtaaccttcacccatcaggtaatctttcacgtaatcggcgcattcagctggaatggttttccatggagcgagattgtttgtctccgccgcgaatctccagctcgtgcaatgtagattgacattgtcgtttatgttcttgagctgggtttcgaagatcaatggtcgcgcaatgagatacgagctggagttttcattggagaacgccagaggaatcaaggagaagagaatgagattcacgagaatccgcattgtatatcgccggaaacgccgggagaaaaaaagttgagattttttcaattgggtcttcaagagattcaggacataagcgaaatccgaagaaatatcaaagagaagaggagattttccattctctaatgatgaggaagtggattataagaaccctagaaacagtgaaacatttcctctcaaggtccttttttcaacggagaaatgaggattctcggagaaaagtttctgtttctttttgggcaatggaaaggaagagagacaaaaaagaccaaaataccaaaatgaaaaataaagggcaatggttttgtgttcttatttggaggcaaattaacggatggatccgaatattcgtttacaagatgattaaggtttcgtttcggtttatatttttgattcagcatgtgtgtagtagtagtacaaagcaaaacgtcttgccgtttatatatccacaaaaacgctacacagtttggcttactactatcgtgtagacctccattccatgatggctgtgtaaagagtataattgggtaaaaggttcttgctatgcaacggtgaatccgtcatcggcgatgtgttgtgctccttaagccactcctctatcgcatgacggtcgtatgtgtatccgtctgctgcaacgcacggctcgttcatcacgtcctgcattataccacacaagctcacacattttcaccacaacacactgagatgagatgtttcaacattgaacaaggttttatatagagtttaccttaagtaatgggcagatgaaatgagtgggaggctgtgtcgatacgccggaaaatgagttccttgccttttcagctactttctttaggttttcgagcgctggaagaatctgatctttcaaatcaggtctatctttcccgcgtagctctgtacaacacaaagctaatgcggccaattcccgggtttcttcaatcggccagttaccggctttctgatctaagatcttaaggaactcatcattactatccattgcgctctcaacgaaatgtgtcaatgcaatagcaggttttgctgtgagaagctgaagaagaatcattccaaaggagtagatatctgatttcgatgatatccttccagtgcgctgatattccggatcaatatagcataacgttcccacggggcttgtttgtttgtatatagtgaatttagttgatagaggatcgacttgaaccatcgttgagagtcccacgtctccaactttgctgacaaagttgtgatcaagtaagatgtttgcaggtttaagatcacggtgaatgattggtttaggctttgatttgtggaggaagacaagagccgctgcaacttcccaagcaatcctaaaccgctcaaaccacgggagtggcggactgttgttgacctggaaaagtctgtcctccaagctaccgttttccatgtactcataaactaaagcaccttgctccgggcacgctcctagaaggagaaccaaatgtggatgcctaatcttgctcaagatttcgagctgcaaattagagaggccagtgagataaatgtagactcttatccacaagaattgaaattaaaatcagaaaacttccatatagtgaaaggcacaaaatctcaaacaaagttccttaaaccaaatttgagctcacttccatacctcttgttggaattgtttggaaagttgattttcagctgactgcaaaactttgacaactgcagttgtatgatgcagattacacttgtaaacagctccgtaagctcccattccgatcttcagttcttctgagaatgatgaagtggcagccataatttcttcccaagcaaagtgctgatattgcagctgaggagacccgagagtgccctcgagcttctctttctctttagtatcacgtgcggatttcctttcggcttctcttctctgcgcaatttctctctctgctctttctctcatgctctctgcatctctccttgccttctcaaaattctgcttttccttttctgctaactctcgagcttcatactccttcagctttagctcttcaagctttatggcttcttctaaccgacgttggttaagttcaccaagctgaaacattttcagaaaagcattgagcacaatttaataagtttcatcaaatgcaaagatatatgatattatgaggccttcacctttcgagaagcatcaaaggtttcggtttgagccacagcatacatttcttgaacgtgtctaagctcagctctcaacttctcaacctcaaagtttaggtttacctgaacaaataatcttatattattccgattcacaagacaatgtcgaaattaaaactccattttatacctggttgtctgtataggattgttcacttagagcatcagacatgttggaagcttgttgagaagcccgagagtgtgtagtatcgacacccatgccactccaactaaacctagtaccaaaattcccgtattcacggttgctcgaagaagaactcatagcttcttttctctcctcataatctctacgccgaggagtccaacgtgatgtagtatctgtgctgcttctattgatacttgaaacatctctagcttcctctgcatccaaagacatgcacctggtttcatccgagccaacagaactcgtttccattggaactgatgcctgtcctgcaattgcagggaaatgttgcattctcctgaccggaagggatagaggacgagattgagagtcatgcgcacttgacattacatctgatgaatctagaagagaaaatggggtaacagaattagatatacacaccatttctagtagagtattcacacaaatacattgatgagtcatggacctgaggtgggaccagaagaaccgcttgaagaatttgttctctcactaccatcttctcttatagtagcatttccgtctgagtctgatggtcggacgcatgacaatttaccttttgaaacaacatagactgtacaaaagtttggcatcaaagctgatatcaccgagcaaatatcagctttcctggaattttcaaaacagattcattggtacacggaatagaaagaacaaaggtcgaaagctagcagcagggtggtagtgtaccttgagaaaaaactacgggatgagcctccaatgacaattctgtctattgaatcccgagtcacttcttcagctattgcggctgccacattatctgattcgatcacaagaacttctactgcaacctttcattaaggtaattcaatgagttcatgtaaccttgaaattttcattaaagaagagcgtaagatatctcattataccaaagaaaatacctttctccgcacgaacagttttgtgtaaggtttaagcatttcttcagactgccacagtatttcctgtctatatgcagttactacatcatctcgtacctcggaaatcgggattgcatttcccacttgagaaggagcaagaaatgtacatcaggctttttatcagttacaataagtcttgattttgttttacacaacaataccaaatagaaaaaagggaaacacaggaagaagtcctgagtacaagaaagaaagaaacagaaatacaaggcatagttggaactttacttggtgtaggtacagaagtaatcattggatggatgtgaagcagcttgaagccaacatttccttcagtagcaaatttttcgatcgcccatgtaactacatatttgcttttactgctcccacttagagccacaacgacggtacgagatgggggaggaggaggaggaggaggaagagcaagcttgtctggtgatctactcattgttaatcttttgtgttcttgtttctattgaccctgcacactacaaccatttcagacactgcaaaacaatgttctaaaaagagtgttttgttcctaaagtagagataacatgaaagaaagggaaagctaaaactctccagtcagtgggaatcaacagacagtaattatatttgaactcacatagctgaatgttgaatatcaactcatcaaaccgaaaaggcaaataataataagtattgacagaatctaacggaggtataccgatcatgagatactcttaatagcgttgaaagtcaaatgtctcagagtctaatttggacgaccaaaaggatcgtaaagcaacaacactcaacgaccatcgaagctaacaaatagctagcttcttataaagataaaaaaaaaaactcaaactttccaataaaaatgtcaactttgagcacaatgcaattgcagagaattcgaaaggttatgaaacattgatcaagtcaatcaaagggaccatcttcagggcatagagttaaacaagaaaaccagaaattgaacctacctggtaaataaaggatgcgactttagtcaaacccaatacaaaaattgagagaagaaatggtggaagcttccatttcacagagcaatcaatttcagaaaataaagagagcagcagaagaagaagatgaagacccacgttggtgctgctaatctcagatacaaacaatgggttcttataaccagagaatctaaaaaagatttgaaaagaagcatcaaaaataataagaaaatgagacaagttggtcatgttaatggtcaaaggaggatcagtcctgggtatatactcttttgttctctcgcctgaattttcttcattatcagagtgacagaaggagagtgtgttctaaaagaaagaagttttctccaaccttaggccttgactattagtttaatcatagtttatctcttaattccctaattatttggtatttaactacattcctcaacgccattattatatcgagtttggccatagttgcacgcatgatctatgtcttcctcacgtctttttgtctcctcccctttatgcatagtggagtggtacaagactttggtagagttcacctacaacattggttcgcatttgaaccgtgatttggccggttcaatttaaacgccggtttacgagttttaacctctggctgattaagtaaccaattttggcaaaatccaaagacgaaggcaaaactctctggctgatcaagaggattcgattaggctctttgaccttgtcaacaaagaccttttagaataaaagcattcaaagtatctatagaagctaaaaacattaaaagttacttatggaaaacgaattggcatgtcattgttccttgatgattgatgataaaaggtggaaaaaactcgaattttaaacttgtcttgtctcgacgctaaaatcttcatcccctgtagtcattcatcatgaaatattcgatcaggacacattattttcaaatttcaattatctaatatctctataaacttaaaatctattattattttcttatgttgattctccttttttccgtacgaaatgtcttcccactttcaaattggttttggagttttcatgctcttgagtctagtattcgtattactattgtgtattctgaatgtaaacgactagtgttcaggtcaatatatcaatgattattttctccattctcgttttgtttgatgcaaaaactaaagaacaaattctgtcaaaaatataagaatatatatcaatattgtgttgcactacataatattctttttactatgaatggccatctttttttaagaaaaaaatggacgaaaaaggcagagtttgtccaatgaaaactggataaatgacattagtaaatagcaaatgacatataatttatttataacttattaataggaaatttgcaaatgggtattttcttacaatttgtttcttttgttgtgtgtgtggtcaagatcttcttttaatacatgatcgagtgtagaaactctaattatatggcgatgatgaaatttgatagtggaagaacttttaaatatgataatttacaatgttgaattagatacaaatatcttaatttattaatggctgaaatgacttgatttattaattacataaaggtttaaatgcaaaagtaacctttgtgtacacatttgttttgaatagtttacaaagttactctaaaataatctgctttgtaatatgaaaatatcattttttggtaaagaatgatattgaaaacatgtttgcaaaacaacagacttacctgtcagatacatacacacatcaacttaaacatagtttgaccacactaaaaatgcctatgttcgttgacattcacgaacaaaagaaaaactatttacccataaattccgtgaaatttttgtctaactatgataaaaatccattattttggattaaaattcaaataaaatccaattgaaaacgctaccgaaactcaaaatgaaaaagacctacaaatatgttttggtttatataaacccatacatatgttacacggaaaaaaagaaaactactattacgtactggttttagacttttaggtttttaaccacatccaaattatccaaattgaatatgaaattttatgatttgatctatgtacacctttagttataataaagcatagtctcttttttttttattatgtttttatttcgtttttggaaactcatatgctgacgtaccaaataaatttgggatatataatccagtattgaaacaattattattataacaacagtggagtagtattttaatgcatttaatggaaaaaaagaaaacagagtaaacggataagcgtgtcgtggagaagaaggaccaaagcaaagtaaagaaagtcatatattcctgaaaatctataaaagacatttcgcatttatccacttcctcgattcaatcaaaactgcttcaagtaaaaagcctacgaaatagcatcggaccaaaagacaaactcaccgagtaaacatacgcaacctgtcgtgtaagtaaaaacaatttgatagtgatctctctatgtttggtggaggaagagggcctatgggtggcggcggaggtatgttacgcgccgccggtcgtgcgatgacgaggaccggtgtagccaacggtggtattcaagatccctttgcttcttcatcatcatcgtccacgtcgtctccggctggaaacgcctctgtttcgcatgtccagaaacagagatcttcttcttctgggtcgaataatctgacgtattccgcggcttctgggttgttgttgaatcttccggtggctgcaacctccggatggagcggcggcggtcctttttcctttgttaattctggaggttatgatgattttgagtgggtttctgaggaagaagatgattctctgtttggctctgttccttctgttgatgaagtccaagatgctgtttctgctctccagcagtaatctaatttcttctcttttctcatttcacttgaaaatgtgtgattctttggatgtgactatttgagtttgagtcttgtggaaattattgtcataaaatctcataaattgatcacttttgagtggtaggtattagttcccacgagttgtctaagtaatagagagagacacgagaattgttatggactgctatagtgtctcaaagtttaattgttttctttcctgatatggatggaattgtcttgatttgatgatcttgaagaagtttgaaactctttcagctgtgtctccgtgaccccactcagttgttttgtacttaaaatactttcaaaagttgtttgctggtttattcataatagtaattggtctttgttatcttatggatttcgaaatatttgtgttctgtttacgtgttggagtaacggttttgttttattttcttgaagggttttcgatgctagttcatattcccagctggttagagacaaatacgagtgctatccggaaaatggtggtggaaaccagagccctatagccacagggatggttcatcaagttccttcattcgggtcggattcggactggatggagccatcaatgcatttatgccattcaagaacgttaaagcctcatgcttatgatcaggtttacaatgcttttgacctactacgaaccgaaccatctgtccaggtgatactttcttttgttttcttgattacactaagctcatgtttactttttggtacatgaagaaagggctttttcacattttaatgcagaaaatggtagtatcattgtcgtctgacaaagcagtttgggaggcggtgatgaacaacgatgtggtgcgagagattagggacttgtacaacaatggcataagtcaaggtataaagagataatgaattgatcaatctaaacatttcatttgacagacttctcaggggactcagtttttgtattacagatgaggaaaattcagaagacacccctagggagaataacgcagcaacggatttcataaagtgggtatttgacaacacaatggttaaggccacggaagtgtttgtgaaaataacaaaggtcgtgaccgagctcttcaattgttacaatggtgatggtgttaacaacaaggggaaagatgccaaattcaacaattggctcgaggaaaagctgaccacttcggtcctgctatccatcatcgttatgctggtcgtgatggtatcccgagcctgcaactagtcttgatcgtttcaaattagccgacaatacatttggtcttcatcatgctgcttgtttagcttttgtttcaggtcatattgtggtttgtttgatactactttggttctgtactccattgttgacattttagtagatttcgataataagaacactctgaatgtgtcaaaatgttgagcattttcttttatcccaacaactactgaatctcttattacaaaagaagacaccaaggaggcaagaagagtttttttacgatcatagttgaagattagtttgtagatacagaatctaagtggtcaatactacgctttttcacatccttgtatgaacaggaccggctatttccagagcaaccttcacttctgtgtttccatgtctgaagcagggttcaaaagagactcaacatcgggagtaacagtaacaaacttcgctgaagaaccaatgcgactgcagttcctccctttgatgtctattgctaccacatcattagggatttttgtacctggacctggcgagacctgcatatatgcataggaccgagagttaaaagagatgaagaaaagctacaagcggaggtgaattccaacacagtttcagatatgtgggttcacatataataatgatgagacgaaaatgacttacatcaaagagggcatctccaactttcaacttgacagcaccgctcttgtaaaccagcattttgcccatgaatccctctggtaaaccttcaaaagggttgcttatccctgaactatactcccgtaccgatctcttggtggttgctcctgtcgtttgcttcactacagggagacagtctgggatcttaaagataaacatctgttttttgctgtgttgcacctgcatgcagctcataaaatacaatcagtcaaactcagtgaagagttcacatgtcttcaataccagtttctttacaagtttattaccgatgtcagaccgagttcttctgcggagttgatggtgttctcatcataatcacggtttttagccacctccccaaattcctcctggtcaagaagttctaacaacacaagaagtaagattcagtttacagaaagaggggaaaaatgcaggcattttacagagcaaacacattcacacatctgaatagtcggcgtaaagctattgcaaagccgggaacaagcatacctatatcaccagagttaggctttctcaaaggaagaacagtaggatagtaggagtttctataatcctggcacataaaatgagccaaaccttatgtcacataaaccaacataagagaaaatgggagggaaaatctttttctatctgaagattctagttacccaaggttcaacgtagtcatccccagttcttgtaacaaaattatgaacctcttctccatcttcttgggcagcagtaacagacgaaacagcaggaagaatactagcaggagaagacggattaacatcagaattgggcttgtcatcttctttaggaacaccaaaggaccttattgcaagtggtgacaagcttggttggaatgcaacttcaggagaagaagctgcaagatttcaaaagcttttcaagaacgatatttaatactatcaccttccacacacatggttttctaataactcatttacagaaattagatcaaacacaactcgttaaaatgaagaatgcgagcgaatacacatataactttcaacatacctttcgtttcggttttgggtctcctctggccagtcagcaataacaacaacacaaaaaagtttagttttcaacattgagcatttggattaagtaatagagataagaactaagccagtataagctacaatgaacatgttaggggtcctggaccaactcatttcatagtcacttaacaaggcagttaaattgatgcgatcaacaaaagctagcaaaggagatgaggcagattcaaaactagtaaaggtcagaaccaaaaagaaaattccttgttagctacgatgaagaaagcacaccgttttggtatttcgcatatatcataatctaatgtataagattttgattattttaagtgaaattagggaagttacgattaaactgttaacgaattttcgacaaaattaaataaggaaagaaactagagagcaagatttgagaactgagaagcttctctacatacgccgacgatacgtctgtcaaattggcgagatgcttttatattctcttcatcctcctcagcttcgctgtgtttagagaaaatttaaagcttttacatgtataagcagttaaagatttctacaagcataaacaagaaatgatcgaggaagaacgaattacgtgtttgaggttggagcgatcggaagacggcgagaaggcctcggaggatttggttggaacctccgctgacgagaaatggaacggagtaaggtcagtgaaacgcaattttcgcggcaaatttttcgagatttgagatgaaattaggaaggagaacaagaagatagaatcagtagaggtttaccttagacttttgttcgcctgaatccatggcagagtctcgccggtaaaagattcggaaacgagggaaaaaaaaaaaattggggatttaggaaaaagatggcttcgaacccgagacctctgtagtactgaatagctggataaccaaatgacttaatagcgcttttagtaagttaagtcaatctttatatttatagctttggaaattacaattattatttttatacattctttgtgagaagtaaacacttctacgtgtgtatatgtgattggatagacatttttagatttcatgtctaattttttgtataagtatattttcattaaggtgtatgtagaaattgcataacgaaatttgtaatacacattaacacatggcttcaatcgtatatatctagaagtagaagactgcgtcttgaattagatagcgagttctggcatcaacaacaatccagtttgcaaaatgtgcaatgtgattaacattttaattacatgtcctaacgtttgagttattagagaaacattatctctgttcttcagtcttttggagaatatggaccctcaagctactctcctttgcctgttaaaagaaaattatctcaccattttagcctatggagcttccacatccaaattgaaccaataaaaaacaaaccattcaagttatagataaaactaccggaccggtcacatatatataatgaaattaggagataatgaattaccgtgaagagaggaatggataaaaggctctcgtccatttcttcaaaatataacaattcttgattgaacatgccgatcaattctgtcagctcatagaggattatttcaacctgctgatatttaatcacccaagacattcttaaattaatttcttttacatgtatctatacaaaaaaagttaggaaaatgatctgtatagataaagtggacttactcgtgggagaaacttgatgatgacgtcttcgatctcgtccatgacttctatagctatgaccatttcttcatgtatcgacaccatatctatctgtaacttccaaattattagtttctgctttcttgacaaatacacaaaatgtttataaacaaattggtttcccaaagagagaaattctaaccgtggcaccatgtacgaggggtaatcggacagacaaagcatggagttttcgagttagcttgctcaacgcttcggagttttttgcgtctatttttgaccactcattaagtaaaggcatttggaggctgagaacttcacgtactttgatatcttgacggagcctttgaatttcaatcaaattttctacaacgtagttcctcattttgtatatcctaagccaaacccaaaacaactgatcctgaaaccattcacagaaacaaattaatagatatttataagatacaaatttaaatatttttcatatagtttttgtacctcaacgttgatcttaaggtttgccatagtggcttcagttcttgcgttaacaaacctccattgaagtaatctgttttgaaaaatcctaaaccggtgataatcctcctcttgtaccggagatactttcttctgcgccatgaagtacttcaaaactcctgccaccgctccaccgccaccgcttcttatcttggccttgcttacgggtgactcaggcggcgtcatgcacattgaagtcgtcggagctgagctggacagaggcgtcttcatagtcgaaagtcttccaggagacaacgcccacgccgatggtgagctggctcccggctttacccctctcgatgaagcgttactacgaggactaccacgcgtacgttgctccaagtaccgagcaaacgactctctgcttctaccgttgtttatctcttgagatcttgatgcgctgtttctcgccgggattatgttctcgccggatttagagtcggatgatccgatgggtctggaggatcttgttgtggactgtgatctggttatcatcactcgtttgcttgaattggaaggcgaagaggaagaagatgaagaagtagaagacgataacgaggcgtttaaggacactgggagagagattgaagagcttatagtccggctccggttattattgggcgatggaggacggagtctccgaccggtggttgccattttcttctttaatatatgacgacggttaactatatgactatatcatacaagacttatattcggtttcgtttctcgactcacttgcccctgtccttaagactcttatagtaaagctggaattatatggttcaaggaatcgtctagtctatatacactggtttgaacaattgtgatatataatatagttaggggtatattatatttaatctgttagataacggttggggtacttgaagatctgtaggagttgacagcacgtagaggcagaggtaagaacacttctgcatgtagtgtgtctacataataaaatatagagtgtattttttacacacaccaaaaagagagattataattaatgtattatgtcaaagcatatatgaaggtcagcttagctagagacacgtcttttgtttatctctcgactaaacaacatggcgttttaataaaatcaaaacttaaaaggtccaattcagaacggccccatagtatatagtctacgttgaataaataaacctcaagatagcgtcaaactctttagtctttacccaaaaatatttttttttaaataacgtcaaaactctaagtcttgacctcaacaccaatatatatttgccttctccaatatctgatttttttaattgtttatccgagtcttcttggtcttttcgaatgtttgcccgaaccagaccttcccacgttcggtggttggtggccgcctcggcctttggttgatttctgtccacattttggtccttttcattcatgtaccatgttctagggtcatttgacttgttgaccataaatctactaaaacaggcctaataccgatgggccgtagcccgttaataaacaagacaatttatatttgtttcacttagcttgggagccacggatctctagaaacatccagagaaatatcaatctccccacttctccagaacattcactcactgacaatatcccaccttcaacacttaactcctgtatatagtcctcccctgtctccagtttcgtcgcacacagttctcagataaatactaaactcactgttaaaactttctcaacaaagcttcctgtttctctacaaatggcatctgctctcgctcttaagagactcctatcatcctccatcgctccacgttcccgtagtgttcttcgtccagctgtttcctctcgcctcttcaacaccaacgccgttaggagctacgacgacgacggcgaaaatggagacggcgttgatttatatcgccgctctgttcctcgccgccgtggtgatttcttctcaggtaacaaaccaattgtttcgcttttcctccagatctatgtctctctgttgttaacgtagcgaaaatctagtaagaaaacaggtattagcttacactgagctcaaaatcttgacatgattgattgtgtctttgtgtagatgtgtttgatccgttttcgccgacgaggagcgttagtcaagtgctgaatctgatggaccagttcatggagaatcctctgttatcagctactcgtggcatgggagcttcaggagctcgtcgtggttgggatataaaagagaaagacgatgctctgtacctgagaatcgacatgcctgggctgagcagagaggatgtgaagctggctttggagcaggacactctggtgattagaggagaaggaaaaaacgaggaagatggtggcgaggaaggagagagcggtaatcggagattcacaagcaggattggattaccggataagatttacaagatcgatgagattaaggcggagatgaagaacggagtgttgaaagttgtgatcccgaagatgaaagaacaagagagaaatgatgttcgtcagatcgagatcaactaaaaacgtcgacgtttttttctgttctagttttgttgataggtctttgaataagaagtgtgtgtagtttggcacggtcgatgttgagtcatgtagtctctaaagactaaaaggttatatgtttctttcttgagacggtggttttttgtcttgcttaaaccaaaatttgcattccaaatcaaagcactaattaaataagttcctaatcgtgtattcttttagctaactcggtcggtttacatgcctttgtggttatgagactggagcttatggaacgtatttgggtttaaaattttctgtagactaggaactaggaagactttaagacgaattctgaggctgcgtaagttgtcgacggactggtctattaataacgcgtaaaagtgttaggcccgttcgagtagaatagcgcgttggacagcccaacttgaatgaatcgatcgacttttattaaaaaaacaaaagtagggcaaaaaacaaaaaacagaacctcgacattaacctaaacctaagagcaaagcaaatcgacggcgacgggaaaatagaaccgcagatctctgtctcctctctctctcgtaactgtttgttcgatggcaccgaagaaggcggaggaagtggtcgaaagccctcctgtttccagtgaagaagaagaatctggctcatctggagaagaatctgaatcttctgctgaagttccgaagaaagtcgagtcttcgcaaaagcctgaatctgactctgaaggcgaatctgaatcggagtccagttctgggcccgagcccgagtccgagcctgctaagacgatcaagctgaagcctgttgggactaaaccaattccagagacgtctggatctgccgcgactgtacctgagagttcaacggctaagcgtcctttgaaggaagctgctcctgaagctattaagaagcagaagacatcggacactgagcatgtgaagaagccgataactaatgatgaggttaagaagatttcttcagaggatgctaagaagatgtttcagagattgttcagtgagacggatgaaatcgctttgcttcaaggtattattgatttcacatctaccaaaggagatccttatgaggatattgatgctttttgcatttatgtgaagaaactgatcgatttcgatgctaccaaaaaccaaattgttactaaacttcagaggttgaagaagaagtttaataatgctgtgaagaattctcttaagaagggaaagactgaagatgatattgagtttgctaaagatcttgagcaaaaaggttttgaattgtccagaaagatttggggaagcaatggtgttttggttactggtaaatcatcaaggaagaaagttggaggaacacctgcaccgaaagagatgaagttagtagctcactctactcccaagaaacaacaagaagaagcgaagaaaccggaaagaacagaggcaaaggttgtgaacacaggtctctccattggtaaagagattgcatcgttcctcaatgcagataatgggagttcttgtggtttggatgaatccacattaactgcggtttgggcaaaggttgcggatggagctgagaagagagaagtggaggagaaatggaagaagcttaaggctaagcagtttgagctatgtttgcagaggtctggactcgtgaatgaaactgcaaagatgatattcaaagcctatgaatcttgagcggtttgtctttttacttttttagtatgcatctttgagtcttttttgtattgtgcattttagcttgtgaaactaatccttatgtaagtcttttttcgtattttctttatgcccctatgttggatgtttggtttgggtatatgacccttttatttattactcttgttcggtttctatgatattagacagaagatggaatagccctattagttcttttatgttaaaagctgtgaaacgacttaagctgtgaaacgactagtcaatgtgtgttatcatatgcattccttgtgaagttcagctggtaccggtctgcacagttaagaggcaaactcatatgtgtttgcaatttgcatattgataagatactagaatgatacctgcaccgagttaatgttctgcagaatcatgtagatcgagtttctaccgctctccctgtcgtggagagatgacagcgttttttgtcgcatttttttcacatcctgttccagtgttctgtgagctttgatctccagtcgaacatgaaaaaagcaacgtactaatacttgaggcatgactgtataataaggtcagagctctccttatcttgaatatgttacaagaagagcagggagtatgttcaatcaaacattaaactaaaggtaagctatcaccaaacatgagatcatgatcacctctcaaacaagcagaaaaatggtctttcaagtcactaaatttcgcaaaaatatttttacaaataaacttcacgagttgttgtcacatcctaaaaggaaaaattcttgcagattcgagactgtatctgggacaaggagaacataaagataacccacacaagttgtacagtataaaattaccattgtataataactgatttctaaacaaaagtcaaaaactaagcattttaatatgctcaatatctttacaaatttatttgttgacatcttcctataaactagacaaatgaattcggacactaaaatgaagtatcattccaaagaatgtttgtagttttgtagataaattaaacaattaacgagttcaatttttggatgaagaaacgagttagagtcagaggtttgctgttcttacgtgcgggcacaaacgatagatcggacgccgactttgctacttcacataaactattattaaagtagttcaacatctgtgttgaaggatacgactaatctgatatcgtcttctttggtttgatttgtttctaatttgcgtacatttgataaaaaaaaaaaatctagaaaactggaggccagtgaagcaaatggcttggtcaataaagaaatacagcaaaggggccaaatgatttataaaagagccagtttcaccttctttaagtagtgattttaatccctcctagcttctcaccattgtagttgaagaacggagagggagagagagataactttctcctcttttaaaatttcaaaagtgatccaaattccaggttcattctacattctcctttagttttatgtatacttttgttctccttgtttgcaagatattgaggtttcttgttcgacaagtaatagagacaataaattcatatcttcatctgcttttcaggttctggcgtcttgaggagttgcttaagagatggcgtcatggacttcatcccagttcctgtatgaagaaaccaagccatggggtattcagttcttggaaaagtttaagcgttcaggaagactctccttcaagcaataccaagcccttgtcttcattttgacctttgtcgcctacatcgccttccatgctgcccgaaagcccaatagcattgtcaagggaacactttctgcatcaacaatcgaaggcggttgggctccttttgatggacctgatggaacagccttgcttgggcagatcgacttggctttcctctctgtctatgcggttgggatgtttgtggcaggtcacttgggcgatcgtttggatctcaggacgtttctgaccatcggtatgatcgggaccggccttttcacagctctcttcggggtcgcattctgggcgaatttccacagcttctactatttcttggcggttcaggttatggcggggttgtttcagtcgataggttggccttgtatcgtggctgtgctcgggaattggttcgacaagaagagaagaggaatgattatgggtgtttggagcgctcacacttccctcggtaacattgcagggtctctgatcgcgtctgggctgcttagatatgggtggggttggtcatttcttggcccggcttttctcatgacttttcttgggatcgttgtttaccttttcttgccggtgaatcctccaaccgttgaggcagagagagatggaactgaaattgactctaccatgaggctcggtgacaccattacagagagcttattggaatctagaatgagtactggattcgatagaaaggcagtcgggttcatggccgcttggaaaatccccggtgttgctcctttcgccttctgcctcttcttcacaaagttggtctcatacactttcctctactggcttcctttctacgtcagccacaacagtaatgtttctcatcatctctccttccttttacctctagtgttgtagcctgactatatatgcattgtctgaattatatgtgatgcagtgatcggaggagagtacctgtcagaggagacatcaggaaacttgtcgacaatcttcgatgttggaggcgttgttggtggagtcttagccggatacatatctgatcaactcaacggcagagccatcacagcagcaggattcatgtacttggccatcccagctcttttcctctacagagtctttggacacatctcattgaccatcaatgtcatcctcatgttcacatcaggagtcttcatcattggaccatttgctctcatcacaacagctgtctcagctgatctcggaacccacaaatctctcaaaggcaatgcaagggctttggctacagtctcagctatcatagacggcacaggatccgtcggtgctgcgattggaccagtcctcactggttacatctctgccataagctgggacgcagtgttttacatgttgatgactgcagcattgatctctggattgttgctcactaaactaatcatagcagaagtcaaagcgttattgtttggatcagaagatgaagtagctgcatcatcatcatcaccaccagcatccagacctcccattgatgtcctcgtttgagttttttccttcattatttatcagtttctttgacaatttcacactttttttatccttttaaagttcgttcctttttccccagttgtcttcatttcttaagtttgaatgagaataagattacctaatttggttgtcgaatgatatttaaaccaatcaaaacagctgaaaattgcagcaatcggaataaagaatcatcatttggttctatatgatcatcaaatttcactgaatttacacataaaccttaagaagtagcaaaattcatttttaaaaaaggtacaagagacggtgaattcaccggagaagctgctaagtggaatctgtcaaacgtcgtctctgcttttgggcttgcgatatttctcctcaacttgcttggccattgaaacggcgcagtgaccgagctttttgatgttagggacgttgtaggtctgagcgatgtagatcccgcacactgttcccatgatgaaagagaagctgctccttattatccccatcttcttctccgtagatcggatttttttttttgggtttattgaattggagatattttgatcggagagattgacggaattaaaagcgaaatccgccaagatcatgagaattctggaaattaaaagtcgaagaattgaagatccattactgggcctgtaaggcccaaatatattaaaaatttacatgggctttttgcgttaaatccatatgaatttagcttttgtttgtttttatatgggaaaattcaaactagtcaccaacttaagaaatctttaatgagttaaaggtgtttttggttaaaggggtcatattcaaatttgttggtgtgtcaaaatcaaactattgctcttaaagaaaaaaaatgtttactgagatgtatataacattttgttgttgttaaaaatggttagaaaatattataactagagtttttggtttcaccaaaaccatatataacaaatgaattaaataaattttttgatgttatatagattttttcagtaggcatacatatgttgaaaataaactcaacaaaaaaaacatgtgttgaccgtatcagtttattttctaattaataagaaaagtattctattgttttccaggaaggaagaagatatcgaattttgctctttctacttttcgattctctctcgatcgagaggagaaaaagacagagaggcacggtgacacgctgctttcacagaatttccccaaccgacagacaagcttcgcggattcaggtttttctatgattcgatccatttcttaagaactctgcattttattccttgtaaaatcttcctcctagctcctttcttcaattttcgatttttgatttatattgtttcaattttggatcatatctttttatttcttgtgaatcgggtctttgtacttggtacctctatgtagcatttttggcttctgtacaaatctgatttcacctgtatgcatacgactcaatctaaaagaacccaagttttggattttcctctgctttggagctcaattttctttacattctgaaaaaaaaatcatctttttatggaaatgttcaatttttgtagttgtttgtatcgtccgagtcttaatacttatgagagatcatgtctttgcagatggcgtcatgctaatatgactaaatgagattctggggattaagtttaagtgggaaggctgtaatagttcctaatggggataaagtacttgcccgtctccgtagcatcaacagctctcagctttgttggacttcaagtctggacagagttgtctctcgatagacttcgagcagatgggctgattgccaagaacatttctttaggagactctgagcatgcgcttgagctgcttctgggctcttatttcactattgcgctgcttacaaattttgtgctcaatgtgtatattcttctggtactttctctcaaggtaagagtaaccttttactattgggatgcaatataagcaatgttttttctaatatttagctttcgtagacatcgtaggctccctccaaatcaatgaaattgaacttccaaacttcactagattcatactttaagcgattaatacctttatgaaattccttctatccttagactgagcttgtttgcctcctaatctacattagtcactggtagagaggtgtctcattatttgttactcttattcttaattgtttcacttgttcttgggacatcttttttaggctcttaaagtttcagacttgcaccactgatttctcttctgttggaaacagagtccaatttacagttcttactttggttacgatcgaaaacattattattagttttcccctgcgaatgtagtgatgtgcataagaagcaaatgttcttaatttataagagtcaaactctcgtttccggtagttgaatgtcttgcatgaaagaaaactcaggaatttcatactgtttgttaattgtttctggagatgtcttgtgaccattgtctgtggttctaatgtcttctcaacatcttctgcagactctattttttggagatttatatgatgttgaaaccaaaaagttggtggagcgacttgccaattatatcatatacaaggtagctgttcttactttgattgaaaactagactctgacatacaataacctacattctgtgttttgtatgagatattcttggtagtgttcattatttaaaataactgtgtcaggtaaacaaatggtatattattatagtgacagagtaatgggaaacagaaaaatagtttttgaagcctcagaggtctttacttagacagttgattctgccacattttcccttcatttcctcttgcactttgtttctatgtgtagtgttttctggatttgagttatttgcagacatatgtatgtattgtgggtgttaatagtttatttcccgcttctaatcctcctgtccctagggtacgtttctaccactggtgattcccccaacaatatttcagggtgtactgtggacagtttggttgactgttctatgtactttaaaggtatgaaacactgggcgttcttgatttacgagaaaccaaattctgaattatcttttgtcgacaccctaaactgtaccttgtaatgttatgtagatgtttcaagctttggctagagaccggcttgaacgattgaatgcatctccttcttctacaccttggacatactttcgtgtgtattcagtgctattcttggtcctctctgttgatatgttctggtaaatcctaaaccttgcggtatagtctcaaatattcaattgctgcactttctatcttgattttcttctcaaacacttctggtttattttagaggatcagagtagatgttctctagatttaccccagtccgttaagaacaactttaagttcttcaacaacatagagagagtgcatagcttgctttttatgtttatgctttactgtgagagttgttgtcctgaaattcatctatgcattgtcaaggcgaaagtaaagccaaaaacttctgagtgaaaatgtggatgccgtagagcgaggaaggttttgtgtctgagttcattatgttttgtggactgaattccagttagaaaactcgtttgatctctttgtgtagtaacgttttagtaaccagtttcacgcatgtctagatgatatgctgagtaacaggatttacttttctccaatcttgcaggataaaactttcccttatgacatacaatacaattggttccgctgtgtatctgttgttactttttgagccatgcagtatagcttttgagaccttgcaggtacttaattgataacagttttcttcttcgtcctactcgttgtctttctttcgtagccatagtcaacaaaatatagagctcatcggaactttttgcaggcgctgttaattcatgggtttcagctgctagatatgtggattaaccacttagcagttaagaactcagactgccaaagatctaagtttattgattctatgacagcaggtcgtttcttttctggtgttatgctttgtttttctattagagcccgaaaatgcattcttgtggacatttttggtctattggaactccaaatctcaagttaaactcttatctttggataggctcactgttggaatggaaaggcctcctcaaccgtaaccttggtttcttcctggacatggctactttggtaatggcactaggtcattatttgcacatttggtggctgcatggcattgcctttcatctggtggatgcagttttgtttctcaacatacgtgtatgtctgttaattggctttctttaaaacagtgtcactctcccggttacttgatactaggcacagcattgaattgttgtatttttacctggttttctgtttggtttggcaggcattgctaagtgcaattttgaaacgaataaaaggatacattaaactaagaatagctctgggtgctctccatgcagccctccctgatgcaacttctgaagagttaagggcatatgatgatgaatgtgctatatgtcgggtacgcttctgctatagtcattttcttataagctttcaatctcaaactcttaaaatacaattataattggcaggaacctatggctaaggctaaaaggcttcactgcaaccaccttttccatcttggatgcctgcgatcctggtgcgcttagctaaatatcgacagcctcgtgtctttatgactcacactggtgatcctgatgatgttttgattcctgcaggttggatcaaggtctaaatgaggtttattcttgtcctacatgtcgtaagcctcttttcgttggtagaactgaaaatgaggtgaaccctcgcacagtggaagtctcaagtgatgagcagttagcccgtcagcttgaaagacaaaacaatcctgtacatgcactagccactggattatttcctgctgaggtgccagattctgtcgaaaatgatacttcgaggttcagttcattcttcgttcttgattttcttattaactacaccaaagtaacaatttatttagaacttcatgattcttttcctgcgactcccttgatcttggtactgagatactaaatttgcactgccttaaagtaacgttattttaaaatgttttgaatagcaagttatatttggtttctgacgaccactatttgtgcatatttcttggatttattttactggattgtataagttctcatccctttctttcacaaaataggaatttaggattggatccaagttggctgcagacatggtcaagtcagggttctgatgtcgctggtccttctaccacttccaggacagttggacttgggcgggttcagatgatgatgaggcatcttgcatctgttggcgaaagctatgctcaaactgcacttgacgatgctgcttggagtctatggccgatgaacccttcacaagcatccacttcttctacaactgtacctcctggtaatggtggaaggacaggtggtctgcatctgagaactgtatcaaacacgacaaatgaaagcttaacaaatatactagctatggccgagacagtgagggaagtcatgccacacgtgcccgatgaaattattttccaggtaaattttaagtgcatattggattatctgtaagctttgatgggatgtgcatacatggttgagttgagttggtggctcatttagattgtcttctgcattgactggaaggaactattttttgcatatattcatacctgaagccgaattttatcagtttatgtatgtggtcaatttgcctgaactggtctctatattcactagactggtccttaagctatggatagttcagttttaagattcacgtgacttgatacttgaacctgttatgtttcaatttcttgcaggacctgcagagaacaaactctgttgctgttaccgtgaacaatcttctccagatgtgatgatagtttgtgtaaaatatactaagcacttccatttcaaccttaggtatagattaatgattggggacatatccttatccgtaagttttacacaccacccaacattccaagcttcacccgctgtagatataaggcactgtgtatcactttttgctatagagaagaagaggctctagtgtatagcttctgttcattgctctcttgcgaaaataagttcggatatttacataaggtgatgatgccctggtggtctggagatatcttgttgcagtctgaccttggctccaatctcgagggagagtaaccactctttgcagctgctcttttggctgctgccacctctcctgtataagaatgtgtaatttacaataaagaaaaaagaagtaaatgaaagagtctactgttattgatccaatagcctgtaatgtagtatcatcaaatgtgtgaactcaatttttttttcttctgaagaattatcttcctacattaactctatacccgttttgacgaacggataaacagtgaagagacaaattaacatataaaatataatttgtcataaccatttcgagtagatataatcaatagaaaagtatcatgttggtacttttaacgcaacttcaagccgaaaaagattgtgaagagattgtttctttcgaaggaagcaactttgattttgtccatgccgtgtgtaaattagcaatagcagaagagaaccacttaaacttattttaatacgcttctagatagctctacttggttcgataaatttttatgcacgttaagtaagtttaatctgtttctaataactaaaatatatgatgtagttggcataaaaaaaaccataaaatctattcccaacaaatgaggaatattcacatctaagatattctttttaaaaccaaaggaacaagattaacatgagaccttagacaaagggaatggccatgaaccattccataattccatttagagatagcaagtggcagatatatatgtgtaattcgaaaatatataagtatatttgatccattctagtcttcattaaaagatacacaatattatcatttatcaattaagtggagggactgactctacatcaaagatagaaatagggtaatttagttaagcaagactcaagtatcaggaagtgagatcactactttgcaacaatctcttgatagccatctgaaatcttcttcagatgctaatctcaactcatggaaacatccatggcacggtgtattgacataatgtagcaagttacaaacttacaatgcaacatatggggaaaatctgaggaaaaacataagaaacgatgaacaacataaacttaactaataagaataatgtggtattatatattatgaaaaaattcaataatctgtttttaatgtaagttaaatcccgaccaagaaatgataaaaaagatatttgttcccacattcttctggtacatgtttccaggtcttctcctcaatctttgcattttaacgctcttcctttaatacatttttttttacactgtattaattatgagataaaccccaaaaaaagtacattggtacacaagcataaatacaaaaatatgcatgcttttttcagaactgtttaaaggtaaagcctttttctgcaaattttcttttcgtgtatgaccaaaaaaaaaaaaaaaaaaaactttattctaaaaaataatagaaaagtagtgtgtcttcatattgcagtgtcttgtaagaagaaattcaaaaacccacactgacactttaacacattgcttcgtcttctctaccgtttcgatttcactcttaattatgtcaaatccgtaagcttttgtgatcatcaacaccaaaaaaaaaaacctaactttatggcggcgacttgttctctgctcgcgtcctttctcctctgctttgctcttctctccgccgtttctttcgcggcggaccctttcgtctcctacgacttcagagtttcttacctcactgcttctcccctcggcgttcctcaacaggttcggtgttttactcacttacctttcctgaaaatctcgggttcagtgttttagtaaaggttctcgctttcgattgagagattcaatggcctcttagaatgccttttggtttctgaaactcgcattcttacctctggatctatatatacagtgtgtttgagttagctatcgcaagtttctctctttcggtctctaaagttgatttaaacccattaccatagaatctcaagctcgtcatttacatgggtttaggtattcaactaatggttactgttatatgaaaatgttgtttggcataaaaaaagattggtcttttaatgtgttagccttttttgatttgatgttatcttcgtatattcaggttatagccgtcaatgggcagtttccaggacctctgcttaatgctactaccaactacaatgttgttgttaacgttttcaatcatttggatgagcctctcctcttgacttggtgagaccaagagctctgtctctttaaattacctccttattatatgagtttctaaagactaatatgcttcttggtttcttctatttgtctgttgaaataggcctggtatccaaatgcggcgtaactcgtggcaagacggtgttcttggcacaaactgccctattcctcccagatggaactttacttaccaatttcaagtcaaggatcaaattggaagctttttctactccccttcactcaactttcagagagcatctggtggttttggtcccatcgtgattaataaccgggacattattcctatccctttcccacagcctgatggtgaactcatcttcattattggtgattggtacactcaggaccataaagtatgtaatcaacacttctgtatatttcccttctatgcattttgtttttcagcacccatgttttatgtatagctgagacactgttgcttctcaggcattaaggagagcacttgactctgggaaagaacttgggatgccagatggagtcctcatcaatgggaagggtccttacaagtacaacagtagtgtacctgatggaattgattacttaacctttcatgttgaaccaggtatacttgtttggagtttctgagaggaatttttgttttcactttgtctcatgagacctatgaatcttctcatgtgacttttcttttcatcctttaacattttgtttgaatagttgcctgtgttgagtctccattctcagttagttgtcttgttctaagatactctttttccttactcactttgagctcttaacacatgagtaactgttgcatgtagttgaacatcttgtaaagatggtactttaaaaattcacatcttcagtctttagtataagattaagaagatttgtcgagattcagtgcaaattattacttttgtattatgctataatggtgttatattttgcagggaaaacatacagaatccgtgttcacaatgttgggatctcgacaagcttgaacttcaggattcagaaccacagtttgcttttggtagaaaccgagggtcactatacttcacaggcgaacttcactgattttgatgttcatgtaggacagtcttattctttcttggtaaccatggaccaagacgccacaagtgactactacattgttgccagtgctagatttgtgaatgaaacagtgtggcaaagagtcactggtgttgccattctccattattctaattccaaaggacctgtttctggtcctctaccagttcccaaaacagatgtttctagcccgtggtcagcaatgagccagccgaagaccatcaggtttgtttttaaacttttttggaacaagtgcatagaaatgttcccttcttgttgctacaactagatttttttccagtgaagctgactcttttgatttgcaggcaaaacacatctgccagtggagctcgtccaaatccgcagggatcatttcattatggtcaaataaacatcactaacacatacattttgagaagtttgcctccaacaataattaacggggcacttcgtgctacacttaacgggatctcatttgtgaatccaagcactccagtgaggcttgcggatcgcaataaagtgaaaggagcttataagctggacttccctgacagaccttttaatagacctcttcgtttggatagatctatgatcaacgcaacatacaagggctttatacaagttgttttccagaacaatgacaccaagatccagagcttccatgttgatggctattcatttttcgttgttgggtaagcgaaacctttgcaccttgtcatctattcttgttcattcttttaatatcctatcaaaagtctggtgttgatataccatgttatccaggatggactttggtatttggtcagaagacaaaaagggttcatataacaactgggatgccatctcaagaagcacaatcgaggttaatacaccgtagcatcactcaaaattattctgatctgcaggttttcttaatggttttcttgttatttaggtataccctgggggttggacggctgtactgatttcccttgataatgtcggagtttggaacattcgagtagagaatcttgacagatggtatcttggtgaagaaacttatatgcggatcacaaaccccgaggaggatggaaagacagagatggatcctcctgacaatgtcctatactgtggtgctcttaagaacttgcagaagtattcttcataaacttttctttcactctcttttgttatacctttcgattatgagaattttaacactcttcattgtgattgttgcagggaacaacaccactcagctgcaacatctatactaaatggacacttgaagctaatgctactaatggtgttgctcgcctcggtgttcagattttgctgagcatttttacatctttatgttgatcgacccagggaagtgaagttaaatgatttttagatttatttatcccaatggatgtgaaaaactcttggttctttcgttgttttaggccaaaatggtttagaatcttgtcaattgtaatggaaacgtctgattttgatttttctgttctttttgaatcatccacatccttcatgtttctcccatcttaaaccacattatattttcattgttggattctctctatctcgatatcattgttaaacttgccatctgttttttttttttttttaattcatatgaatctcatattcgtgtcactttgttctaaatttagaattttttgcacagcttaaattttttctttttgctgattagtattttaatgtttaaaagaaaatatgatttgtacatgagcaatttccagccattaaacacctatgtataaatcatccatcagagctgcatatcatcaattctctataatgtacatgatacgtcgacctgtctttcttaataattacagaaacattatgactaaataatatcttaaacaaaaaataagttgatgtttctccgaaataagagatctggtccacgttcatgttacatgcacatcataatatcacatcacgtgctaccttgcttaaacaccggaacgaaacttgtaataatcttcaaattttatttggacacaaaaaacttctaaatattgtttggtatataatttgagacgcctaggttttgtaaatattacaaacagataagcagacggtcgtttgatttgaaacgcccatgtttagcaaattatgacaatcttctaataattgtttacatgtcaaagcataatgattagagagaaacgagactaacatagagatgtggttagtgattgggagagaaatggaccaaacagaatgagatgtcacaaggtttccaataataaattaataatccaatgtgtctatatatacatatacacataaaccatagttcacaatttgctaaaagctagcattttctattctctctcaactccgaaagtacaaaaccccaaattaacaaaacatgttgcgtttcgtggtactctctctaactctcatggttttcatcaactcatcaaactttccaaagacagcagccaccccaccaggcacgtaccaaaaccacacaacgtacgtaaaaacggcatgcaactcaacaacataccctacaatgtgctacaactgtctgtcctcctattcctccaccatcaagtccgacccaatcaaactatgcacaacatcgctaaatctcaacgtcaaatccgctaaaaacgccacattagtcgtctctaaccttctccaaaaggccaaagccgcgaaaagccatgaggtctcgatccttaaggactgcgtggacgagatgaaggacactatcgacgagcttaagcaagcggtcgccgagatgaagtatgtcagaggcggagggaaaactacggaggagcatttaaagaacgtgaagacgtgggtgagctcggctttgaccgacgagggcacgtgtacggacggattcgaggaagggagagtaaatgtggaaacaaagaagaaggtgaagaaggctatttctgagctttcaaagactacaagcaatactttagcccttcttactcattatttaagttattgaaataatatccattaatttcactttgatgatctctttgcatgtgcatgggtacgtttggatccatcattttttatatcaatattctttttgatatgcacaatagaacctccatttgtgaggtgctcttaccgtttttgagattaaaaatttttgtttggtaagtaatatattttaaattattgggaaaaatcagcatcaatagcttcaaatcaactatatatgtagaccgtagatgatacaacaacagggcaagagaaactgaggtgcctcaaaacaaattatttttgcaaagtatgtttatatgcctgatcttgtagctcatttggttagagggctaagctccaccacatgggttcaagtcatggcagaggagaagatggggagtgtgtttgtattgcaagtttatggaagttggctccttatgcaagattcaaaataattaaataataatctgtacacgaagaaaaactttagggatgatgatacaacagattcgtattaagacatagcttaaaactttaatctaaattagaagatcccaattgagggtttcatttcatgtaccattttacttcagcttacggtaattccctcgagaaaattgtgaaatgaattatgaagtattttaattttaatacagattaatttatgcataatatgaaaaatgataagttaagataaagtagaaactttaaagagagaaaaaaaaacacaagcagtgttgaatacgagaaaaactcttgtcccaaagactaaacccctttgaaatgatttcaatgcttggaagcaaagtcattgatcaaagccaaggcattgctcgtctcttccgcaacactcacaatgtgtgttctgattaaacttttcagctccccagccatggccttccctccaaacccatccatacacgcggtctcatctgtcagtgctgcgcttgtccacgtccggacattgctcagacagaaccaaaagtcttctccgctgtcaccttcctccagatgcttcagttccttcagcgaattgctcaacctgtcaacagtgtctcccatctcctctagacagtccgctacagcctcgtgctgcctctttgtgattcctttataatcagtcatctctgatacataggttttggctgactttgctcgggctatgctaacggcaagcgcggtctcagcaagcttacgtggctgcttcttgatctcgcttgcatatgaagacagagactggaagcatcggtctgggtacgacgtcgtctcacaagaggctttaatgaactctgtatcaccacttgattcctcttcaaggtttctagccatgactattgctgcagtggacagatacagaacaaagagaatcaaagaaagctcgaaatttctagccattttagatttaaaacacaaatgggttattttagtttaacaactacaaatgagagtagcagaataagggtccagggttttatagagaaaagaataatgaatgtgtgaatgcagatacattgatccttaaatctttacacaaaaagcactatcctttttttagagcaaaaatgggagttagttgaaacatcaataaatgtgctgcaatgtgaataccaataacagaggataagagctgtaactatttgtcatcatctacaacatatttggatcctagctttctatatattgaagtggtgggtcctaatgcacgtgaccaatgactaaacccatgtgtctaaaccatatgaaacactggtcacgaggaatagcttatcaattgaataatgcagcgggaaaagtagaatctagtgatgacattggtttaagtcaattcttaaagaagacatcccacgagaatctacaaagccgaaatcactcctaacagctaaccaatcagacgcgttcacacacggcatgtgatctttttctctatgaacaaacaggtctcttgtgtatgtgtgtaagttcataactcaacatggcatgacatcatgggctgaattaagaagataaactcggaagtaccttttgggaagaaccagtttatgtctccaatcctctatccaccatcatctgccttactctctcaacatcctctgctctttttgctttgctataaattcttatcaacagctcgaaattgtgttcgttatcaggttctaattcgaaaagacgttgagcagcaacctctcctatatctgtatttccatggaggtaacaagcgtataacagagctccccaaacagttggaccagcctcaagccccatctcttgaacaatcattgagtaagcctcttccatcatccctgctcttccgtagagattcaccatacacgcatagtgttccatcttcgggtctatcccgtattcctttgacatcaaagagaacaacctctctccatcttcgaccattcctgtattagcacagagagataaaaccgagacaaacgtgataccatctggtttagcattagcacggtgcatctgctcaaaatactttaaaccattagaatttttagaatgagcagagataatagcattccaagatacggtatctctctcgagcatctgatcaaatatgaagcaggcttgacccaactgtccccttttggagtatagaacaatcaaagcattcgcaaccgataactcccactccatgcctcgcctaattacccatccatgtagctgacgtccatgcttgaaagacaaaacacgagctagaacactggagatagcaaccttatcaggctcaatcccattctgaaccattagacgaaaaatgtccaatgcctcgtgtaacaagccatgatgaaggtaaccagtcaacatggagttccaagaaacatagtctttgtgaggaatcatgtcaaaaacattcctcgctttaacaatgtcgccgcatttcgcatacataacaacaagagcattgagcacatagacatcgtatccaaaaccttccttaaccaaatcacggtgaatcgcttctccaatttgaacagacccaattcctccacaagcctttaaaacacgtggaaatgtgaaccggtctggtttcacgccgtcttcagccatctgaaagtaaagagccatggcgtcttcgtactgacccaattcagcgtagcctgagataagagagttccaagcaaaaggcgatgagtctctcttagacattcgatcgaacacttcgtgtgcaacttccgcgtagccacaagaggcgtagagtctaacaagcttcgatgaaatccccaggttgttccgcaagagatagggaggtataaggtgatgaactctaacgccatggtcaatagctcttaagctgtagcaggtctcgagaagagaagcgaagatctctggttcggttaatgagatgcctttttgagcggaggtttcgaggtctgtaatgacagagtctaaagcttcgagttgggtccggtgaatggattgtttttcgatcaagagaggagtgggggatggtttggtgaaagagagggaagtgaatccattgttgttgtattggttttgtctgtgttgcttcaactgttggtgatgtctgggtttctttttcattgaagaagacgatacagatggataagagaagcttggtttgtgtacaacgatactcaccatcttcttctcttgtctctattttcttccttaggttgttgataatcgataaatggagggaagcagagtcttgtgagaatacattaataactttcgtagaagttacatatttttttttgttcttttttgttttaccttacaaagtacaacaaacaaaaaaagatgcaatgcgaattgcatatagtgcatcaaaattcatgagtaatgaacaaatttcagactggtggtcttttgtcaagatgaattttctaccaaactcgaaccgagatgggactgtggatttacatgactactctccttcaattgctgcacacaaaaaaaaattgcaggtgttaacacaaatcgtgttctactcaaaatatggagtgatctgtaatacagtgagagagaaagagagataatgtatacctcaaatgaattgaaaataggtaggacatgttggaatatgtcgtctactgttcctactgcattaatctgcaccaaagacgaaaataaaggcagaatcaaacattatcaacagcttcttcaaccttccacacccaaaataccaaataagtaaaccaagatgaagtcataaatgtttgcaaagaactcacggtgtagagttttcctttatttttgtagtagtcaataacaggacgatttaaggcattgaagattttcagacgctttttcattgtagttatattatcatcaattcggccctgcatcagcaaggaatcagtttcatggcattgttaactgaaaaatattacaggaagagtactgtgaaaaagagtacagtgaaataagcacctgattacgattcaagacgcgtttcaccatctcttcttcagggcaatcgaagaacagtactacatcagggtctgctcttatctgcaatagtatcaaggagttatttcatgttcaaagctttgttccaagagtatattcatgtaagagaagatactacactacttactatgcgctcaaatgcaacacggttctcctcagttcgtggaaaaccatcaatgagaaacttgcgattgtcactcgattccagctctttctgtattaattttactgtaacttctgaaggaacaatcttcccatctttaatcaagttcagaatcatagccctgaaattgagatcccctcatcatgagatgaccacaaacttttgaggtacattggatatatagaaacttcatcttcctacccattttccgtgtgcattgcgatctctctcctgagcaaatctccagcacttagatgttgtaatccaaaagtctcaacaatcttttcgcattgtgtaccttttccacttccaggtccccctaaggttataaatccatcagacgtaattcaagttgttgagatgcaaacaattgaatacgacaaaatgtccatatagttcacatgaatggatagtatatgcccatgactgaagaacaagtgagagtttatatcaccttcaacttttttcacaggaaactcaaacagaaacctaggtagattcaactcattgttcccaacatattaaccagcagaatccataacttacctagtacaaatgtaataaatggagctttctctttcggcggtgaaactcgttcttcctgtgacagataataaacacattttacacacaattaacgccgaaaacaaactattgagcttttcctgatctatatacctgactaattatgtctgttgcaaaagattccccaactttgagcccagaagctgcctatgaatatgaagaaataagtaatgaactgagttaaacccacaaaatcaaagttatagcaaagatagagacaacgatttcattttgtccggagaaaaagcgatcgggattgaaaatctaacctggctgagcttaagggatcgcgatgatgatgaaatcatcggagaaagtaaagccacgcgtctccacatcttcttcgtcgtcttctacctccacttgtctgcgatttcctttatttcaggtttcgattttggatttttagatttttcagaatcgagcaagaaatatcgtcggaaaaaaacagatcacgaagaataaaataatgatgaagcagtgcgccaaattaatttcttcaacgttctcgcgacaccgttttggtgggatttgtgtttatatttcacaaagcgacctgcgagaatatttattagcaataggtcaaaaaactgaaaatgacacaagtaaaagcgaacgtgaaagtttaccatttaaagacgcgaacgctgtgtcgtttttagcctcctaaaacagcacgtgttccaccacagcttcttgtccctacttccataatctgaaattctggatgttgcttaaacgcagtgcactaccacatggggcagagatgagcaaatttcggaggggacaacactgggcacaagctaaaaagctacatacgtaaaatgtgacataacgtccaaataattaaatagtgacattacggattcaggcttacgaaaacttgtacatatcttcaaaagataaataaacaatatatatactagtcagaaagaaaaatgacggttccttttaaatgagttataacatggtcatgtttcttcaatttggattgatgacatctatgacgatgtcttgttgacacaaccaaactataccatttcaaaaactgctttctgatgaccaaatccttagttttgtttattactgtggtaaagttgctgggatgatgaggcttttagttctcgatcatcattagtgaccttcactatccattcgcagataatcggatttacctcttctgagatttcatcgtggggacagtgacctttacttgcaaatgagaccagagtcaagaagaatggtatatagactagtggatcggaggtgtatagagctttagcagttagttttatgttttacctgctttaactttctttatcaccatcgctggacaaagctccttcagtaaggctactttcttctgcggatccgatatgggatcttccattccctaatacatgaatgaaaccgatgaatattgatcctgtgtaatctcctaatagaagttagaatgaggatgcaaacaatgtttgaaattttgatacctgtattactagagttttttcctcaaaccctttgagtaggtaattcaaaggaagcgaaagatcaaagccaaagatactttccaggaccataaccacaccagggtctcgagactattatgtgtattaaggtaatctcactatcttcaatattttacttgtagatcatgaatcagttaatgcaaaaaaaggatactgctcttagcatttcagtgacaagaaagtcatcagctctctcaggtttctgcatcataaacaagcagttgggttagaaatccgacacaatgatgagcatttacactttctcatactgatgttgaaatcttcctattacttacaactggataacaatcctttaatagctttttgacattgagttgtaggaaaaagagaagaagtcgagaaccaaattgtgcaccaaatggaactcgcctttcctaaaaaaagaaagacagtaggatgtgataattagaataacttaattcctgagcccacactattctttttttttttttgaaaagtgaaaattcagatattcatgcattcccatgaaacatactctagagattgggagaggagagtatccaggtaccacattgccggcactgttaacaaggacaacggacttaaccaacgccggccaaagaaaggccattaatgcaacgaaataccctgatagaggaaaaaatatatatacaattagaggagtatcttaatcatttgtgccattttaacgcatatattacatctcaataacttagggtgcataccaccgattgaattccctacgcaatgtgctggttccccaactacttcagccatgaaatcccgcagtaattcagcccacaaaagctcggtgtaaatgatatttggcttctctgattttccaaaacccaagactgtgatggtccatactcgatttttgctatttacgatgttgtctacattatcgcggtaatgctctagaaaagcaccaaagccatgcacaagaagaacggcaggcccttcattaccaaccactgtgtactgaaacaaggaagtgacttctattaaaattccatagcaaatataaaaagatcaagcagtgggattacaaaaatggccaatgtaggccattggacttggagaaatatgagtaataacagaaacctgaataagatatcccttccatctccaaatccttatagcgtgccttttttcatcaatcctctctctacttagagccaggagataataccactgccaaaacaaatccaacatcttcaaatattttcgaaaagaaagtaggagcatagatatatcatgtctatgagttattgtacctccatagagcatacagcatcagttgcagcagacactgtggcagctgaatatccaaaaggagaaataaatccagcattcctttctttttcatactcgattgcttcatagtggacacttcttctggatacgataccaagacagaggacaggtccaaaaagtttgaaaaatgaagctccgggcctagtctcggcatcacgaagtctcgcatggaccctggtcaacatcaaaaccaacgcccatcactcttcaacaagatataaaatataccagattcattccataataaccactttcatatggaagcatctgggaagcacaataacgccagaattaagaataaccacgtactcttgccagtcatctcgacttgtaccctccaagtacctcaagtatcctgctagagcattcagtacaacctcatttccacctccaacagtatctcttttacttgtgacaaaaacagagttatcaaccttcttccctaaacttccatcaacaattggctccatactgctttccttcaagttaccaagcctttccattaatactctttcagcagatgcctgtgccatttccctccaactattttctatttcccataagctttccttcaaatagtccttcaggtcatcgagcgttggcacagaacctggagcatgtttcatttaccatttcccctagttaaaagagtcacaaattagatatctaaaagaactactcaagcaagagatccaactccatgaatattgaagaaaaccttaccccactgcaattcacttcctggagatgaaaattttgctgcaggaactggcaaagtgagaggcagcttcagtttcttaaactcctcccaagattgtggtagatctgtcaaattctggaagaacaaaaatgtgtcacataagtaactggttctgaatcactacgcagtaactgatattgtaaaagatacgtacttggctctcgtaaaaaggagtacgccaagcaacaatcctcggtgattctccagataaagaaacaccttccaatttattctttacagcgtctaaaacctcacacagatggtattctacctcttcttccacaaagacaaaaggagctcgcacctgttacaatccagtacatgcttgtgacaaatagaatcttgccttcaaattgtgagaaaaatgctcaaattatactcggtgaagttacctctttgacaagatcttcaatgacattctctgcattcccatatctgagcataagatttgatccttgcttcttcaaggtttttctcaaatcttccaatgctataatagctagctctaaagtgtccgttgtgtatcctacatacatataagcccgttggattagatacccaatcaagtaacgcttggaaatggagtcctatggaagaatcctagctacttgatctatgcaaaaccattccactctcctacaagctaaaacgaagcagaggttcatcaactagagagatccgaattgagctcaggtaaattcgaatttgttccgctaatcaatccaacatttggaatgtatataaacttactcgatagaatgcgacgatcgaggacgtagagaggtatgacggctctgtgcttagacgcagcgaggaggccaggatgatcatcaacacgtaggtcatgtttaaaccacacaaccgccgtggaaccttcattcgttgccgaagacaaacaacatttgcatcggtttttccgatcattccgccggagacggagatgcaggaaatgcgggagagcgaggaacgccatgaggacggtggaagaaaaccagaatcagtgggttagtactagtagtatccatgaagtcgaagcagagagagagagagggattgtggtggagaagactctttccaagtgtgtggtcaatactcagtcccacagagaaacacctaacattcaaaacgacgtcgtacttcacttttttctttctttcgttttttgtgttcaactgtgactgtcttcattagatttgagactatctatttacattctgattatttcttaagaagaagcggccatggaagtcaaaggagcaacccggagctctatcatagttccttctgttcaagagatggtgaaggagaagatgatcacgacggttcctccgaggtatgtacggtctgatcaagacgtagctgagatagccgttgattctggtctaagaaaccagatcccaatcatagacatgagtcttctgtgttcttcaacctccatggattctgagattgacaagcttgactctgcttgcaaagagtggggattttttcaggcaagtctcaactaaagctacactattttcttatttaaccaaactgccctgaaaatactcaactctttacaaaactaccccatcttcttttgtgttagcaaattcatatggaattcaaatttatccttgtggcatgtgtttatgaatattcaacagcttgtaaaccatggaatggagtcaagtttcttgaacaaagtaaagtcagaggttcaagacttcttcaaccttcccatggaagagaagaagaatttgtggcaacaacccgatgagatcgaagggtttggacaagtatttgtggtttcagaagagcagaaactcgattgggcagatatgttcttccttacaatgcaacctgttcgattacgcaagcctcacttgttccccaagttacctctgccctttaggtttgcctcaaatgtataaaatcattcttaataaatacacaaattttctctgtttaaaacttggtttatgtttcttcagagatacactagacatgtattcggctgaagtgaaaagcattgctaagatcttacttgggaaaatagcggtagctctgaagatcaaacccgaggaaatggataagttgtttgatgatgagttagggcagagaattaggctgaattactacccgcgttgtccagagcccgataaggttattggtctaactccgcattctgattctacaggactcaccatactgttgcaggctaatgaagttgaaggtctccaaatcaagaaaaatgccaagtgggtttctgtcaaacctctcccaaatgctttggttgtcaatgtcggagacatcttagaggtaagttataaggacgagagagtctattcttggtatcatttgtaaatggctctgatgaatggtaattaatgtagataataacgaatgggacataccgaagtatagagcatcgtggagttgtgaactcagagaaagagagactttcggtggcggcattccacaatataggattgggtaaagaaattggtcctatgagaagtctcgtggaaaggcacaaggctgcatttttcaaaagcgtgactactgaagagtatttcaatggcttgttttcccgtgagctcgatggaaaagcttaccttgatgttatgagactctaaaaggaaacaattcataaaaatattggcttgtgccccaagaaaccaatcacattttctgacccttcctattgtagtgtatatactctgtttctcctctgtttcatgcttttgcaaatagccaacatctctctctctctctctttcactttttctcatctgtttttttgatagatcaagaaacctgactataatatgagtgataacagaaacctgaagaagagtgcccttccatctccaaatccctatagagggccttttattcataagtcctctctctatttagagccacgagagagattaccactgccaaaacaaatcaaacagcttcacatattttgagatatcatgtcaacggattagtagcttccatgaactggaagcagtgagactagagaagactcgttcaagtgttgtggtccgcagagaaacaccaacgacgtcgtacttcacttattgctccagtctttgagcaaaacgctaaaaccttttggtacaaaaggacttaccaattattatttttcatttcttagatccgactagtaaaagagaggaattcaaagcaaaagttgagaagaaaagaaaacaactcttagaggagaaattgtcaaacaaaattttttagtgagaaagttctcctatatatgtcgacagaggaattgggcaaatacattttagtgagaaagtttctccaatgagtcgacagaggaattgggcaaatacattctaatggctgtgggtattagagtaacttttttctggaaagtttaatattatttccagtcatcgaatcattgatgtaagcaactaagcattagagatgaatagtatacgagttgttctcattttcacgttttcagaacgtgattccgccaggagcggacccatatgggggagttgccactgtcaaatattttgaaactagtgttattttataaaagatttttattgtgcccctattaaatacactatttattgtccccattattttttatttttttacagccaccttttaatacaaaattggcgcaagttttgacttttgtattatattgtattaaaatttaaaaatttattttattatataaagtttcgttgaaaaagttactatgataccgacatatatcaagtcaactgatcagattttgatacgtataaaacaaatagtacaataaattataaatcctaaagtaaaaggattgcaatttttaaaggtatataaaaataaaataatattttataattgctaattctgaaaagaaaaaactacaattattattctttgaaaatatatattgaatagaaattatatatacaaaaaaataaaatcatataatcttattatataacaattgatgtttcaaagttattaaatgatttctatatgtgttgcttaattgatgagattttgatttgtaagaacatttctcccaattatattttgacacatgctattatgctaatataaaaataaaactcacatatctttaacataaaataaaataatataaatatatattaaagtatataacttaaaaggatatatttcaattaaaataatatttataaaaataaaaaaacttacgaaaaagggaaagtgtaaaaaagcttacaattacaaaaaaatatattaaaatgaaattatacggaacaaaaaaataagtaatatatcttataatataatgtttgatgtttcaagcttagtaattaatgattgtgtcatttttatttataactatgtgataggagtatgtaaactttttcttttttaggtaggagtatgtaagatcaatataagtttatttttatttttatctcagctttgaattatctaagcatcatatatcattgtgcttaaaaaaaaaaaaattaatgatgtcaaattatttttcttttaatttcgcaacatttattggtatgtaaacattcatcgtaattgagtagcttttctttattttagttttcttaaaaacatcattaattattgttgtgtgatatatttttcaattgattttttatgtcggaaattttaatgatttaaaaaactatacaagattgaaagtaagagatatattgttggacgtaaaaatagaagacgtgttgttggtttaatgtgtatataaacattttataagtagtggcaaagaacatatttcaacagtaaaatatgattgagatgtaaaagcactagtggtaaatgatataagaggacagttggatctgtggtttgcatgtaatacattttctaaaagaatttgtagaataatatacagtaaaacctctataaattaataatgttgggaccgcaaaattctattaatttatcgataaattaataaatattaatttatagagagatttttctaatttggtaagttttttaaaatttttttatgaaaatataaacttccattcattatttgaaatatctttctagaactaattacaaataaaaataattatcatgttttgaaaacaacacgaacagtttttaatatagtaaaaattattaaaattaaattaaaaataactaatgtgagtttaagcaaaaagaaacaactaaaattatatttcattaaagttgttatatataattataatatatatatatatatagttgatatttttatataattattaatttatgatattaataagaccatatgtttctataggattttcaaaaaaattattaatcttattaatttatcgagttgtgtcactttttacactggtcccaactcgagaccggaagaatttattaatttatagaggttattaatttatcgaatattaatttatagaggtttaactgtataaggggaggccggaaaattacgttttttgagatacggtaataatagtaaacaaaattttggcaaaagttgtggtgatcgataattttaaccttactatatattattataataaaatgttccaactagatataaaatatagaaacgtaaattagtatagtaaaacaaaaacgaattaataaaatactaactcttgtttctagactttgtcatccatcaaaagctctataaaaccaataatcttcattggatgtaaaattatctatttacatttttctctttcaagaagaagcagccatggaaggtaaaggagtaacctttagttctgttatagttccttctgttcaagagatggtgaaggagaaggtgatcacaacggtacttcctccgaggtatgtgcggtctgatcaagaaaaaggcgaggcagccattgattctggtgaaaaccaaatcccaatcatagacatgagtcttttgtcttcttcaacctccatggattctgagattgacaaactcgactttgcttgcaaagaatggggatttttccaggcaagtctcaactaaagctacactatttttgttttatcgaaattgctccacaaaaactcattccgtacaaaacaattccatgtttttgtacgtgtttgcgtatacaacaaccccatatggatttcaaatttatacccttgtggcatgtttttatgattatcaaacagcttgtaaaccatggaatggacttggacaaattcaagtccgatattcaagatttcttcaaccttcccatggaagagaagaagaagctgtggcaacaacccggtgatatcgaagggtttggacaagcttttgtgttttcagaagagcagaaactcgattgggctgacgttttcttccttacaatgcaacctgttccattacgcaaacctcacttgtttcccaagttacctcttcccttcaggtttgttccaaatttttaaattattctacaaactccacaaaagtgttctatgttaaaattttggcttttgtttcttcagagatacactggatacgtattcggctgaactgaaaagcatagctaaggtcttattcgcgaaactagcgagtgcactcaaaatcaaacctgaggaaatggaaaagttgtttgatgatgagttaggtcagagaattaggatgaattactacccgccttgtccggagcccgataaggctattggtctaactccacattccgatgctacaggactcaccatactgttgcaggttaatgaagttgaaggtctccaaatcaagaaagatggcaagtgggtttctgtcaaacctctcccaaatgctttagttgtcaatgttggagacatcttagaggtaagttatttggatgacagagcttattcttagtatcattgtaaatagttctgatgatggtattggtaatttatgtagatcataacgaatgggacataccgaagtatagagcatcgtggagttgtaaactcagagaaagagaggctttctgtggcgtcattccataatacggggttcggtaaagaaattggtccgatgagaagtctcgtggaaaggcacaagggtgcacttttcaaaaccctgaccactgaagagtatttccatggcttgttttcccgtgagctcgatggaaaagcttaccttgatgttatgagaatctaaggaaaccatgcataaaaccattgtcttcttgtgttacatatactctgtttcttctctgttttcatactttctgcggcaatcatctctgtctgctttatatatgttaaaacaatgactaataaagaatgtttgtgcttttgatgttagtgttgctcaaagctatatctaataaaagtaacacattgtcccaaaaaataaaaataacagtaacacagacgctctatttttgaaacagatgtgagattttatttagcaatgtatttttttttgttaccaatcaaccaaatacattctcagtccaataaatgatctcaaaacatccccccatctttcgaggtacgcttctttggagattgaggtataacttaagtttgctcaaaatgttcatggtaagcgatgacaaaaagctttctctatccggcagaataatctgcagatctctagcagacctcgagtttcttggaagtaaaaatctccgtcaagaatgcagcagagaatccaaagcgtgaaactgtaccttctaagaatttggatcttccaaatgcccaaaagtctcattccaatggcttacagcttcttcctgtgttcgcataatccagatatgtttttccgcagcagctttctcttgctcttccagaattctctgcaattgtcaaagcttaaattttcttggacaaaacagacacattcatacacaaacagtagaaactgcaccaatgttatgtgcataaaggacatggtgcagaaggacattgtcccatgttcagaaacaaaatgtatgctaaacataaaagctgcaccaggtaacaccgaattcgaattataattggaaaaagtgtgattcacataactccaaatcatggttatatgagattaagctagtctatgtgatatccaatagatgatgctaaaagacaaaagtaatgaagaatgaatcatttgtaagaacaaagaagctacaaacctcggcttcagaagctctttttgtcttcaaggaaagacaatcaaagaggtcagagaacttcttagtacaatcatcaagttttccaacccggtaatactgctgcatttgataaaatggtgctgcaaaaagagattgtctgagttaaatctatgaaaatcatgtcaaaggaatcaaaaaggtcaatgaagccaagagaacattatagatgaagtgaatgcacataaatcttaaaaattcatttacaaagtgatacaacttgctaaatagtgtctaagaactatgtcattttatacccaaatcgtttcctgtgtcatcgccattgctggttatgttggaccatctagacatcccttcatcaaaacatacattgaggaaatggtttcagagatcctttaattggtgtaaagctaatccatttctaaactctcaccaaggctttttattagtctataacaagctcgttaacaattccaaaaggcaaatgacaaagcaaagattggtatatgactgattgatcaaatctcaatcaagttcaaattttgtgagctcaggatatataattttgcagtttagagatggtgagaggagatggaatagaagatgtagaatcagagaatgcgatcagatgaggagaaacgaagacttacaatagcagaaccagagagcgtcgaagcatttagtgcaggacacgcgccgtcgcacagatgaagagtcttcgttctccgagctcatcgtgtctgcttagtgccggaagaagaaacgggtcaggtgttgttgtattcgggtttagatttagggtttttgccaccaatcatgtttattttttcctttctctctttttttttttttcctttaacaccaaaataaaataaaataaatacatcaactataaaatcaaaataactcaaacaaagaaatatattcaaaggataatttttaacaaaaatataatttaaaagactttaattggtaagattgcataatagcataataacataatgatataagttgcataataaaaattcgtaaaatgaaaacttgcagaatgaaaaatcgtagaataaaattatttttaaaatatgttggttgattttatttggaagagaatattatacgagtttcatttcattttgcatatcaatttatttatttttacgattgtacaatttttatatgttaggacttttgacatctcatatatgtatgtaacatacatataaaatacaaaagtacttgtctactacagaaaatcaaagaataattttttggcagatacatgcgaatacaatttagatttcaagaacaaaactcttactagcaaaggattcttgacaaaatgtgatagctagtcccatggaacaacaatggaggatagaccggtttatatcatcaaaatcttatcataagtcaaacgtgtgagatgatgattcatggacaagtgaaaatgaactctgacacgtaaaagaaccagagtttgtgaaagtttgggaggaatatttcttcaaagggtacttcatctttagtcgtcaaccagattaccacactaaagtgatatattatgtctctatttttaataatgttaatattgtagacaacgaaaaaaaagaagcaaattggcatggctcaaacgttacgttagctccttctttacagcttttttttttcctattttaatatccccaaaaagatttacttactaatacagaaaaacattagttgaccaacaaaataagtacatatttatcccaattgtttggttcgtaaccaaattacaaaaactaatttcacctaacgctataatatcaaccaaaccggaacaaattttctcccttaaccaagtaattaattattcgaattaagtcaaaatttttcattttattttattcaaacctacagttacattttttcctttatttctctctctttctttttctacataacaaaaattataatatcccatctgttttattccatagttttatttttgttttctctttccatttcttgccaaaaccctaatttcaccttcacttaagaaatttctcccccaacttaaaccacccccttagaaaaaataaacaaaaaaaattagatctttcttgtttgcttataatatgtatgttttaggtcgaattttctgaaattaagattcattcctccatggaagaagctctgtttttattctctttagcttagcttagcttctactgatctgtttttgctacaaaatcccatctttttctttaaaactctttatctctgaatcttgagtttcttgtagaagaagaagcaattttgaatctttcgtaatcataaagattcgtggaggatctctactgatttgtcggaatctctcactacagaatcacttgatcttatgtccggatggaggagagagaaggaaccaacatcaacaacaacatcactagcagtttcggcttgaagcagcaacatgaagctgctgcttctgatggtggttactcaatggacccaccaccaagacccgaaaaccctaacccgtttttagtcccacccactactgtccccgcggccgccaccgtagcagcagctgttactgagaatgcggctactccgtttagcttaacaatgccgacggagaacacttcagctgagcagctgaaaaagaagagaggtaggccgagaaagtataatcccgatgggactcttgtcgtgactttatcgccgatgccaatctcgtcctctgttccgttgacgtcggagtttcctccaaggaaacgaggaagaggacgtggcaagtctaatcgatggctcaagaagtctcaaatgttccaattcgatagaagtcctggtaaatatctttttagaaccttcctttgatgtctgttaaaagttagtagtgtaactgacatggatctatatgtggggttgacttgtacgatgttggaataagaagagaactttttgtgtcagaagtcataagctagtgaagagaaaggctacgactttaggggaagtagattagaatatgcacatcacaacatttcccaaaagctcagggattaggagagaacagctttaattaagtacagtcttggtcttgtgtttgtcttatagatcagttacatcttgttttagtttgatatttgtctgtcttgtgtatatcttagtgttttgttgtctcaactttgatttttgacttgtctggattcagttgataccaatttggcaggtgtaggaactgctgattttgttggtgccaactttacacctcatgtactgatcgtcaacgccggagaggtatgtttttttctgaatgatcatatagtcttcaaatcgcttactatgatcagttattaagctaagctgttgacctgtggatttgtgtaggatgtgacgatgaagataatgacattctctcaacaaggatctcgtgctatctgcatcctttcagctaatggtcccatctccaatgttacgcttcgtcaatctatgacatccggtggtactctaacttatgaggtccacatgctctcttctatcatccatcttctccattttcatatatatatataaagaatgcattctctgtatttggtttccttctaatgttttttgtcttattgtgagcagggtcgttttgagattctctctttgacgggttcgtttatgcaaaatgactctggaggaactcgaagtagagctggtggtatgagtgtttgccttgcaggaccagatggtcgtgtctttggtggaggactcgctggtctctttcttgctgctggtcctgtccaggttcgtttaagtttccagatagtatgtggtctcagaacatgagttatattttgtgtctgacatggatttattacaggtaatggtagggacttttatagctggtcaagagcagtcacagctggagctagcaaaagaaagacggctaagatttggggctcaaccatcttctatctcctttaacatatccgcagaagaacggaaggcgagattcgagaggcttaacaagtctgttgctattcctgcaccaaccacttcatacacgcatgtaaacacaacaaatgcggttcacagttactatacaaactcggttaaccatgtcaaggatcccttctcgtctatcccagtaggaggaggaggaggtggagaggtaggagaagaagagggtgaagaagatgatgatgaattagaaggtgaagacgaagaattcggaggcgatagccaatctgacaacgagattccgagctgatgatgatcatacggtttcttttcgcggatttgttaggtttgatggatttcagattttggttgattgtttttattaacacagaatgtttagaagctgctatctttaggttcccatcctcttgtgattgttgtagtatccttgttagaaacaaacttactgttgcaaaactctccttcaagaaagttttcactttgctttaccaatttacattgtcactatttcaaatagatatgtatttctctcaaatgatgcatcaaaatcggtgattagtgagtggtttagtggtaggaacttcccactaactctcatgtaactttttttgtcacccactaactctcatgttagttagttttttggtttcattctctatatatattgcagaatgttagatatgtgtgacatttataataacttgagagaagtttctagaaagaaaaggttttgaaaaaaagttaaccgaaagggcattttcatggtgttaagtgagtgatgtttgtttttgttttatttctcaaattctacctcagattttcgatgacttcttgacaagttatatcactaaaccaagataaggtataaattattttgattttattgcgtttgtatttaatagcttacattggtatacttgactttgaatttggttctggcatgtttgtgtcactagtcatcgtggttgaagaaaatgttaagtttcttttttttcaacttaaaatctatcaaaaatatttcatttttatgattttagtagcatagatctatatggtaattgttggaaaaaaatatactttgaaaacatatgataattttagtatatgttaacctttcaaaaatataatattttatttaacacgtctcgagctaacaactttgaaaaccaatatttatatagtaagttaagttttcagcctcttacttctctagaatatgagactttttaaattcttcccacaattaaatatattataccaaatgtataattatttttgttgacacgtctaacaatcatgtggtttagtaactttaaaaactaaattttatatgataagataagtttttttttttcttataatatgaaaattgacttttcaaattctttccatatgttaatatgttatacttgtaaatatggttaatctcattgaacattttatttggttagtaactttcaatatcaaagtttatatagtaagagaagttttcacctttttttatttatacagaaaatgtgaaatgacttttcaaattccttccacatttcagtatgttatactaaaagtatagttaatacgccagttaaagtttcaattaatgaaaatatcaatatgatctaattagaaaagggccaaaactgtaatttttgtatgttttgactggtagagctaacagagaaaattacttttacagagagtttttggtctataaagagagcttgcatggcttcttcactacacttcaatcgttatcacttctaaacaaaacccaaagaagatgcacaactctctaacttctaatcagagtggggctactagtccgacggttttctccggcgagttcgccgatgacgtcgactggtccgatgaaaactggccggaactagagttccgttcagcggaggacgaagcttggtacgccgtagaattttctgacatctgtgacgctttgtggatcagcttcaacggcttctcttatgagcacgacgagttttatccagctgacgatttcaaaaactccgacgagattcaagaattcgaagagaggtttcgagcttgttccgagcagatgcaagacatcgaatgtcccaaggtccatgaaggcacccaggtctgcgccacgtttccttccgtcaccgaagaagtcaagttctacgacgctatcgtcgttacggtgagttctagaaattaatcccggtttagtgtttgaaatctcaactccggtttgagtaatacggtttttgtgtatataggtggagaggacgaagcatgaacgagacgaggaagggaacgaaatttgtggatgtgatttcaaacttttctggaaacaaggtccttggattaaccaagtgactactgcgaaagttggagatatttgtctcagagcaaaggataatcgaataaatccaaaagtggtttcgttcttgaaagaagctagaaggaagcttcatggagaaacatgtaatcaaggtaatttattacacttatctttcttttgtcttatgattaaaaacttactatgtaacggattagtgtatatgtgtgaaacaggggaagagacagagtggcaaaagattcttgagaaggtgaattctgctattcaaaacaacttaagcgttgatggatgattatgttatgttgcttagtgtgttgcaaaaaaaaaactgaatactctagtttggggaagtctcttagttcatgcctatcactccttgtttttttttttcttgttgttgaagtccttggtctgaaatatatatgcttgatttaattgtgttgatgaacatcacataaggttttgtaaacagaggcataattgataattacatttgcaaactctaaagttcacaatcatagtccatcaaatacttaggagccgaacatcaaaaatgagaaattccaattctaaaaacattaagatatcagaaaccagaggcccgccgtagagattgccattgcgacggagaataatggtgacgtatggtggatcatcaatgttacaaaaataaaaaaataaaaacgggtcaaaaggtcagaaataacagtaaaaaagaacttgcagaacaagaaataggtcaaagtctttctgacggtacaaaaatgacaaattcgtcacggtgatgatggtgacgtaactgtacctgagagtagagagaccttgattagagactagtgagagagactttccacaaatgaatcattgaatactaactaatgaagaagaaactataatcactttatttacaccaaaaaaaaggggtattatttacattattcaattgaacggattcacgagtcggggttgtcgttgctataaaatctggcttaaagttgattggcccctttttgggttcaagtccatctactatgtaaacagcatttgtatgattccaatttttggtttttaagcaagtgtaaaataggccaacaaaagctatctggaagaggaaatctgggaaacaaatgctatggtcttatcacttgaaacacaaatccatttttcaaaaagattcaagtgttaaaaaggaaagaaacaatcttttgcagctacaacaccattcagaaacccctcatcagagattctatgaattc

SEQ ID NO: 625 - DNA, 77793 bp, Arabidopsis thaliana
ttgtccggagcccgataaggctattggtctaactccacattccgatgctacaggactcaccatactgttgcaggttaatgaagttgaaggtctccaaatcaagaaagatggcaagtgggtttctgtcaaacctctcccaaatgctttagttgtcaatgttggagacatcttagaggtaagttatttggatgacagagcttattcttagtatcattgtaaatagttctgatgatggtattggtaatttatgtagatcataacgaatgggacataccgaagtatagagcatcgtggagttgtaaactcagagaaagagaggctttctgtggcgtcattccataatacggggttcggtaaagaaattggtccgatgagaagtctcgtggaaaggcacaagggtgcacttttcaaaaccctgaccactgaagagtatttccatggcttgttttcccgtgagctcgatggaaaagcttaccttgatgttatgagaatctaaggaaaccatgcataaaaccattgtcttcttgtgttacatatactctgtttcttctctgttttcatactttctgcggcaatcatctctgtctgctttatatatgttaaaacaatgactaataaagaatgtttgtgcttttgatgttagtgttgctcaaagctatatctaataaaagtaacacattgtcccaaaaaataaaaataacagtaacacagacgctctatttttgaaacagatgtgagattttatttagcaatgtatttttttttgttaccaatcaaccaaatacattctcagtccaataaatgatctcaaaacatccccccatctttcgaggtacgcttctttggagattgaggtataacttaagtttgctcaaaatgttcatggtaagcgatgacaaaaagctttctctatccggcagaataatctgcagatctctagcagacctcgagtttcttggaagtaaaaatctccgtcaagaatgcagcagagaatccaaagcgtgaaactgtaccttctaagaatttggatcttccaaatgcccaaaagtctcattccaatggcttacagcttcttcctgtgttcgcataatccagatatgtttttccgcagcagctttctcttgctcttccagaattctctgcaattgtcaaagcttaaattttcttggacaaaacagacacattcatacacaaacagtagaaactgcaccaatgttatgtgcataaaggacatggtgcagaaggacattgtcccatgttcagaaacaaaatgtatgctaaacataaaagctgcaccaggtaacaccgaattcgaattataattggaaaaagtgtgattcacataactccaaatcatggttatatgagattaagctagtctatgtgatatccaatagatgatgctaaaagacaaaagtaatgaagaatgaatcatttgtaagaacaaagaagctacaaacctcggcttcagaagctctttttgtcttcaaggaaagacaatcaaagaggtcagagaacttcttagtacaatcatcaagttttccaacccggtaatactgctgcatttgataaaatggtgctgcaaaaagagattgtctgagttaaatctatgaaaatcatgtcaaaggaatcaaaaaggtcaatgaagccaagagaacattatagatgaagtgaatgcacataaatcttaaaaattcatttacaaagtgatacaacttgctaaatagtgtctaagaactatgtcattttatacccaaatcgtttcctgtgtcatcgccattgctggttatgttggaccatctagacatcccttcatcaaaacatacattgaggaaatggtttcagagatcctttaattggtgtaaagctaatccatttctaaactctcaccaaggctttttattagtctataacaagctcgttaacaattccaaaaggcaaatgacaaagcaaagattggtatatgactgattgatcaaatctcaatcaagttcaaattttgtgagctcaggatatataattttgcagtttagagatggtgagaggagatggaatagaagatgtagaatcagagaatgcgatcagatgaggagaaacgaagacttacaatagcagaaccagagagcgtcgaagcatttagtgcaggacacgcgccgtcgcacagatgaagagtcttcgttctccgagctcatcgtgtctgcttagtgccggaagaagaaacgggtcaggtgttgttgtattcgggtttagatttagggtttttgccaccaatcatgtttattttttcctttctctctttttttttttttcctttaacaccaaaataaaataaaataaatacatcaactataaaatcaaaataactcaaacaaagaaatatattcaaaggataatttttaacaaaaatataatttaaaagactttaattggtaagattgcataatagcataataacataatgatataagttgcataataaaaattcgtaaaatgaaaacttgcagaatgaaaaatcgtagaataaaattatttttaaaatatgttggttgattttatttggaagagaatattatacgagtttcatttcattttgcatatcaatttatttatttttacgattgtacaatttttatatgttaggacttttgacatctcatatatgtatgtaacatacatataaaatacaaaagtacttgtctactacagaaaatcaaagaataattttttggcagatacatgcgaatacaatttagatttcaagaacaaaactcttactagcaaaggattcttgacaaaatgtgatagctagtcccatggaacaacaatggaggatagaccggtttatatcatcaaaatcttatcataagtcaaacgtgtgagatgatgattcatggacaagtgaaaatgaactctgacacgtaaaagaaccagagtttgtgaaagtttgggaggaatatttcttcaaagggtacttcatctttagtcgtcaaccagattaccacactaaagtgatatattatgtctctatttttaataatgttaatattgtagacaacgaaaaaaaagaagcaaattggcatggctcaaacgttacgttagctccttctttacagcttttttttttcctattttaatatccccaaaaagatttacttactaatacagaaaaacattagttgaccaacaaaataagtacatatttatcccaattgtttggttcgtaaccaaattacaaaaactaatttcacctaacgctataatatcaaccaaaccggaacaaattttctcccttaaccaagtaattaattattcgaattaagtcaaaatttttcattttattttattcaaacctacagttacattttttcctttatttctctctctttctttttctacataacaaaaattataatatcccatctgttttattccatagttttatttttgttttctctttccatttcttgccaaaaccctaatttcaccttcacttaagaaatttctcccccaacttaaaccacccccttagaaaaaataaacaaaaaaaattagatctttcttgtttgcttataatatgtatgttttaggtcgaattttctgaaattaagattcattcctccatggaagaagctctgtttttattctctttagcttagcttagcttctactgatctgtttttgctacaaaatcccatctttttctttaaaactctttatctctgaatcttgagtttcttgtagaagaagaagcaattttgaatctttcgtaatcataaagattcgtggaggatctctactgatttgtcggaatctctcactacagaatcacttgatcttatgtccggatggaggagagagaaggaaccaacatcaacaacaacatcactagcagtttcggcttgaagcagcaacatgaagctgctgcttctgatggtggttactcaatggacccaccaccaagacccgaaaaccctaacccgtttttagtcccacccactactgtccccgcggccgccaccgtagcagcagctgttactgagaatgcggctactccgtttagcttaacaatgccgacggagaacacttcagctgagcagctgaaaaagaagagaggtaggccgagaaagtataatcccgatgggactcttgtcgtgactttatcgccgatgccaatctcgtcctctgttccgttgacgtcggagtttcctccaaggaaacgaggaagaggacgtggcaagtctaatcgatggctcaagaagtctcaaatgttccaattcgatagaagtcctggtaaatatctttttagaaccttcctttgatgtctgttaaaagttagtagtgtaactgacatggatctatatgtggggttgacttgtacgatgttggaataagaagagaactttttgtgtcagaagtcataagctagtgaagagaaaggctacgactttaggggaagtagattagaatatgcacatcacaacatttcccaaaagctcagggattaggagagaacagctttaattaagtacagtcttggtcttgtgtttgtcttatagatcagttacatcttgttttagtttgatatttgtctgtcttgtgtatatcttagtgttttgttgtctcaactttgatttttgacttgtctggattcagttgataccaatttggcaggtgtaggaactgctgattttgttggtgccaactttacacctcatgtactgatcgtcaacgccggagaggtatgtttttttctgaatgatcatatagtcttcaaatcgcttactatgatcagttattaagctaagctgttgacctgtggatttgtgtaggatgtgacgatgaagataatgacattctctcaacaaggatctcgtgctatctgcatcctttcagctaatggtcccatctccaatgttacgcttcgtcaatctatgacatccggtggtactctaacttatgaggtccacatgctctcttctatcatccatcttctccattttcatatatatatataaagaatgcattctctgtatttggtttccttctaatgttttttgtcttattgtgagcagggtcgttttgagattctctctttgacgggttcgtttatgcaaaatgactctggaggaactcgaagtagagctggtggtatgagtgtttgccttgcaggaccagatggtcgtgtctttggtggaggactcgctggtctctttcttgctgctggtcctgtccaggttcgtttaagtttccagatagtatgtggtctcagaacatgagttatattttgtgtctgacatggatttattacaggtaatggtagggacttttatagctggtcaagagcagtcacagctggagctagcaaaagaaagacggctaagatttggggctcaaccatcttctatctcctttaacatatccgcagaagaacggaaggcgagattcgagaggcttaacaagtctgttgctattcctgcaccaaccacttcatacacgcatgtaaacacaacaaatgcggttcacagttactatacaaactcggttaaccatgtcaaggatcccttctcgtctatcccagtaggaggaggaggaggtggagaggtaggagaagaagagggtgaagaagatgatgatgaattagaaggtgaagacgaagaattcggaggcgatagccaatctgacaacgagattccgagctgatgatgatcatacggtttcttttcgcggatttgttaggtttgatggatttcagattttggttgattgtttttattaacacagaatgtttagaagctgctatctttaggttcccatcctcttgtgattgttgtagtatccttgttagaaacaaacttactgttgcaaaactctccttcaagaaagttttcactttgctttaccaatttacattgtcactatttcaaatagatatgtatttctctcaaatgatgcatcaaaatcggtgattagtgagtggtttagtggtaggaacttcccactaactctcatgtaactttttttgtcacccactaactctcatgttagttagttttttggtttcattctctatatatattgcagaatgttagatatgtgtgacatttataataacttgagagaagtttctagaaagaaaaggttttgaaaaaaagttaaccgaaagggcattttcatggtgttaagtgagtgatgtttgtttttgttttatttctcaaattctacctcagattttcgatgacttcttgacaagttatatcactaaaccaagataaggtataaattattttgattttattgcgtttgtatttaatagcttacattggtatacttgactttgaatttggttctggcatgtttgtgtcactagtcatcgtggttgaagaaaatgttaagtttcttttttttcaacttaaaatctatcaaaaatatttcatttttatgattttagtagcatagatctatatggtaattgttggaaaaaaatatactttgaaaacatatgataattttagtatatgttaacctttcaaaaatataatattttatttaacacgtctcgagctaacaactttgaaaaccaatatttatatagtaagttaagttttcagcctcttacttctctagaatatgagactttttaaattcttcccacaattaaatatattataccaaatgtataattatttttgttgacacgtctaacaatcatgtggtttagtaactttaaaaactaaattttatatgataagataagtttttttttttcttataatatgaaaattgacttttcaaattctttccatatgttaatatgttatacttgtaaatatggttaatctcattgaacattttatttggttagtaactttcaatatcaaagtttatatagtaagagaagttttcacctttttttatttatacagaaaatgtgaaatgacttttcaaattccttccacatttcagtatgttatactaaaagtatagttaatacgccagttaaagtttcaattaatgaaaatatcaatatgatctaattagaaaagggccaaaactgtaatttttgtatgttttgactggtagagctaacagagaaaattacttttacagagagtttttggtctataaagagagcttgcatggcttcttcactacacttcaatcgttatcacttctaaacaaaacccaaagaagatgcacaactctctaacttctaatcagagtggggctactagtccgacggttttctccggcgagttcgccgatgacgtcgactggtccgatgaaaactggccggaactagagttccgttcagcggaggacgaagcttggtacgccgtagaattttctgacatctgtgacgctttgtggatcagcttcaacggcttctcttatgagcacgacgagttttatccagctgacgatttcaaaaactccgacgagattcaagaattcgaagagaggtttcgagcttgttccgagcagatgcaagacatcgaatgtcccaaggtccatgaaggcacccaggtctgcgccacgtttccttccgtcaccgaagaagtcaagttctacgacgctatcgtcgttacggtgagttctagaaattaatcccggtttagtgtttgaaatctcaactccggtttgagtaatacggtttttgtgtatataggtggagaggacgaagcatgaacgagacgaggaagggaacgaaatttgtggatgtgatttcaaacttttctggaaacaaggtccttggattaaccaagtgactactgcgaaagttggagatatttgtctcagagcaaaggataatcgaataaatccaaaagtggtttcgttcttgaaagaagctagaaggaagcttcatggagaaacatgtaatcaaggtaatttattacacttatctttcttttgtcttatgattaaaaacttactatgtaacggattagtgtatatgtgtgaaacaggggaagagacagagtggcaaaagattcttgagaaggtgaattctgctattcaaaacaacttaagcgttgatggatgattatgttatgttgcttagtgtgttgcaaaaaaaaaactgaatactctagtttggggaagtctcttagttcatgcctatcactccttgtttttttttttcttgttgttgaagtccttggtctgaaatatatatgcttgatttaattgtgttgatgaacatcacataaggttttgtaaacagaggcataattgataattacatttgcaaactctaaagttcacaatcatagtccatcaaatacttaggagccgaacatcaaaaatgagaaattccaattctaaaaacattaagatatcagaaaccagaggcccgccgtagagattgccattgcgacggagaataatggtgacgtatggtggatcatcaatgttacaaaaataaaaaaataaaaacgggtcaaaaggtcagaaataacagtaaaaaagaacttgcagaacaagaaataggtcaaagtctttctgacggtacaaaaatgacaaattcgtcacggtgatgatggtgacgtaactgtacctgagagtagagagaccttgattagagactagtgagagagactttccacaaatgaatcattgaatactaactaatgaagaagaaactataatcactttatttacaccaaaaaaaaggggtattatttacattattcaattgaacggattcacgagtcggggttgtcgttgctataaaatctggcttaaagttgattggcccctttttgggttcaagtccatctactatgtaaacagcatttgtatgattccaatttttggtttttaagcaagtgtaaaataggccaacaaaagctatctggaagaggaaatctgggaaacaaatgctatggtcttatcacttgaaacacaaatccatttttcaaaaagattcaagtgttaaaaaggaaagaaacaatcttttgcagctacaacaccattcagaaacccctcatcagagattctatgaattcagggcagttttattgaacattaatcagttcgacatcaaaagtcagccaagaattaggaggaatctggccaccagcacccttcacaccatacctgggagccaaacaatattatcatcccattaaaaaggtttaacaaaacattgctaattcaaaataacataaatcaaaatgagtttacttaccccattgatggaggaattgtaagcttccttttgtcaccaacgcgcatgcctgtggaattcaaaaacttgagatgaatacaacacgattcactttttgaacaaagttataagtaaaaaaacagtaagaaattaagatatataccattaactccaacatcccatcccttaatgactgatccaatacctacacgttacaataagaacataaagtatcacttacaccagcaatacactgtaattctcaaccaatttcccaagctattatctttgaatctagttataataccaacctagacgaaacttaaatggtgattttccaatgttggaatcgaaaatcttcccattcttctgaagttttccaatatagcgcacagaaacctgcactcagagacaatagaatgagctccaaaaagatttgggaaaacacacaaatacattgatgcactctaataggattttggattcaaaccaagttcacaaagacaattagccagagttaaccacaacttaagggtttgagtgtttgtaggttttacaagccattagtttgttcacttcctatttaatgtatattctttggtgctcttaggtctaagtctaacaaggtattactttgctcactttctatctagtgtcaattctttcaacacccacattcttatcacactaccaccttgttgcataatctatatgagattgcagtaaccatatgatattatgtgtgcaatttatgactttaagtgtgcataccgtttttccaggatcagctctcttgccgttgggttttcccatgctcaactcttcaacaatgagcccatttgggtatgtccgtacttgagaagacttggagtccgctggggtttgcttctcaacagtaccagaaatttctgcagcttcgtcacttggtttcttctttttcttatttttagttttcttctcagcagatttatctggggtcttggagctttcactcctgcaataataccataaaaaagcacagacttttgttaggagaaaaagtttgaaagaaccgctgtatactcataagcgttttttactttgtgatctatgtgagtaataattcaaatacttacttactgatatttcacaaatgacataaacacaatctgttatcaccaaaaaagttctcaaatcaagaaataagagttctcacatggcattgtttgcagttccatcttgagcttttgtgtttgaagaaatttggctaatatcctgcttcttcagaacatttcccgtctgaacttgtccagcttcctcatttaagacattttcccctttcttcttctctttctgatttttcttctttttactcttgtttgcactggaacagattttagaaacaacttcgtatccccacgatatataaaatatgtgaactctgtcctcagagtcaatagagagcaaagagagtagtacctttcttgtccatcatcttgctcagcagccttggccttccgtttcttgttactaccttgttcgtcattatctacaaccatcttctcacctgacgcattctctacttcagatgattttcctttaggaataggtaaaccgtcttcgtcttcatcttcgctttccaaaactggaacatgggcaccctctatggcaacgatttgtttctttgcattctcaccttcgctagcttgactcttcttcttggtttgttttgccttattatctttggcaggtttctcttcatcttctatctcctcaattataactagcaaagatatcattcagattagttttaacagaacaaggaaagatcaatcatataaactattaacacaaatgtagaacaggatcagcaccaaggagacacacttgtacaaaagcttaaatttacggacatacatttgaaaagtcttttatcaatatctttttgaaaccttctagttataagacaagagtgacgaatcaagcaatcacactaagctaaaatggaagtactaagatgcaatctgataaggatctctgtaagaaaaagtacctccactctttggggcagcagcattccgatacctttcaagattgctatcaaggaagtcttcaaattcatccaattgctcatcctcttcactatcatattcacacgaatcgtcttcctcagactcaccaacatcaataccatctctataatatagtcgcaatgaaaacattaagatttctaaacagatggaataatagaaaaacaagaaagcattatttgctaaagtaaactagtaacaatgaaaggatacgaatcatcttcatcatgctcataatcatcttcatcgtcctgataatactccaagaatccagacaagtggatacttctgtcaccagtcacggtgaattccactggctcatcatcatcgtcaaactcaagattcagagggcaacattcgattttgtttggcaacaatgaacacaaagcaataggagccttgtctcctattgaacactgaatcacactcttttctttgctcaaacccgtacctagagttgcctgaatgatggcaaaacatacatacatcaatagatatatcaaacatattcagattccaaaactagactacacaaatatacaattcatatcccaaatcagctcgaaggaacaagagtatagtacctgggtcacgtgaatctttccttgttcattttttggattataagcttgaggcttcccaggtttcacttcaagtcctgcatatgttaacaacacaaaatcagaacctaggaatcatgctccgggaaaatcaaagaaaacactgagcagagaaaactaaccccagaatcccattttctcagctaggttactccttggaatcgaagcggcaactttgtttctacagactaaaaccctaatcgaaggtttttagcagacgagctttatatcgagattaaagcggtttcgagaaatttcgacaatttgtgcaaccgcgctctcagtttgggccttaacagactttgaaattcaatgaagccccaatgaagccccaatgaagcccatatattggtctgtcataaatcgtaaagtaaatggtattgtcaagatactcttcatatttgataacatttaatttgtgttcattattttactagagttaatttgaaaaaaaaatctataattttctctcatgtaaacgcaaattcagaaattttgttttaaataaaacaatatgagacctatctttcaacaaaacaatacaatattgagacctaaacacactgtacaatgacgtgagtttctatctttcttgtcaaaatctgaagtaagtgtacaaagtaatgtctttttgttgtatgtaaccaagttagttaagtgtttgtatctcttgttaccaaggaacgaagagatttccacttgatttctccataattctaccatcgcttaggtctgaccctgagagtgagccagcctcgagttggctctctgaagaatacagcggagaggcaaagctcgatcgttacagttgtataccggaacagcggtgaaaagtttagttgttgtttaggtaattttgtgaaaccaagtattttcttgttaagctaattgttatgatgatctccatcttcttcgtagttgaacggtaacgggacagttttgaacgccctgtatctcccaacgttgttcaaatgctcattctccagcctaatcaacaattacatttcattagttttgtgtagattcatgcatgaaaacaccatcttctcagtctcggagcttacctaaagaagttccagatacctctgcgtatgatctcaaggcaagccataagcgcgaccatagtttctctatgcaagaaagagaatttcagatccaaaactgtttgcaaccacactaacctcaacaaaacattcaggacctgccaagtacatgaagcaacaatcttcaccatatatgtataaagaaaaaacaaaaacagaggttattgctgttttctgtttgctctcaccattgcagcgtagtacacggttttgtgaggaacaagaagcttgtctctcaagaaactattcttacatcctctttgaagcaatccccagtcaagaacaatgtcccagtaagttccgtaaaacgttgcaactcctgagaaaacccaagctgtgatattccagttgcttcctcggtttagagtataagctgttctaagagaagcagcaacgatggtcaaaaggtatttgatgccattgtagccatgactcagatctctgtcttccaccattcttcggatgcactgaagaaaccgtaaccagtaaggtataacggcgacgatgaagtagaatgttctgaatccaatatttgatgtgcaggtgtttcgtcgtctatatctgaaatctccaaaaccatagtagcatatgtagaactctagactcctcagtgcttgaacctagcattgattgtttaaatcagaaatcatcgatcaaaataagtatgaagctatcttatcgagtatagattttctcgaacctggcttgttagttgatctcccaagaaaaagtccggaagatgcacctgcaaaaatggaagacattcttcttaacatttctgtttatgcttcagatgaatggagaggaggatatgttgttggtaccgcgtaaaatggtgcagcaatgcagcggaacagaaccgagaggaagaagaatcggcttgaccgatacaaaatgttaaaggggcagagaacaatgataatcactaactgcaatatgcagagaaacgagtcttactaaaaacaaagattgagttgtgtaaaatgtactgagaaatagagagagatagaaggaacttactacgagaagaaagagggggataagttcggtgactaatctgtaatcttttgtttgagcatccatttccatgtcaaggtttaataagacagcacataaagaaagtgtaccaagaccaaagctgagaagtagaacatgtctataaccaagttcagtgccttgtttgaatccaaagatgaaggagtaattcacacggtatcgcctccagaagtagatattagcagcgtacacgtccatgtgcaaaactacaaacccaaaaaacctgcaaatgaaatgtatatatctcaagaatattacacagagacagagatagtgtgtttggtttatatttggtcgttttactgacctgtaaagagggaacattgtttccatataagttctttgtcccggtgtacccatgatattacgagcatggatgatcaaacccagagctacaatgagagaaataccacagccgaaaaagaagcctaaaacaaaacaaaaaacagaacaaaatgatgaattactcttgaaaatacatgtcaaaagattggttattgtagtgttgatatatataccggtggaaaacgttataagatgacgttctttatttatttttggtcttaaatggctcatcccttccctccgatttgaattggagaaatgttcaatgaaaatagattcaacctttagcaacaacttatgaacctgcacatgtttaaagcttcaaactaaagtttcatgtttcgattttcctagatagaagaaggatacttacttcttcggagctactgaggaaagatttatcgaccatctccatatacagtttcgcagcatttcttttggctatctaaagagtagagcatatatattaaactagagtaaatgctgtaaaagcttgtcaaaattatcaacagaaattaagtaccttatcatacttcttcatgatcttggaaacagcggaagcgttcaagaagctgtagtttttaagatgtcgaagcttctgataaaactcaatgaacgctacctgaagtcgcttttccacttccttgagattatctcttgtgaatttgagctcgtcctgcttatggaccttgagtatagttttaattgcggacagaggagttatttctcgagttttgttcatcctgatgcgctcaagaatactctcattcgatgtatcttcgttcctcataagatcagctaacgccacatctgattaaccaaaacataataaagattcatacttttcagtcttcacaggccaaaattgaaaccaaaacagaacatgagaaactcacttactgtgttctgtacactttgaagatgatccaacctcagaagctgagccattgatgtcttctgaaactgaatcaaagacagaagggttcttctgattctgatccatgactttgtgtctgaaagcaatcaaagcatccatttgtttgttcagagccagagcctcagttctagctgtctccactttcagcctgtaaaagttatttaccttgttgaattctcgatctagggttctaaaaaaggtaacctcaaagtcgccacctgcttctccggcctttaaaaacgtagtctcgtaagccgccgtctcgagcccttcttcgagccgtgtcacagtgttgaccacaatgtcgtgattctcagagaccaaggcgtcgcggttgtaccgtctggttaggttacgtgcgaaggaaggagtactgctctggttattggaatctgacctattccgggaagcttggatgtcttgaagaatggttttgaggtaagcgtaatctatataagcttcttgccattctgggatcatctgagacacaaactctttcccaaacctcatgattcttcaaccttcagatctttttttttcttgctcgaagtctacagtcagaatctcaaattatgaatcttggcctctctctgtctttggaacaaaagttggaaagaagaatgtgactttttgacttttgggttttgagtgatgctgaaagtttttctagagaggtagaccaggtcttgagtcttaacttagccaacaaaaatatgaattcgttttcgtccacaattttaaacaataaaaaaaaaatacccaaaaaaaaaaacagacaatcaaaagtcaaaactcttaaaaaattactaacaaaaatatgaaattgttataagatatcgttttgttatatatcattcttaattaaggtttataagttgtaaattaaaatttaaaaactatgaaattaaagcaaaagtaacgttagcaacgcatgttacatcgtttttgtgcaaaacgcatgttacatctatcgagtaattttccattgccaataaattattgatataactagaagtttgattatagttcaataaaatttatggcctgttttcggtatggattaggatcctagatatttttataatcaaccctgcatgtgacatgtgaaatgtcaatgtgcttattaaatctgtagtcaatcaatacatgtcatgtcaatgtgcttattaaattattatatgacatatatcaacgtacgttcccacttgagatgattaggttttggtcaatgccttggtggtggctctatacgcgtaaatcgtatcttctacatcggttgacaaaaaaaactggtatcttctacacttttatcttttgagcttctctgttttgtcgccacctaatgtgtaatgtcttttattcaatgcaaaacccgtatcttctacatttcgttgacaaaacaaattggtatcttctacactgtgtagtgaccacaatgtatcatcaactggtattgcatcagctcagaagcgagtcatttgggcattgtatattctacggaccaatttttttcatttttagcaaacaaattttacaaactacatatcggttgtccataaagaaaacaagtacgtagaaaaataagaaaacaagtacgtatacttaacgctaataaatagcaaccgacttttgaattatttgatttaactctttaaattatttcttagaaagagttatggaagaattaaaagttttaaaaacatttgatgctaatctagtttttctttggtgactttttttcaaccaatttgagatgttttaaatggggatctgacaagtaactattgtaccaggaatacgcaccatttcctttttttgtgcttataaatacatatttatttattttatttatataataatttgaaaacttagaaattacactaatttattaattctttacttacaaacaattggttttagtttttaaaattatccaaggctgatttcacctaattaaaataaccatgactagattttaacccgcggacaacttattttttaaattagtatatataaaagtttgcaaattaaatctatttatttttattttatagtttacaattgttattaaataacgtcttaccaaacccgtctcgccaaatccgccccgtaaaaaaaaaccgcggtacaccgctaatttaaatatataattaaaagaaatattttacgggattgcaattgtattttggtttgtcaaacaaatatttgtttaaaatagttgccaaaatctagttcaaattttggagaaaaaagatttattggatagataaagaatatatttaggtgggttttgctcattttaagggattgcaattatatttttgtttgtcaaacattttttgttttaaatagttgctgaatatatttggaatatttttagtttattaatcaatttattgctggaaaaaaatcaataattaatactcaatggcagcctagtaaataagtcccaactctaagatttatttcacaaaatggctgcaaaaatgtatatatagatgattcattatttcattttatgcggtaggagtaaaaacaacattaactagcaaaaactataatacacacacaacagtaactactcatcgagtatggcattcatggatacgaatcaaatctcaaatcgtataagcctggccattattttattttacaatatttgataatgtgctacctaaatatcaaaattttagaatattctgaaataaaatgtcgaatttttgtgatagccttaaattactacatgctcacgtatgtaaattttctattctttcatagttaattttctattaaaatgtacaatttccagtttgatggtatgaagatcaacaaagtaccataaaaatgtataatttctatttcttcctaattaatattctttaaagtgtaattttccagttcatccttgttaattttcttaaataataaaatgtaaaacttacaaatttcacggactttattaacagaaatgtaaataattgtaaataaatgtaaacatactgtgtcacaagaagacatgacaaaaaataaaaacagtagaaataaacttttttctgggtgcgtgtggtaaaacaaacatggggactgatccaatgaagtttatcgcaatttctggaatttcagtcggtgtattaatcatcatcgcactgatagtggcttatgcctgctatcgtgcccgaaaggaaggaccagtcagaggcgacggacgactcacacctattgtaatgatgatatgatatatcacctattttcgatctttttctaataatttattttatgatgcaactttttagattactatatactatagaagagcatattgtaattctattttacctatataataataaataatatttcggcgattttgtcatatgctggagtgttacattagatgatgactagtagggtttttttttttatgtgaaaacaacaatcgttgtgtcatataacgcgaagtgacaaacaaacaattcgaaatattagcaatgttacaaaattcgaaatatacgcaatgttatggtggtgttgaccgaagggtagtttcgtaactttacatcatcgcgtggtcgtatacgcgccgatgagatcacagacggcattaatgggctccggaagaagaaacaaatgattaatttaaggaataaattaccactaaattcgtttgattatttccggaaaacaattaactaataaaactataactaacctttgtttaattttttgatttcgcgtcttcactgttgtggatttcttctgaatcttctgagctcgcttcacctacaagaagacaacaaggatcattttctctaggttcgtagattctctttcttcttcttcttcgtttggatctgcttagtgaagaagataatcttctgaaaaattgtttgttttttttctgaaaatctgaatacgtaatgatttgagctgaatctgagttagattcacatttatattctggatttgtgctatttgatgatttattagatcgatcatcttgttttcttctttcgcctttaagtatgtttgctcatagtgttgctcttccagattccagatcctgaagaaggtgaaatcttatctgtgatccagtggaagattgaatcaagtaacagattcacttagttcacttgcgtattgcatgcccctgaagataacattttgaataatgttgatattgaattatcacctataagctctggttcttgttgcttgtattggttctgggtatctactagtgaagaaaccatggcttttggttctcctaggaataattctatattagctgcggctggatttcctcggaaagtgtctacagttgcaattgctattggtggtttggcatcattctttgttttcggattgttgcttcgtctttcgtatccgaatagttcttcagttggtggcatattttatgggatagggaatcctgaacaagttcatgtccctttatctttgagcaaccatactgtcaatatccttcagaagagtagtgacatcaatgcgtttgataaaaatctgacttctgattctagctctggcttacctgttgttgttagcaaaagtataccacctccagatttcagtagtgataggaagttggagacacctttgacacaagaaaaagaggatttggtttcttcggatataactgaaaagactgatgttcaatcaggtgaacgtgaaaccaatgtttccaaggctgaagacactccaagtgcatcatctcctccagatgatgtctctgaaactgcttcagcagaaccaggtactgttgttatcttttaaacgcttatttccgtagcttttgtcgtatttggaacattttgagttatggtagcttaaatttcaataaacaaagactaagctagtgtgggaatgttatagaacatttagttttgcatttctatggaaaggcgtaagtttctgagaagttttaaagaaattcagcggctaaactcttagctatagacctactgtaattattctagccgaggactgaatatagcagattagagtaaaaacttggttagggagcagatagtgagtgctgggcttgtaaggtggtctcagcattttgttttaggggttagagtttctaggctttgtgggcatttggttgagagttctacctgttttggtgaattggaataagaagagcagtttcatagatctgttcttgtcagtttcccttgcttctcatgattctagctgttcgatgttttatatttctgttatgagtttgtcgcttactcaaatctttgattgcttgtagagtgtgatttgtatcaaggtagttggttttatgatcctgggggacctctctacacgaacaactcttgccctgtcctgacgcagatgcagaattgccagggaaatggaagacctgacaagggatatgagaactggagatggaaaccgtctcagtgtgagcttcctcggtttgatgccagaaaatttcttgaacttatgaaaggcaagacactggcctttataggagattcagtagctcgtaatcagatggagtccatgttgtgccttctttggcaggcaagtaattcaatttaatggtgaaaaccggtataagggatctattgtgttgctttattcagcttcaggagatcgtatgtattatattaaagtaggtttctgttttcaggttgaaacaccagtcaatcgtgggagccgaaagatgcagagatggtattttaagcaatcatcagtaatgattgcccgtatttggtcatcttggcttgttcatcagttcaacgaaaaattcgattatgctcctgaaggtgtcacaaaactaaagctggatcttcctgatgagcgcataatggaagctatcccgaaattcgacgtggttgtcctctcatcagggcactggtttgcaaagcagtctgtctacatattgaaagaagagatcgtgggaggccaattatggtggccagacaaatcaaaacccatgaaagtcaataacgtggatgcatttggaatatcagttgaaacaatccttaagtccatggctacacacccgaactacagcggtttgaccattgtgagaacattctcacctgatcattacgaaggtggtgcttggaacacaggtggatcatgcacggggaaagaagaacccatccttccagggaagctagtgaaaaacggattcacagagataatgcatgagaagcaagcgacaggatataaccaagccgtcgataaagtcgcggagaatttgaagctaaaactaaagctgatggatatcacagaggcatttggatatcgccatgatggtcatcctggtccattcagaagtcctgaccctaacaagatcactaaacggggaccagacggacggcctccacctcaggactgcttgcactggtgcatgccaggaccagtcgatacatggaacgaaatggtcttggagctcataaggagagacaggaaaagctcatcaacttgacttggtttgaaactcaaaggatgagagagcatattacacgacttatactattaatctgattcttggttactgataaactcaaagataaactcacttgtagatttgtgctaggcacggtgagttaggattagaatttgttccactatacttgttggttcgtttgtcctgagattgaaatttaagatttgggagttatgagttcaagtttattcatactagtcgaaatttcataaattatataaactggggggggcgcatttgcaaaatagctgagtaataatcgcctatctcactgactcacccaaagcccgaccaaaagcttttgattcctcaagagtgaaaatggcgtcgtacacagtctcctttatccctttgacgctctctaatcctcggatctttgtttcgagacagaatggatctccctcgtcttcttctcggattcctctaacgtcttctctgttaggtaagaagcttctggcgacacaaccgtcgcatcgctgcttcgtccccaagctccggtgcttgacctcggccagcacggtcttaaacgtccctattgcgttagtttttttatctgacagctcttttacatctttatcatttctgggtttttcctttcaccacggatattgaagcttagggtgttaaggttgaatttttcaggcaaccggagaatggttcttcggataagatcccaaagtgagtctcactccaaattacgtatagaatttgtaattgtagagcttatacgtttgaattgttgaggttttttttttaattgtttgattttagatggtcggcgagagctataaagtcacttgcaatgggagaattggaggctaggaagctcaagtatccaagtaccgggaccgaagccattctcatgggtattttagtcgaaggtttgtgattctgagacctatatttgcttcagctttgtgttttgccgcgtcttctagtttagattttgatttctaaggatcactatgttgctttggatatttatgctttgtcattgtgaaagcttgtattttagttttgagggattctgtacaataatgctggtgagattgtttcggctaagtgtgtgcttcagctcatctgagctttaactgaatccaagcattgcataagcaagagcttttatgattagttgtcctgtttcttaatcattaagttgatgctgtataagtcggttgtggaatgccttatgttggttgatagaggagaattgggtaacttaaccgtagaaagtataaactggaaactgaaaagtcttacattgagttgagagatctgtataagataatgctggtgaagatttctctgtcttgctttgtgctttagtccaccctcttaactgattccgagcataccttataagtacaggctgtgtttgttcctataaaacaaaatacatgtgaaataaggtaaccataaaaaactgtaactttattatattcagttgttgaatgcttatgcggtttgatcgagaggagagaactgggtggaatcatcagaaagaaagttttatctttgtgttttatacccttcttctttctgttattcaaaaggcatttatggtaaatcgttttggattatgtggtttactgacgtatattaagcttgtcatagttggttttgattttaggcactagcacagttgctaagttcctgagggggaatggagtcacacttttcaaggttcgagatgagacgttaagcctgctggggaaatcagacatgtactttttcagcccagagcatcctcctctaactgagccggctcaaaaggccattgcctgggccattgatgagaagaataaatctggtgtgcataaacaacacctccttaatattttgtggatccttgctgtttcccatccattatattatattgccaactgaaactatttggtcacagatgtggatggggaactaaccacggcctacttgcttctgggggtttggtctcaaaaggattcagcaggccgccagattttggagaagctcgggtttaacgaagataaagccaaagaagttgagaaatcggtaagtttcttaacaccaaatcctacaggatagaaaagctttctcaaagtcacaagtgttgagtgtctgtttggtgcagatgaatgaagatgtagatttgagcttcaagaaacaaggtcaatagtgatgaggtttatatcgattagaaaagcttctgtaattgttatggagtagcaaaagcaactcttgattaaagactcggccaaagaccccactttcattagtattcactttccatacttgtttgtggttagtgtcatttagcttttccgcattatcacaatatacaactctggcaaatgattcagtgctttggttctccgataggtttttgttactaaaactcacgtcctctgttgattattgacaccttggtgtcttcatatggatgctgggtaggtattttctttacgctaaagattgattgttatctgaaggaatgaaacagacgagataaaaaaaacttgcagaagatggaaactgtaatttctttcaagggttaaaaagtcattcgtcagtcaactgcaacgtctagttgtttccatactcggtttcaaacaaaagctgacatgcttcagaaaacctatccatagattcaagcttctccatcatcatctccttgatttcaggttgtaaggtggattttgaaatagattgtcaccgtctttaaacacctggatatgcttgggatatattccactaattcttctcttcttctcttccaccgtagtctatcaactcaaacttctctagacacgaatacaagcattcgggataagagcccctatcgctctgaaagctgatgcgataggggatctatctgttgatctctgaaaagttttgacatggtattagcaataatgctagtaagtaaccacacgtcagcaagtgtttgtgctgagtcttaaacatacattttaggctcaatactgaaaactacacactaaacggaattattaggctggatacagaaactacacactaaatgtagttaagtggtcaagtgatcatcattcttctaactataaccttattatgtagacaggaaacaaaccgatgaccttattcgtctaagctcataagattataatatacataaaacgcatttgaaatcacgaatccaatttgtagttaatccaagcatatgtataaacaagcgttttaatgatttgttgtgatattatggatttcatgttcacaagtttttgcagtgtgatacagagccgatacgttttgtttagggtttgatcagtgagtcgtgacaataaagttttgacaaagttcagttttgtttctagcttgtgaatttttggttaatttaattgaccattgaaatggaaagatggcttgcttgttttgaatctctcttcagttcagggtgttttgtttagctaaaagaacttatattattactggtacaaagaatttaacaacatcaaaatcttagccaaggaatctaaacatctacgacacatatcactaaaacctctgcaacttgtcagctctgatcaaaggcaactgtgtggccaaggcgagccgtccagattgtttgtaatcaaagggacaagaatgctcctccggataacgatgtgacccgcaaaacatgtgtccacatctacacttgaatcccaacattcctaccttcctcttacatatcccacatctcctttttttgaccggttcttcttcaacggcgggactattcgtaggagggcaacactgtgattgctcggtctcgggttcgaatcttaaagcgggcgagtgttgaagaacactctttttgtagcagagagagcatagattgttgttcactcgggtgccgtagagtccacagcctccctcgcatggtaatgcttctgtttcgttcaccatcttctttcttctacttcttgcgatagttgttatatgagagtcaatataattcaatattttgtgtgagctctatcaatgactctaaaatctaaatatatagaggatgtctattgttcttagttcttctggaattgtgtagtgcaattaagtttcccttttttaatacaattcggtaagtgtttcctcttttgtaatagtcatctacgttcgataagtgtttgctaacgattcttattgcaagttattgattttcctttcctcatataactaagaaaggaaaagttacaatagaaacgctgagagatatttcataataaggaaactgagaagacgtgtttaatcctcttcgaacagtcataaatccaataaagaaaaacgttgactaatgtaagaaaaaaaagacaaaccaaataaataactaatccaacttgatgataatttagacaacagcagcttcctggtagtttctaaaacgtcggttcgttttctaaatacagaaaagagttgcgtgccgttttcactatcttaaggagtaattaattagtttcaagtaaaataccaaattagacaattccacatggtgatctttgatggcctccccaccaccgcacgtgaatttggaataccttgtttagtttcattatcaaattacacctaaacgcgttactaattaaattatttattgtctatcaaaaagccacgcaacaacagtctagcatttaaatcttcacgtgggtctaacccggttccggtttcattatccgggtatatgttttggcttcgtctgaatttgaatttgagttttctcattcaaaaaacgataaataaataaaatattggtcagttattctttctatggttcttgtttgatatagaaagaataacaggttttggatttgtctgtgtgtttggactttggattagtattcattcggtttaaccaatcaaaattcgcaaccttaacacgttataaaccatgatgtaatgatttaatcaatgatcaattaaatgtatagaaatttattttccatttccgcaacagctcaaaacgttttctctcttttccgattttagtctaaaaactgaaacaaacacaaaaagcaacaatttgtctttgaaaatctcctctgtgtatggttcagcttcggtttactaaatctctatgccgtcacgatcaatctcggcaccggttccggttcttgctccggctccgatcgtttcctctttagtcccagcagcgccgtcaggacatcagaataagacaacgcgaatctttccaccgttcgtggtggctggagccggcgccggtttctctcttttcatcactctctccgtctgtttctgtaaattcagccggaaacgttcatcacctccggcggaaaacgcttcctcttcgcctcggagaccgtcgccacgtgagttttcatattcgtctctccgtcgcgccaccggttctttctcgcaggcgaatagactaggtcagggcggatttggcgtcgtgtttcgtggaactatctccggcggcgagaatgtagctgttaaagtaatggattcaggatctcttcaaggagaaggtgagtttcagaacgagttgttcttcgccgccaagcttgactcgcctcacgttgtccctgttattggtttctctcatgatcgaaaacgacgacgtttgcttcttgtttacaagcttatggacaatggtaatctccaagacgccttgcttcaccggagatgccctgagcttatggattggaatcggaggtttttggttgccgttaacattgccgatgggattaagcatcttcatagtcttgaaccacctgtgattcatggtgatattaagcctagcaatgttctattagatagtctcttctctgccaaaatcgctgattttggtttggctaggttgaaagcagagcaagtggagattagtgtagctccggagcgtgatggtgatggatctatggttgaagaagtagagagtgtggtaactactgtgactggttatgaagattttaactttgggttggttgatcagtctccggagagtgttgctaaggttcctgggtctgtgagtgcttctcctgaggcgacgacggttgtctctgtttctccggaaatgggagagaaaacggatgaggatggtggtagtgttgtggtgatgaagaaggggaaagagagtgagagcaaagattggtggtggaagcaggagagcaatgttgaaagagggagagtgaaagagtatgtaatgcaatggattggttcagaggtaaagaaggagagaccaagcagaagtgattggattgaggcggcagctttgtcttcttcgtcaagtaagaaacttgagaagaagactagcaagagactagattggtggttgtcattggaggaagaggatgagaataagaagaagaagaagcggaggatggttagagagtggtggaaagatgagtatcgtagagaactcgctaagaaaaggaagaagaagaagaagatgactttagaagccgagttttgtagtgatgatgggagtagtagtgtgagtcaatggcggcgtggtagtggtagtggtagcagcatagattggtggttagatgggttaagtggtgaacgatggttgagagcaaggggaaatagccatgactcggtgagcggtgagatagctaagagctgcggaattagtagcacgccgagcatgagagggactgtgtgctatgcagctcctgagtactgtaacttggacaacaacgtgtcagagaaatgtgatgtctatagctacggtgttctgttgttagttctgatttccgggaggcgcccgttggagatgacgggctccgcgagtgagatacaacgggcaaacctcatgtcttgggcgaggaagttggcgagaagaggaaaacttgttgatcttgtggatcaaaagttgcaaaacttagaccaagaacaagcagtgttgtgcataaaggtggctttgttgtgtctgcaaagattaccgatttcacgaccgtcaatgaaagaggtcttgggaatgcttaaaggagaagtgaatctaccagagttgcctagtgagttctcaccatcgccaccattaaagacaacgaggaagcagcgccgttgactaatttaggaatcattttgattattattattcaagtgttacaccgctagttttaggaactttgattcaatttcactatactttccaatttctctttctatagtttcacacgcattattgacattgattttttttttacacgtttatacttcgatgtcaatatgtcatacaacacttcttcaaatcggagttgctcgggattggattattagcagaaagaaaaggctaaaactttttccacctccaaaagtcatttaaaggtcacacaaatcctatgggcctaatcagttaacaaaccacttccaatcgagttaaatgaaatgaagataccaaattgggtcacgttaggagtcagcagtttgtgttctttatatatggacatgggccatcttcgatttttcttattcgtttctacttaaaatcaccaagatttattgaatttttcttcttattattatttggcccttatatagagtatggtctatccataatttggcccagttttttaaaaatactagatatttggaacatgcatgctttttatttttaaatgtatcagattcagatgaaactcaattattaaaaaaaaaatcatacataaacagtttaaaatatttactactacttaattattttcggattaagaaatcccttataacatttcataaaacatagtattctgcattttttcaaaaagttgttgtaatgtttagaaaacaaattgaaaatgcaacagtttttaatgaataaatgcaaggcgttatagaatgttggtttgtttttcattttaagtgtttttcaatattttaaataataacaacaacaaaaatcatttgctttcgactagaaacaatgacttatatcattgcttatacgagtgcatgttacaatcgtatgtggcggttagtcatcctacttggctcgatcgatggtgtatttgctgaggaaagggctttgtgttctgattaaatttgagttttgatggtagtatggcttgagtaaaggttgaggatgttgtttcattttcatatgtctggctctttcacctctttggtgggtatgtgttgtatcaaacaatcgtctcttaatacaataccagttgacaaaaaaagagcagtaactaattcttataaactatagtacattatttcctatatattttataacataaaataaatcatattttctcataatttaaagtgctattcaatgatttttaggaatacgatccagcatatggccttgcagtctatagtatatataaaaataattatatggtacctatgtcagagatatctaggatatatagtagatcgtcgtacaattgatatatcatatagtatgtgtatacaataagaaaataaacatataaattgtacgatctctaaagaatactttaaaaatgataaatattaagatatggaatgttgaagggaacctattaaaaagagaagaaattaatgatgaagcagaaagacgtcattgcttaccctaacaaacctctctctccatctttttccgatacgtctaccaataacttagtatttttttctcttagtttttaatattataaccaaacccttttactatcttttttccgactcccatatcttttttttttccgactcccatattattcaactttacaacaaatccctgactagagcaaatcccagagcacaagatcagatccttctgtctcatcatcatcatcattattataatcataattacaagaagaatcgttgttcaaaataattaacgtataacgacttctagatgaataattttcaggagaagaaaagaaggcgtagtaaaacgccgagagtttgtaataacgaagaaaacatggagaagttagtacataaagaaattgagaaacgaaggagacaagaaatggcttctctctacgcgtctctccgctctcttctccctttagagttcatccaggtcaaaaccctaattactcttgcttttaatttcttcctcttcttcttcttttttttttgttaaggaaaaagtccacaagtatgctttgtcgcttagtttgttaaaaagattcactagaactctaacactctatcatcacaatatctcaagttgacctctacaccttaattacgtttgatttggttttgtagggaaaacgttcaacgtcagatcaggtgaaaggggcagtgaattacatagactatttgcaaaggaatatcaaagacataaattccaagagagatgacctcgtgttattgtctggacgaagctttaggagtagtaatgaacaagaatggaatgagatttcgaatcatgtcgtgattcgtccgtgtttggtcggcatagagatagtgttgagcattctccaaacgccattctcaagcgttctgcaagtgcttcgtgaacacggtctctatgttcttggctacatctgttccagtgtaaatgatagactcattcatactctacaggctgaggtacaatatctcgagcttactaactttacagcaatcgaagcattactaactttactaagaatatagagaaatacttaatcataacatatatttctaactaactttactaagaatatagagaaatacttaatcataacatatatttctaactttgttaatgttttcgatcttgtcggcttacaaacgcgtttatgtcctaatttggaatggaatatagaatatagcatacatcttcttcatagctttttggaatggcttattgtatcagagtaatgaatatatatgtttgagttaatatgtgaagttgatttgccttatgttgagttaatatgtgaagttgatttgccttatgttgcaggtcaacgatctggctttgatcgacttagcagaccttaaggatacacttaccctgatgaagtaattcaaataatcaaacgttttttttcagtagattccttttaacttctcaaaccaaaacgatgtatatatatggttcttagtacttttactgtgtatttatctagctactttaaagaatttgtgcgtaagaaactaatgctagctagctttaatatcacaaccatctcttacatattatataaactatggtccatctaaactttttctttatcattgatgttttgactatcttgtttattcacagaaaaaaatcttcattttgaaaatttgattaaatatcttatgaaaacaaattatctttcaagaaaatatattagtttactctatcttttgttcattagggacaatgactattattttgaggattaccgcatgaggccttcttatttctagacgtctctgctcctatatataagtcatataacattcttatctgaagatgtacgtaatctgtcgagttaggatataattaagagaatggtggaatttaattcgtacacatagaattaatggtataattaatttactattgttggtgtgagtagcatcaaatagatgatagaatagtattttgaacaaaaattctgatagatagtataagccttcaaactaaaattgtttccggacgaatacacgaaaagaaaaatgaaataatattaactttctaaaaactcatcgattgatgggtatacacaaaatggttaaaaagaaaaaaaaatgattaacagattttgagattatataatactgaaaatttgagtcggaaattgatttgcaatatgcaaaagacaagaaacatgaggcaaaggaaaaaccatttttcagagaaatctaaacatgtgaaattcgtttttctaaaagtaacaatttgcgaatttatcagcgacggatattttttaaaaataatatgtaatgtttctgttagaaagtacttttggttgacaaaaagaactgttacaaacttactttgttgtgtacgcactgttacaaaattatcaaatttgaatcttgaaaatggttaattagggttgtgtgatacgcactccagatctgtaatcacaaattagctaatgactataaagtcgatgcaaaaagtaaaacatagggaatgtatattatatgccgcttagttgaaaaccgctacatatctatgatcgatttaaatatttgaactctggaactgttgacttttctcttagacttaaattttggtaaacaatttcagcaactaaaatgagtgagaaaacttggttgttgaaaaaaaaagagagagtgagaaaactttggtttagttttctacagtgaccagctttggggttttgggcggaattaattagccaagtagggtctagaaaatgtgatcttttaacacatggccaaagtcgtttatatttggtgattctgtttaaaactcacaatttgtttttttcttttcttaaattttgaaatcatatctatttagaactaaagttcatcataaattttgatgaccctaataaataatatagcgtcaatatagagaacttagctggagatatattgtaaatatgttgttgtaacgatctattacgaataactattgaaatacaatacaattatttaaaagagcaatatataattgtataatttaccacatcattaggatacttcgccccaaacacatattttaattcgtttgaacgaacttaaataaaaaaaataaaaaaaatcattggttaaaactttttattgcagaaataattggttgttactgtagaaatagcggcttctattcgcaaccgtcagatatacaagtctaaagagatgtctttagtttagtcgtgactcctacaaggcatgtgtgtacgatcgcctgatagggaataatttaactttgcataatccatattttccgacaatcatcgagttgacatgattcgacatttggtcatacacgtaaatataacaacgtgcttctaattttaattttataagattaaaactatcagatagtactttttgggatataggaaaaatgcatctcatgtaataaaactatagcagaaacgtgtcttaaaaataatttacataataaatagttaacttgttttatcatgactataatatgcaaacattattgcggttgtacgcatgtaataatattactgtatataaactgttatataccagctcttataactttaaaactctatccattttcttaacgtaatgtatagtataagtgaatgaaatttttctctttttacaaatttatctggtttataaaagttgctaatatcaggcataatatggcttatggcgtatattgagcatatcagcatacaacacacatccctaaagaaaagactttggtcaaacatccaacgagattatcttttatagtatagtggctcttaatatgcgtatatacatatatataaaaaacaagggattcgtgacagagaagaaggatttgctttgccttgaaaggataacctttaccaaaaggattattttttaataatggaaactgtggagggatgtcatggtttttatattcaaagcatattatattgaaatagtatcttcttaagaacagtatatctttagcattatatatctgatacgcaatggatatggacgtttaataaacatgtgaaaagactagttgcagtgtgagcaggtgcaaataaaaagaaaggatcggagcccacatgcgaccatcgcaacatcatcaacggttgagatttgaggttttgttttcatgtatccgaatcttaagacatggttgcactttcacgtcgacatttgtcaaatagttatattctccagttcctcctagttgtatgagaatataattttgttttagagaaaatgtgcattatggtttttttttttttccaacagtttgcgttttagatactaattctgtatttcatggaaagagatggattcgcaatggtatttcacataaaggaaattttgtgttggatgatggtatgacaaaagctgtttggagggtataaattattaagttgacattaatttcaaaaatttataattatgtgttttaattctcttaattaaataaactgtagaggattttattttgttatgtatatatattgactataagttgtattctactagtttgttacaaatcaagcccgaggctcatcccataaatgaaataaaaaaaaactgataactatttcaattttatttaaaaaaaaaaaaagagtaattccgtaacctgcattatttggtcctcctactgtgtatctatttaatatttaaataatggtcctccctctcacctaaggagacatagagaaccatctggttctttaaggcaccatcattcaacaagtaaacaataaaggaaattaaattatcacaagacagaaccacaaaatcctttggagatctgacactggtaaagctcaaagtgtcaaactatggatccttataagaatcttaatccaaaaggttaccagagacagagaccgtttagctcagccggcgagagtggcggcagcggcggctccggtacggcccatgaaacagatgacaataagaagaagaagaagcttctccaccgcgacatcgaacgccaaagaagacaagaaatggctacactctttgctactcttcgtactcacttacctcttaaatacatcaaggttcatattcttaattactcactcttttctctcaaatttatttactttttcgttatatcaattgttcgaagaaaccaagatttggtgagatttggctgctagggttgtgaatatgtcgttttttgtatttaatttagttttgtatttaatctttatttatagggaaaaagagctgtgtcggatcatgtaaatggagcggtaaatttcattaaggacacggaagcacggattaaagaacttagtgcaagaagagacgagttaagtagagaaaccggccaaggatataaatcgaatccggatccaggaaaaactggatccgatgtaggcaaatcggagccggcgactgtgatggtgcaaccacacgtgagcggtttagaagtggtagtgagcagcaactcctcaggccccgaagctttgccactatcaaaagtgctcgagacaattcaggagaaagggcttgaagtcatgagctccttcactacaagagtcaatgataggctcatgcacactattcaagtagaggtatggttggttacaacatgtcaacatgccatgtcaatggaagttaatctagggtttcattacatttaactatattcaatacaggttaatagtttcggatgcatagacttattatggttgcagcagaagctagttgaggatttgatactttcgacggggtactaatcatgcagaaacataccattcgtagtcctaaagaacttcctcatcgtatgatctcttttacccgagctcttcattcgttatatgagcttagctaaatagaaactcatttccaaattattgtcctttttagatgtggtattgaagccttgcatgttagtggatataaaacagtattttttgtagatatcatatgtttgttgctccaattattgttttcttgttcatgaacttatatatacttagaagttaagaactaatgtgaaagtcatatataattataaacactagaatttcacatggttctagttcatatatcaatggaagactaatattagcaatgttcgatatggtgtatttttgttcatgtgttttacaacattataactatggttgatgttctaatgaactaatctcaccgtatacttgatgcagaaaaaatcaaagtcttcttgaaatttcgttatgagagcaaggtgcataggtgttaaagttcattcatggattgaggtgtagctttggtttaaacaagttcaagtgacttcatggggtagatcataacttcaccatgattcgccgccgtaaagaccaagggtctgatgttttcagtagagattttttttttctcacgggcaagccatttttttgtttccctttcattataacattttgtatcactccattgttaggttttcttgggttttctcgtatggaaaataagtttttctgtaatacatatccatgaatcatttagacctgtattagaaggaaaatccggaagggcatagtaaaataaaggccaatacaatagcataatatatatatatcgcctagttctaaccagataagtatgaagcaagggtaggtgagaaccatcttttgggctctataatagtcagaatctgctaggttgtttctagcctactattctctacgctatcagtaccacattggtgaattagatttcgatattttatgtgaattgttcacacataaaactgcgaaaattgagaagtaacataactgttatctctacgatatatatcaaagatgagagactatatatgaagtagtagcactaacctcgatacaaccaatcctttgggcgattcgaaagtggtaaaatagaagttccaaataactaacagatggtaatactaaccagtaaccacacaataaaagatcgtttgaatgtacgtgcatgagttgataaccctaacacaaataaacatacatacaaatgccatcactattttgaaattttaaataactatttaattcataagcacaaggcctcacatcatcaaatgagtaaatgacatagcaaatgtgaagtcagacaaattatttatacaagattatgatatttaattacgatatttttttcggaaataagaagcatattacaaaattgccatagataaaagcctaagattcaatgcagagaaccacctttctatttttaaatcttgaatttgcaaaatctcactttcttttgtagttcacgatacgacacagtattatacatatccccagaatcttggtttcttttcttttcatacgtacccataagcatatgaacagatcgaccacatattatttaataaaatctcattactttagatctaaatagtcactttaattaatacatgtcacgaacttaagcgaagttgacagtagttcaaatgttttaagagatacgcatgatgagtggttaagatctcactaatattcgtttgatatcttatatcattattggtaatttaattaattatcaactaggagtcttattttttaatttaaatgtgtggttgttaaaaaatgtttttttaaatcaaaacttgagatgccgtccaacaaattcatgatcttcaaatcggatagtgttccgataaagaaaatcccagacgatatattaatgagaattaataatatttaaacccatattatttccaactagttaacaaccaaactaataaataacaacaatattgaaaatagaaacattaactccatctcatatcagttgaaaatataaactacatgactcgaagtgttttgatggcattaagaaatgttcagtacattaatttcaaaaaggggattacgttatttctttttatttctttttttgtctttttctaacaacatttcacaaaaagagaataacaataagaagccataaaaaggaaacctttatattttcttcagttggctaatttcgtcgataatgtttgtacacggatctagtaattaaaccaaaaataaataaaaattccactgcaataattagagagcaagacattaatatgtgtacatctttcctacttcttacgtataagtatagaccaaaacttattttatttgtgtgcatgtcctgtggtgtttactgtttaatttaagcccactattatatgacagtgatttgtagccaaacatatcctcatgcacacgttcacaatcatgtacttctcgatcagttggtgtcatgtcccagagattcagaaatggatttatccagttttgtatatctgtgtttccagtcaatagattatcatttaaggatgatttctcaccaacccaatccaagattttttgggtgaacaatcgttgtatatatgatacaaaaaggttctacaaaacaagtacacgtgtgacgtgtgaaaaaaaaaagtacacatgtgaaaacatacagacctaactggtttgctattccgtctattgttttatgttacttcctaaggtcaatgttgagttgtacgttaaagtaaatcaaataataataatattgaagcttttttgataaatataaagataatattgaagcttttctgcttgtataccaaaatagttgcatatatgtgatatcatgatatagtgttagcagaaatatccaaatttgcagaaaaaaaaacacatgattttcaggccatgccacattttaaaataaatgattatcatatggtcaaatttaaaatggacggatgggctatcaacctattaaatagtggacttgcccattactagcccataaataaaaaggttacgtcccaaaaaaatgttacttttcaaaataaactaaacgcggatctagaatatgacatgactaaagcccaaaacccatgtaactactcaacctatatactgtatgattgatacttcaaagttcaaaacattaaaaattcaaaaatttcactgttgaattgccatgagttttatttatttattttttttttttttttttttgtgtgtgtgtgtggtaaaagccatgagtagttttacacccgaaagctaactcacaaaacagtactctcaccaaataggagaaagatcagatcagatcgtgtgaaggttgttattagatgtcatcgttttaggggtcaatattttgaactgcatggaagttaattctcttagatatttctccaaaatcttttaagaagaacagacggtgaaaagtattcaattatgttcgatatttcttagggtcagggttatgcctctcgtcagcttaatcccttttttgaccttgttttcaaattttcttttgtttcgattgctctggactaaaaaacatggttaaaattagcaaaactggttaaaaatgctgcaattagtggcgaccaaaaataaacaacatgtgacatcgatataaagtgtttgtttcctagagacccaactacagaaacaagaccacatgtttatatatttgtggagttttttcaccctaaattgattttttttttttttttgcttggacatgaaaatcaataatgcggttactttgaactaaaaaacgcaaatcaatctatcatttgggagttggaatcttacgattttgggaagaaagcactcttagttaggctctatatagacttacttatatatggtgtcccatatgtttatttattttctgatgaaaccccaagatgatgcatgatgaacataattcctctttaaccttaattcgtactcacttgtcatagtggtgtgttcactatttttgtattgattcttcatcccccattccctaaacttgctattagctaaaccaattgatctgatatcctcgttaaaacataaatggatgatctttacatatcttcttgatttgttgaaaagttttttttcctttgatagaatttgttagatacttgtgagtgcgtattaagtattttagtttaacggatagattttataaatgagatgctaaaaggtgttattgcctattaccatatacatacatgaaatataaagaagatactagtaactaacaagacaagacatgaatattttatttcttagatgggtttggtgagccaatctgaaaaggcttggagagtgttcatgtctgctctataatgtttctgagtgaactcaaggaacatagaccatgtgaagtcagggtatcttcttgatgtgatgctgtccaaaagctctctcggtggcgtcactactctgtcttttttcggacacaagaagaatgcaagtgatttcctctcgctctcgctgttcaccaccgcccggtgcaagcagctcttgtatctatcgttcgatagagcctacaaaacaatattaagcccagtttagtatatggaggtacctagccaaaggctgtatatatctaaccaagatgtgaggtttttaaaaatctaaatgggttaccatgaaagtatcgccgatattgaccacaaaggccttggggttgggacgaatggagcgccattgattttccacaaagacttgaaggccattaacatggtcttggtgaaggatggtaagagatgttggatcacaatgaggtcctgttcctagtgtgagatctggttttatacatggagggtagtaattcagtctcattattgaatcgttttcttcgaaaaactctctaaagtagtcccgttttacgcctaaacttagccccagaagctccatgatcttcagtgatagagaactcattgcttcacaatactcttgatacaccttcctgcaaccacaaaccaacattaacataagtcttctacagttacggtacagtggtcggtatagaagaaaccggttattggtttaagacgttttctatataaaaaaaacagaggaaaagacaaaagacatgttaaatgtttgatttctctatctctttcttttttagattatttgctctgttttaacttttacccaaatggctgaaacccatgtcccaacgcatcgcagaagtaatcttgaacggattttgagcggctcatgtcgtcgcaaaaccggaaagaaagggtctccttccatggaagcttggtggagaagcgtccggtgaaactgcttgcgtagccaacactctcaccggattttctaagaaccctctgtttttcggagagaggcatatcaaagaagcggctcgtgtattcatgagcgtctgaaataagctcctcgctgatgccgtgattgaccacgaggaagaaaccgtgcttcttacaggcctcagagatcagtctcgaagcatctaaagtggaggatggatcagagagaaggttttgaaggtcgatgagaggaacatcaagctcgagaacgttgatggaaggtttttcgtcgtcaggccagatgaattggtttgggatattggcttgaaggttaagcattgaagggttgaagattaacggagtttgaatatttccaaggcctagcttcggtttgtcttcttcctcaggagatgttgttacgaaacttacggccattttgagagattatagtaaagtgagtagtagtattgcgaggagatacgggaaccaatggtccttttagtctttatataagcaagcatttaagtcgatcgtatagtgttgtccacttctttttttgttgtttttgttttctagtagtacaatactatagtctgtaatggagttatcaatacttttgccacgagtgatatataatccaaaagagtaaaggatttttagattattcactgtaatggagttaaattcgctaaaacaagtggtggaatgatgttgacaaaaacagtggtggaatcattcctaaattttatattataaatctaattaacatattgattagtttttttttttttgtcttttgtctttcttttttttttgtacgcaaagctatttttttttttaactgaaatggtgaaaatgttgaaaactgtcttttatcgattccctacatgtttgttgtgtggcaacatggacaattaccactattccactaataatgtatagcttactagtcataggtggttgattttatttgaatttactcccttctatttctccatacataaggataccttaaagattatagctctaaccattcattcaaaactggcacaaattttaattttcatataaaaatatttcttgaattgaaattaaagatttataataaaataaaattacgtagttgcatattaaatcatttacataatcaaaataatttaattaattaaataattatatcaaatgataaatttaataatttctgactaaatatgtaatttatccatattttatcataagaacctttacattcatattactgcatacttatattttaacattgttagataaaatacatatttcttatctactcatattataattttataaaatcagtctaatagaattattaattttaaatggttaataatgttttacaagattacttagtggctgggtgattgagaaattaggattcaattccgttttaaaagttaaaattgttgttacaatattcaaaagtgatgttaaatttgtgattcattagaaaatccgataatcagattatcgatggatttaaagatttgtcaaatttcggtttagatgatcctttggaaagaaaagaaaactaaatagtaaagatgatatataacatgaacactaactcataagatcttatgactgatgataaactaaagggagttaattatttatcggactcgtattagtcttgctaccgcttaaccgaataagacgttagaaaatcggggtacagacaaatccaagattgtctaatctattcattgggaattggagcaaataaaagaaaaacaaataagataatacttgtattttaaacaaaaaaaaaaaaaaactgtggatctttttggtggggggtctgtttttatagttggcaggacaaaagagcttcccaaggttctttggatgtatatggaagtgttggttccacattgttattctgtttttctccctctctctagagtttactttctcgtttttttttttctttctttcggtgaatttttgttttcctctatcctcctattacgtttgaacctaatcaactaatttttagtaagatataaaaattttggactatatttagactggttcatatctctagtgtgaggtgtatatttcagtttgtttttgggttcagatagagttcgatttagttttgtttattaaccatttaaaactattacttacattaatataaattttaattttggttgaattcaatttgattggttcagttacagtttggttcggttatgttagaattttgtttcactatgtcttatattttacatatgttaaatctgatggaataaactaatgaattattgtgatcaattaaagaggagacatgagcatggtcggcataaggtgcaaatgctagagtcggtatgataagagcctaatttttggaagaagagttttagtattgatgaaaaaaaacattaccgaaccaagtaaggcaataacgtagtgagacaagagttcggtttccatttggagggatatttttaaaaaggttgattccggctctaagatagatatagcataggttcgaaacatctagattaaccggaataaaaattgaaaaataaggtttagtaacttttaaatcccaatttaaacaaaaaattagagccatttttttcattgagcctcttatagtcttatacatttgatccaatcctgggacaaagaagtactaacaactaagtagggctgctataaagaaggtgggggccgaccaaatgtgttcatcttctttaatatgagctcaagtgctatctctttcttaattactagaagagagagagagatattgaaggacccaacaatgctggacctataaaggacaaccattagacatgggtttttgtcgcaaatagtagctccaattaaaatcctcttattgatccactataaccagttcatgctttttatgtcctgtctctgacattattagatggaggaggagcgagagattgatctcttacctaagcacactagaaactgggggggcatagatgatctgaaatagatctgttttctttctcttgattttcttagaaaaggacattactccatccccaattaattaatgacgctgaaagcatgtctcactgtttaagattggtaatttggtatatgccatttagaagatatctataaaaacaaaaaggagacaaaaaagcatgaaagaaatctctagttacgacaacaaaaaaaaagttacgaagatcatgtaatatgccataaagattaaagatctcacgtcctaacagttatactaaccgatctcctactatacctatatatatatctgcatctcagctcaagatcgtaataacacatttctggtgactaacatggaaacacaatttttataaataaaaaaacatggaagcacattggatatctatcactctatccgttataaactaacgatctttaaccattggaccactagaggttgaaaataatttctagcattcgaattgtaaataatgacactctagacgctaaaagctttctgtcgttgaaaacagagaggagcaacacatgtgcagttcctcaactcaatcatgcaacttttaaactgttacttgaaataaatgacaagaaggaacaagtgtacgatcaagattacacagtacataattttcttatgcattagtctacgacttaggaaattgaagtctctcatcatatataggatttccattcattttataaggtgtgtgtgtatacaaattactgatttgatatactgacaacctaagaacataccatataatgtgactaaagtacttataaaaataagaatacaaagttaggatgatgggttatacatcgccaaaaaaacctagaagagatgttgtagctttattattcgaaaaatatttgttttcagaaagtctcaactctaaattcgttaaatcccttataagttataagtataagctatacagtagcttatttcatttgagatcacgaaacagtaacgatgacataatttgtgatgaccaaatgagtgaaattccttttttacagttcgaatgtacaaaacaaaaattgaaggcaatgtcaaatgttatacgatatttttttaagtttttgggtgggttttaatgagaatatatacaaagcatcaaaccaagtgatttgacgatatttgttttgttttctatctacggtttaacaatgttaacttaaaacatattactttttatttcctttcatcaaaatatgttcgaggttttttatccacaaacctaaaaattaatttgttactttttctagttatatatataggctgattgtttttctttaacacaagtttcccattggtgtgtaagttttgaaagtttttttatgagtgaatgggtgccgcacaaagtctagcacagtataattaattaatgcgtaaggaaatcaagaaaaataatggaaccttgaaaatggatttctaggttgttctctcctctttttcactttctatattcgtggaagaaaaagacaatggaaatgaaatgtgtgtggggttataatggatatcttacttgtaccatatagagtggtctctggaatgctattgggagatggtttctatcatggaaactggtcagtcaaaagatccaaaaaagcttgtccgtacttgatgcacctcaatattcacttggtctcgtacgaggaaaatacaacaatgagtatagtaaaaggacaagctaatagagacaagttaagttctgtggtggcctccaataacaagcagtagaaaacaataagttatactgtgtggtacattagcaaagcatacgtaaaacagaaaagtatatgatactcactctatgattgcaacaaccattcgtttcttggcatagttcagcttttccatcaaccatttttagtttactaggactagtttcatgttaagtcctgaattggttcgatccttaatttggattcaaatagctcagcagcaccaagtagcaatacttactccatgagatccataaaagaatcacaaggctgttactaaatatgagaaaatgaggttcattgtcttctttcttttcttttaattagcatcgcctagcctacttctcaaaacattttcttggcatgagtttcatgcaactccattacatactaaagcacatgaaccgaaattcaaaagtgcaagtggtccaaataaagcgattaagtttgctgtatatataatcgtttcttggagagactattaactgcacgttaatttttctaataggaaaagaaaaaaagggttggttctttcaaacaaattcaaatgagcatgtaaaaatatgaatagaactaagtcactgacccttaccactcaaagcgcatagaagattatttatgatagtacgtacggaggaggggacgagacgtagatagtagatactgttagtaataagttattcaattattaaacgaataatatcgactcagttaataatttaggaatcattagttaaatgaataagacttgatttcaacaaaagttttaaaatcaatgatctaataacataagattttgtttgaatctctaaatcaattaaaattcgcaaaccaataaaccccaagtttgattcttgacgcgtaaaacactcaacaaaacgagttcacaagctgtagagggatgttgcaattctaagatagagttagcatatgcgtcttcctctgtttcagaaatcgaccaaaacgtccataatgagtttgagctatggggcttttggatttattaagcctaccaaatcacagtaacccacaggcccattaaacctccagaccattgtttaattttctgctagcatcttctcttcggccactgtgaaattcatatagtggctacaaagtaaaaactatgtgaattagtttgaggtctaacatgagattcctccattatttttattttgtctaaaatgcatgtattgcatgtaaaatacgtaaacataaatcttgagcgaattgaactaaaaaattggttgaaatttgaaactgagcaaataatagcgagacaagacaagtcctagtaaatgcaaagacatggaacctctgcattaaacatgtggccaagctgtaactttctaagctactaactcacgattcataagaatattcttctagtaattgtaatccccaagagaaaatctagacaaccttaagttctctcttaatttgtaaagttcaaaaacttgaaaaccccaaagaaaatggtgtggttggaatcatactgtaatactcaagctgtctgttttcaaagaaaatgcgtggctaaatatcatcatctcaccatgcatttatttacttgtagtacagtttatctttttaattattactgtcacgttttaaaattattttctgtcaccaccctctgctcgattatcaatgcaatatagagataaagttgcagtgctgcagcttccgatagctctctcgggtcaggaaccaaaaacataaaatttcaaatttggcttttttgctggtgcaaaaaaagattttgttcttcaacctcttctttcttcttttgtcagtccatttttcgccttccacttgtcaatattatacgttagagacaggcttttctcttaacagaaatgggaagagagtggtacaatggaggaagatccacttgttcctctaaaagcaagaaaaactccaatgaagctaatggctgcgtcactgcactttaccacttttttcatttccaccatttttactttccttcacgtcatcatcatcaccaccaacctagtattgattctccctccagaactcgtaaaggtacgtgctatctctatctctctatagataaaggacttgggagctttttgcaagacagtgagtgaggaatgttatgctactgaaacttgtaggcttggtggcgccacgaaacagcttggacttatcagaggagtctccattatcaaccaactacaagctggaaagagaaggcttgaacatctctgtaagtcaacattaatgacttcaatgtacatttgaagttgcttcattgatggagccaagtgagaattcaattgcaggtgggcgggaaaaagtcaacacttagaggtcttctcgttgatacaccttcacataattgcaacttacctcgcaccaagacaccgaacgttgtggctagactcatgggtcttgatcttcttcctgataacttggagcttactagatcaccaaggaatggagtaagaggacatcgactctccgggaatggctcagggacaagatcattacctgcgagccctaggatctcctctgattccgaaaatcatcgcctctctcttgagctaaacagagagaacaataagcatgaagagtttgtacgcacgaggctgaaagagttgaaacaagatgagcaaagtccaagtcccagatatagtgggagacagatagtgaaacaaacaaaaaagagagtcaccaccagaaaatttggcatggatgtaacaaacttgcttgagaagaaaagggcaggaggagcagcacaaaacaggatttcacagaaagagaagacaacaagcactaatcctgcatttgtgttaagacaatatcagcaaccagcaacggtaataaccctttcaaaagagaatcaacagtcactaagacctattagcggatgggaaaaagcagagagtaaatcaaaattctctcctcatccaacacccaataatcgaaacaagcagagaaaggtgctcacaccagtatcaacacactcgagatctaatcgatgtgatcttttagagaagaagcaatgcaagaaaatctatgtaacatcatcagctttctctgccacagaacgtcctcggaaacaggtacaacttttctttgtttagctctcattgaagaaataaacacaaacacgtggtaagcagtcttacgcagtgatttgttttcaaatttttaagatgaaaagagctcaagaaccggagaggaaggcagatgcgacgatatgctctggtcagaagatgtacaagtacgagaagaagcttcctcaagaaccgtcaagttccaaattttacgattcgaacaccatttctccgaccataatcaacgcaggagaaaccgaaaaagatgttccggggatgaacaaacttgaagaggaagaggaaagggtcgtctcagagattgagcggcaaatcgtagacgccctcgtgcaggaaacggtagaaactacgtcgctttggggtctaaacgcaaacgctgttagctttgtgcggcaatgaagacttggctttggctatattttaacagcgtctgcgttttgaccctaacgaataacgaatttggccgtaacctacccataaatttgaatttataaagactactaatatttcagtaagtttaatctctaaattaatttgtttccggaagtctattagatattcattttgaatccttcaatttcacataatcatatggttatataccaaaactttagtaaaaattcattgttatttattatgaatactcaaacatattaaatgcatggaattaatagcccaaaggtacattcgtacgtaaatttcgcgtgtggagttaaatccatgatatcaatgatgttacaaagtttgactatatcattattatgaaaagaatactcaaacattccacaatgtataaaaatagtaaaataatcttttcagaagaagaaagaaaagattaaatattgtagagaattcttgtacactctttatttttcaaatatgcatagagtcatagagataatcttactgggtccaatattaatttcaaatatgtcatgggcccaatattaatttcaaaaactttcttaatgataaggcccaatgtttacaaaaaaaaattttttatcaaggggttttagtttgtttgttttttcctagagaccccactatatattgagacgggacggaccggtctcatcccccgaatagcttggcacggccatgccttcacgaggtcatcggaaaatcaaattattgtatagctcgaaatattctttggtttgtctaaagtttgagaaatcttcatcttatagatggaagtggtagtagcctcggattgtaagggtgccaagcaaatccaatttacttgccaaaaacgtcattttcactcttacctagctatatatgggtggtccagcttggctgcacaatagattccatgctgagacgacggttggtttttagttgtcatgtttggctctgttttcaattgccttgtccgactctgtttttaaatttcggtactctgttcttagtctctttggctttatccgctttttacacaaatgacaaaataaagtttctaacaagaacaaatccaagagagtagttgtccaatggcaatgtatcggatctttgtttgtaccaaaacaaagaaatgttaaaagttaaattcattcaaaatccaaacaagaaaataaagaaaaagaaagggagataactatgtaaccataatgtacataaaacgacatgtcttgaacttgttatgacttattcagggaggttaatgtgaagtttgatgaggagaccagggaagacatcatccgggtcatggatatgcgggttacgctccacgataaacgggtcgccgcatttttcgctgatgctgtgaagcgtgtctccttcacctactacgtatagctcctcacatggcctctccatcatttgcttccctctccaaacctcacagtttcttcctcgataatattctccgctacctcctccgttgctgtttttaaccgatcccgcaagtgttaggatcagcagtgccaccagacagtaagacgcaactgtgtttgaccgcgacaccgtaactcttatcatgactctgattataactggcgaaagagagaaagagagagataaattttgtgatggcaaaacaaacaaatgtgttttgttctttctcaggcgtgaggcttgtgtttatgtagggagagagagattttgtgatggctacacaaacaaatgtgttttgttctttctcaaacgtgaggcttgtgtttatataacgccatatgtatcgttaattcgttatacgtggtatattactaataagcaatcactgtcaccactcttcaattaaattaatcccgcaatttggtcaattaggtaggctatgggatcttttataaaatcacattttaaccaaggctagtaagtgattttaattaagtaatggggaatcgactgtttgcttctgaaaatgatattttctcatatttgatgactcatgaaaatgattggttttcactgtttgcatgtgttgtatctttctgcacgtataaaagacattttgtaaaatcaatcttgttatcgtactttttgtgaaaaaaataacatgacacacaacaaaacaaaaaggcaaaagagtagacggcagatccacaaatacaatgaaccttaattacaaagttttgcttaagggtgttcaatttggataaaccgatatgaactgagctatgctttaatattgttcaaatggtttcactatgtctatatccgaaaaaacttgaattcgaatgaacctaataaaaaaaattgatctaaaacttaatgaagacatacaaatatattagatcgacaaaatatgattataaccgatacaaaacctaattaataataataataaaacgatgaaaacatgaattagattattaactgaaaccataccaaaccaagaaaagaaaaacattctctaggaggtcggcattgtggaatactttcggttataacttagtatatcagacgtaatgcgtatgaatagacacgacaaacacacgtacatgtgggacatataggcctctcgctcgtgtaactagcgccgtatagttcctaaggtgttgtgcttgtgacttgtggaattttctttgtattgaatgtgtagaaagcaaaacaacaaaaattattagatatattattgtctatttttgctgaatgggtcggccgacatatgacattgacatataaaattacatattgaataaggaaagaaaaaatacagaaaatgatcaggccactcacatttgataataactgaaataatgatgatagaattattaaatatccttgggaaaatattgtgttttggtggttgatgattcgttaagtagatataggtcacagatcagattaaatgtaaatttttatttgcattctctttccctttgccattataaatgtgttaagtagcatgaaaacttgttttatatgaatcttggaatcagtctaagttttgatttgagatttatgaactttataatatgtttgttgtgacaaagaattccggtttaggcgatgtagatgtatcagagttatggtttaggtttgtgctaattataagttacaaaattctatctcacaataattaattagaatagagtttaaatttctatattaaatgaagaaatgagatcataaagtagaattctattttgggttaccaaatgccacttaattgttgaattttatgatataattagatttattatgtggttaaaatctacttaatggtctcgagtttaaacaagaaagagcataatacatctgttttatttgacaatacttgaactatttcctcaaaattaattagttcaaaactggaagacaaagcacatcaacatcaatttccaagttattagaaaaagtggtaattaatgatggaataatcaaaatgaattacttaaaacaaatacatcaacattcaaagagtcgagtttagaatggaacgttaaagaaaaatggatgaaggagtcttgaagacaatgattcatttgagtgcaatcaaataattgtgcttcggtatgtatgtatttatttatttaattattgtattagtggattctagtgatttcaaatcatcaaataaaaacaagatcttcacttcttaattcctcctcgtcacaagctccctctcttcttactgtatttgtatttttgcttgctggagaagaattcagcatctcttttaggataacaaatctgaaactcatgcatttgtttttcattcagatcgattgattgttttagatcagaatatgatctcttaatgacgatgttcttggaagaagtttaagaaataggttgttccatatcttcttgtttattcaagtagagataacctaacttgtcgtcaaagaaagttgtaataggtttttttgaaaaaccactatagctcttctccattttcattgagcaaatgtggtgaatatctttgaagagatcgttcttgtgtgtgataggttgagaggcagagtcctcgaaccgcatccactgcacattcaagaaccgacaaattcgggaaagattgcgagagaattaatgtttcagattcagaataagaagtatatgttactttacttgagctgcttcgatctctaagtcctgtttttgaatatcgaaggaggtaggtctcaagagacaaacgaagaataaatctgactttgcaaaaaatgactcgtgggtttggctgcaaacagaaggcttaaaggataagaacgtgaaagtatcaagaaacaatatatgaagcagactagcagaggatatgacgatgatccgtaccagaaagctagaatctccaaaaactcagtgtcgatctgaagataaatgtatgaaaacgttaggttatatatattgatggttgactgatttacattaagatatatggatcttcttacgcctgtttcttcttttacttctctaatggctgcggcgaaaatctcctcaccctagacgcaagaaaataaaatattaaagatgaaatcttcagcaaacatataaagtgggattgaaaacttgttgctacatgcagataacacatacctcgtcaacaactcctgttgggatcttccagatacctgatccgcataatgaaccgtatttttcctgcaccacaagaatctgcctctagttgtaattttaagatgcaaatgctggaatatggagtacattttccttaccattctaggatgattagaatattatgacttggaaatacaaaaataaacaatataatggtgtcctatctcctaagtacctctttgttatggttcaagacaacagcacctacacgaacacgatgggaagcattcaaaggaatagtactctcggcttccggaatccaataaactagcatcaggtaagttggctcagcatggtgataccggaaaccttcctgcatgcacaaattatttatgggaccagtttgttcatccctcaatgtaataatacatggggatatgcagctataacttggtatatcaactatacatcccattaacctaaatatgtcaaacccaaaaagattttctttttaaaaacaaaactaaaatatgtccatggtacaaaagagattcatcttaatactaatattagcaatagataagacaatgacatctaattaacaaaagatgataattaagtaacgttaatatgcaagacttaggaatcaaatttaatctgatatgtgaccttaaccgcgggttccacgaggtttacgtgtgagagaggcaagttcaaccagactccctttttaccctgacaacaaaaaacaaacaaaaaggttttacagaatcaaccgctcgctcactcaagaagacagagatgcatgtgatctcgcaccaacacaaacctgtaagcgccactgctcgaatgaatctctaagcgctgcaacgaaattcttagtatccataggagttttcatctccacgatgactccaccgtaatcatcatccacaaacggaagtacttcgaaaatcttgtgttctactccattacgcagaggagcctcttggtctgacatgcttcaaactctgaaaaaatttggaggaagattggaagatttcaagtattcaacgaaaaggagaagataaagtaaaaggagagtgtggtttcaacgaagcaaatgatttcaaaaggagaacaatcacgaggcggcaatggcagaagtcaagtagttatataaacatttagatatttactaataatgtacattagtggggtgggtcacaaatcataaccatcataaattcataatggccttcacattaacccgtcgaggcccttcggtggagtgacgtagtcccacacgtcacctttaacgcaaaaataagaaatccatacgtaacacaaaccctaattagaaatacttttgatcatgtcgcatgctctaatttccattttgacaaaataactccgtttagtttcatattcattagagaatgggcttactgacatcatggtacaaaaataaaatgtaatttcacgcccaccgtggggctcgaacccacgaccagaaggttaagagccttgcgctctaccaactgagctagacgggcttgttgttaattttccagcagaactatataaataatgtaaactatccccatgtctcatcttgagtaaaagtgttaaacattcaacaatctttggtcacacaaatgaaaaggccaacctttcaatgcccgttcggctctgtacctagcagctacaagaacatttggcatctgtgcctcgtactgctgtggcaagccagaagatcgatgtgaaaccgctcaatacccacaggctcagtttctctctagaggaagttggaaaatcccagtgctcgtggtcgtggaagtgatgctatcaaggttaataagatgcttcggaaactctgttaataccatcattgtggacattctcttcaacattcgaccctgaccataatttgaatacagtaagaaattctctttatgataaatcatctcttttattacactgaaacatgactacaaagatctatgccataaattacatgacaagaatgttgaccaaagagggacaaaagtttcttatgcctaagaagtaagaacagtaagtctgcaaccaacgtgggcagatccatacgcgtctctggaactgatcagaccatgtctctgctctgacatcaaatcaatataatagtagatacaatcagtggtccataatcttctctgcggccgtctgtcttaactgcagagacttaatggagccagagagacagatgccttgatgctacttacaatctctcgaacaacaaaacaaacaagaactattgacactccgagaagaagagatttgacaaaggtgaagaactagggctctgttttgcgcctcaagacaaaataggggtcgactcagtagaccacttccatactttaacttgaccacttccatcaccggtgaaaaatatgcccccgggacctatctggattgaccgaatctcttgcttagctaaaattttgcccctttccgtaaaccttacataagaacagaatctaagcttttgaaagtaaaacataattgtatactcatgaaacaaacagcattggaaagacttacgatggcaaatcatagaggtgcaacgaattgtcattgcacgaacatagcaatactggcttggcttctgcatcatggacgccacagagagctagcacgccctatatccaaatagccattgagaacttagttacatatagaatgaatcaagagaaagggtaatatttcaacaaaaatgctaggaactgtacgtattcttctttgtgagtatatgtcacttctaagtttccaccttcagtagcagcccatatctacaacggaaaaaaaaaaaaaaaaaaaacagggggtaatgtcatattcaggaatcgagccaattatctagcgagttagaaccaaaccttgacggtattgtccaatgaacatgacagaagaaactgatcccagcaaatgagagacataacaactgatgtatgctctgtaagcgtttgaatacactgcagattatccaggctccaaacctattaaaaacagataaggtaggcctatgagcttaaacaaaaaaaaaacagaaaggggattttaatttaggtataataggcactggtgactactttttaagtagtgccacactacttacttttatagaattgtccatggcaccagaatagagtctgtttgccccaacatataaagagacaactgcaagcgtgtgacccaatagtgatgcagctggatcaaaacagctagtggtgctattgtatctccaaaccaaaatagagccatcctgcagaagaatttttatcaaaatccaatagaactgtagatttctatagcagaggtggtttttccaagagatgacgcaaacttgaaatgatattcaagacaaaaaatgattttaagtatatacatgacgctgaagcaaaattctactccaactctccaaggccttagaaaagaagtttacagtcagtaaaagtatttacttgtgtgccagcgaacaatagatcagtacccacaaccaatgaatatacttggccaacaggtccattgaggctcaggtctgcattgttttggatattccacgcctgcatataattcaaaaatgtatatccgtaacaacaataaacctcaacacataggacaacaaaagtgattctcagtatagatgaagagttttaatagtcaaggaaccatgcaaatgaatcatactctgaacttaccttaacaagatttggcatgccaaccaatagccagggaccttcactaatgatgcagccaacttccccaccaagattgagtacacctgtacactacatcgtagaaaaaaaaacaaatactagaatgagaagtacgcctataaagtagtccaaacaaccagccatatcaaaatgatgttttaaactcaatagctaaactaaatatggagcgaaactcaatcaaacaacaataaaagaaataattatcagaggcaaatcaaaacctgtccagaagcacaatcccatattcgcacagtttcatctttactcgccgtgtaaagcttatctgatcctgaaggcagagcaatcccagtaacaacctactcgagaaatcagaaccaaaaaaaaaaaaaactatcaacatcgccaacaagcacaagaatccagcatcacttataaggacactcaacaacaagataccttctgatgcccgtcaagctgcgtcaacaaggagaaactatctcctttgctccagcaatgcaagtatctacatttatcaccataagggcaatttccatcaacccagaatttgcaaagtttctccgtcttggtcaccgttctgttcccaccaaatcttccccagttattagcagtcccgctgaacccaggccctctccggtgactcggacccgcaaacccagattcatcagcgacccttttatttgaagaagctgctactggacccgaacccggacccggcaattctctatgcaggtaagggcatgggtaacgattgcaccggccagctcgccagtggaaacaaaccttctgatttgagtccgtcgtcggccgattagagccaccgcccagtctttgaaagactctcttgtttcctccgttcatatctaaatccatcgaattggattctctctaaattacgactcagaaaactcggaattggattatcctgtaaacgtcgaatggatcattactgttcaaaataccaaatccgatcataagtaaacaaaaacaagcgcgaaaatcgaacgaacccctaacagaatttacctctctgaatcaagagtacataaataatctctcacaaaggagttttctttgataaatcaaaattggaagaagatgtcaagcggcttcggttttttttaatcttcggatcattcttgaagaaaacataagtgaagatccctccacgtcagcttcacatcaatggtcgtttaatttcttcttgttttactataaatttttgaaaatttgatctgtctataaactattgttaatcaaagttgtatataaaaccagattctaccatttgtaattttgtagtaatttgttacaaattacaccgagttaaggtaaattactcaaaggctagtctctgagtgccaacaagtgaagcatatgatcccttttgcgctaccaattcggaatgtgttccaagctctatgatcttcccatcagagcacacagcgatctgattcgcgctctgaactgtgctcagtctgtgagcgatgactaatgttgtcctgtctttcatcagacggttcaacgcactctggactaaccgctcgctcactgcatccagcgcacttgtggcctgcaacaaagtaagcaagagagagactaagcagagatgtctcatactaactgtttgtgttcttgtttgatatgctattacttaggtaaaggttctagcaaagcagacagttcatcaaaggcgagattattaaaataagagtctctcacctcatcgagaatcaagatgggggcattcttcagcagagatcgggctatggcaactctctaacacattgataaacaagcacatcaaagcagttgcaaaagtctatcagaaatcaaaaacatgtagctcataatgtttctatacctgtcgttgtcctccgctaagcaagcctcctctttcaccaaccagtgtatcgtatccctataaacaaacaccggtattgctcacaagaattgatgtgcaattgccaggaagaaacaggaaagtataaggcacacgaatctgaacctgaggaagtgagattataaaatcatgagcgttggcagctttggctgccttaatgatgtcgtccttggacacatgctcattggggagaccatatgcaatattctcggccacggagagagaaaagagaaccggttcctgaatcacacagaaagataacctttgaagaagaagagaagaaatgatccaaccatgcctgacacatagatgttacgtatacacacctgattcacaattgagacaaccttagcccattcactcttgtcaaacatcctcacatcttctccacccacagtaatacgtccttgtgttggctgcaagaattgaaaattcaacatatcagcataatgtaaaagtggcagtaaacatagtctcaacagatattaaacttcaaattggaagaggagggtagattaacctcatagaagcgtgccaataactgtacaatagtactttttcccgcaccactagagccaacaagagcagttacagtaccagaattcaacgtcaaactcagcccatcaagaactttcacgtcgggtcgtagaggataagcaaaatgcacatctacactagacaaaatagaacatggaaaagaaaaacagatatgaaaaaggtaaaaagctgtagtaagatatgatgaagagagtttttcttggtctgattttaccatcaagacagacatctccagcccatgttagggtacgtagattgttagttgatttcagatttgacatgtagtacttatcgaggtgacggatattcacatttgggccagcagacaagaacaatttaaggttttcatcttggactttctttgtatgtatatctctttctaacccgtaggcaagagcctcatctatgtccaccgcgtttaaaatggaattgatcctgtcaatagcagcaaaagtcccacgtagatctccaaacgtgtttacaagcccttggacctggataacagaatcactggttatggtaaactaaattacatgtatagcatatgtgtgacagtaaatgatgtgtagacagaggtacttacagcaaatgttagagtgaatgtgtatccaatgaacgaaacaactgttccaacagcgagctcaccctgggttggagaaattttaagaataagaaccaagaaaaataaagtgcaaaagagctaaaatgtaacaacataagaaactacacaaaagagagatacagagaaatttgattcttagtttttttttatttaaaaattcagaaggtagtaacttgattctagctagaaacatccagtcatttgttccagaaagtataaacaacgagtaacactatcttctgcaatagaaattcataaaaacacgattctctttatgttttagggggcaagaagcataatttcaacttgaatgatcataatggcaatcaacaagtcttacaggcaggtatatcttaccgtcttcaccttgcttcccccaagacagtaaagagccaacagagaaatataaacagcaactcttgttatagattcatttatagacttgaaagtaccaagctttaagccgctaagcttgtaagcaagaatctgtacatcaaacaaaagtttagattaatagattatggatcagttagaaaaaagaacaattgtttagaagaaatcagttttagctagtaagaagtctgaaatatgacctgactaccgaagatagacatctgacgtttttcgccgctgaatgatcttacctataaagagatacaaattacttgagtcttcaagggtaaatcaaagtttcttcagataatttaatctgccctaaaagatacaaatacgatgaagtcaagaacttacagttcggattgcagagaacgtttctgatacacaatcagacattgttgcttgagctaatccatgcgatttataaacaggaacagtcgatctcttgtacacagcttttgagatttgaccgagggagtagatgtagaggtaagcaaagtaagcaaagatgaccaaagtaattaccaaaaataaaaagtttaggagaatgaaaaagacatagagaatttaccaactagaactgacacagctagcatcaatagaccaagtacaggtgcaagttgaggagatagagtaaataggatacatattgttccaaaaacctacaaaagggataacgcataagccatgagaactgggcattcttgagatgcaacaggatagtctttgtcatttatagaactccaaaaataacagcagacaccaacaccaggctaagattaaatctgtattcattatgaaaaatgtatgtacaaacacaaaaatctcacatttgcatagtaaagaaatggcttgcctctgtaaatgccctaaatccacgatctcgtgagatgttatcattcacaatgctattcagagcaccaagatcagacgtgagtagccccgttagctctccaacctaaaacaaatgaactcaatctaacataaggaaggtttgtgccaaaatgtctcaaacctgagcaaaccaagaataaaaggaacagaccttgtatttgtcgaagaactctgcctgaatatataaaagacaaaaaaaagaaacccatcaatgatatttcaatacagccaacaatatagcttaagcgaactttgatcatactaaacaaaacataccttctggatcaaaacccttctgaaaatctgagctcttaatattgccataacgttttcccagatagcagtcatgttggtcacaaaagcaatagtaaagatgggttccaacgagtacaaaacagcaattttgctcagcagccgccacaaaggctccggtctcaccccaatcagtacttcaaagaatctacctttactcaaaacaataacacttaccattataaaacagcttcaccaagataaagagaaacacagatgacaagctaaatcatcatacccaaacttaaactacatcaaacccaaagagaaaaaaagagtacagttacaatttgctaatggtgggagagtggattgaagaaccgattaccagaaaaaacaggcatagagagagtgcaagtactgcatccaaggagagtcaataagcaaacactgagcctgagcttgtgcttgctcatcaagctccacagaagcccccaactaattaaatccttcgattcagcctcagatttggattcttcaatctttgggtctggttcttccacgataggcggcgctccggtaacataggcccgagccaatccatcggattttgctctcaacgaatcccggaacggcgcagtggagttaggtaagctgcagaaggaaagaaagggctttaaaccgccgtagggtctaaggactgaagcttggcaccgtctacgagcgacgaggactcgagtggaaccgtggtggaagagaagagtcgttgcagacgccattgatattggtccaacgagcttaaccactgtataaaatggctaattttggaacttcatccaaaaaaaaaaaagcggcgtctgaatttcactttcctctctcggaccttacaaaaagccacgtggactgatcgatgaacatacaagtagtgacgtaacgtcttctcttcttctttttcgacatcacatacatatacagtaagttagtaaccgtagtaacgtctttcgaatacgtaagaacttgcgatgatggatttttgtgaatctcaataatctgatttattctttatattcattaaaagaaaaaaaaaactgatttcacgaggagaaatacttgtcatcaaaacaaagaaaaacaaaaatcatgatagttacacttttttcttttccaaaagaaaaggtttacgtgaaagttcttcttgggttatggactcgatgcaaactttagctgtcatcaaaattgatcatcatgtctcctaattgagaaatccaaatagcacttggaacttttgctatcatcaaaactgtactacttaccccagttgctcacttcttcttttgctattcaaagaagaatataacccaagttacccaaaattttatttaccaaagcgttacccaactttctatttaccaaagagccttactgccttagatcttttgatattcaacgaagtacccgaaacttatgtgaagtgctttgccgggtaggtatcttgctatatacaagtgttcggattttactgctactcaccaataaaatatcccgtagatttttactatatggatcattttctctttacaatctcgaaacatttgttatttccataaatactgtatataaatctcttgatactacttatacactatcactatcttgtatcttttgctatttttttttttttattttttttttgtatcttttgctatttacataggatcgtttctcagttacattactgcctaaagctttgactaaattaaaagtgtctccgcatccttttttttttatttgcagacattttttgaaacccttttttttttttttggggtcaaacattttttgaaacgttagatatctatatagtgcctataatttatcatatttacaaaaactcacggaactttggatatttaccaaacgtccttgagtcttgatatttgctgaattagcagaaaggcagaaactgttgctatcaaccaacctggaacttttgctatttacataagtgcctagaacttttcttagacacggaaatgccagaatcatctaactttaattttacaggtgagcccaaactttttgttttcaattcactgaattacgtaatagtattatattttgatttgttgcttatggggagaccaaagattatatattctgcactcaaaaacatttgcatttgacaacaacttttaccatttacattcgtttctcacaaccaaaaaaagaagaagatccattctaaaaaaggatcaaatgtataaaaagctataataccaaaaatggaaataaaaatcgaattttaatagctccataaggacacgtcatcatctccctcgacatcaaaattatagttccattgaaccgacggcgacggtaaaagcatcccttcggccatgttatccaacaaactagacatccccaacatcgcctcttcatccatataaaacgcatcttggctctgttccggcgtataaatagcctccaccaaggtctcctccatgtcaagaccatgagcatccgtcgtcatatgacacatctcatcttgaaaattcaacgcggcttcagccgccgccttttggatttccttggcacaggttgattccgggattcgtagccgccaagccgagtcagcgaaattgagacaggcagatctgccacggagagctatggcggcgacgtcgtgagcacgagctgccatctcagcggtttggaaagtcccgagccaaatcctcgttttcttgtttggctctctcaactcacacacccacttaccggagtttctttgacgaactcctctgtaaattgggtgacgagtctcacgaaacttcttccttcccgctggtttcttggggcagctcgtggcaagcttcggactgtaatcaccgcctgaggaaaccggagactcgtaatcggagccaaacatttcagaaaaggcagaaaatgagttcattgatcagaagagtactctgtttcaagaaactggataaggtttatgagagtagagtaagtagaagatctctgtctttttttgtatggtatgataaaatatttatttctctatctatctttcttttctaattcaggtaagtgtttgaagttatagaaatgttggagtgagagcttgctgtttatattggccggaagatatttggatatttgtggggtcgaacgcggagtttctgtctctgtgaatgccacgtggataagaaacagctaagcgatcccacggttttgtaattatcaaggctgtcaatcactgagaatctgacatgtgtcctttgacccatcttgggaagtttctgacccttcactggttgatgcctttagggtatgaatttttttaacttcttattgtatgaatgtgtggctgtagtttatagggtacgacaaccattattaaatattatttttccacgaataacaaattgtttataattgtcgcttttctatggtaaaataattagacataatgatccgtgaaacgagatattttcaaatgctctttctgtcttttctccattcacatatcgtgcattgcaaatacttctagagtatagtgagattagatatttgtgtcctaaaaaaaatgttatattattattattattattatatatatatatatatatttgatttaattaatcaagtttcgtagcatagatatgtaaatttaattattcagaaaaatttatatattgtttcaaaaaatttgaatatgctagagtaatttcctaagattcacggaggctataaacttttttactcaggatttctttaagatattgagaaatgagaacacaagttgcttaaaatcgaaggaacaaaaagaaagcttttggatattctttacataagtatacatacatggtcgagaattaacaagtggcaggggtgtattaattggatatatatgtgagagacaagatagggtttgtgtaatttggcaaaaggaaaatatcaaatatggtaagtggttaggcgaaaagacattttgcatgtagttgatcacaatttccagcatctctctaacaaaagtatggttcctcctcatacctcttctcttcttctcccccttggcttagacttagagcgtcttcgtcctctttactcttcttttgttcaaccaccatctctatcttttgtcctctcctcttcatcttcatttcttccaaccttctttttggtctgaaaactcgccggacgccaccgtgagttgagttttccggcaaagtagaaaggtaaaccttttttacagaacttatttgttttgttttccttacaacatacaaattaaaatcataaatgttcaccgtcccttcgctacttgtctaataataatctggattatcagatttgccagaacaacaaaaataataataattacgaagtaaacaattttattaattctaaagtccaaattaaattgattgtggttgatctattaaccccgcttatatatattttttttgttttttcgcttatatatttcttaaactcgactcatatattttttgagaaaaaaatactccaccgaataataatacaggagcataaaattactaaataaaaactggtttaagccaaggattagaccgatatagtagcaagttatacatcactttcaaattccaataatagctataaaatatctcaaatctcaacaacagcaataaaatatcttcacaacgaacgtttctctctctcgctacctctcgctatcaattgtcgtctcacggtattgacatattcggagaaataatacgacaaggaatggtgcgcgaaagaaagtggtttaggaccttaaggtacagaaaacgacaaacaagatattagtataaaaaaagaaagtaaaacttgaaaatgacatgacattggttacaagaggagccacgtagagggccaatgaaggggaagctacggacagtgctctcttgtgggacccatatttctgtttatggtgtacggtctattattggaggttttgctgaatcggttgtttcggttttatactctaatttaaacaacatttttttgttactgctctaaaaatacttgcatttaagaatagcccacacttatactgaaactgaatcaatttaatttacactcgtttctcagttttacaaacataatgaagattccattctaaaaaaggatctaaaaataataataaaataaaaagtatcgtactaaaaatggaaataataatctgagttttaataactccataacgatacgtcgtcatcatcgccgtcgacttcatgattatgattccactgtacggacggaagcggcaaaagcatcccttctgccatattagccaacaaactcggcatctcaaacatcgcctcatcgtgcatataaaacgcattttcgctctgttccgccgtgtaaatagcctccaccaacgtctcctccatgtcgaagccatgatccgtcgtcgcatcacacatctcatcctgaaacgccaacgcagcttcagccgccgccttttggatgtccttagcgcaagttgattccgggattcggagtctccaagccgagtcagcgaaattgagacaggctgatcggccacgaagggctaaagcggcaacgtcgtgagctcgagctgccatctcagcggtttgaaatgttccgagccaaatccttgttttcttgtttggttctctaacctcacaaacccacttaccggagtttctccgacgaactcctctgtatattgggtgacgagtctcacgaaacttcttacgacccgccggtttcttggggcagctgctcgcaagcgtcggaatataatcaccgcctgaggaaaccgaagactcgtaatcggagccaaacatttcagaaaaagcagaaaatgagttcattgatcagaagagtactctgtttcaagaaactggataaggtaactaaaagatctctgtcttttttgttggtatggtttgctgaaataatagtttctctctctttctgttctagttcaggtggatttaatgtttgtagataaataaaagttggagtgagagcatgctgttttataatggcggaagatattttagaggcaaaagaaaaggcgaagacggagtttgtgtctctggtaatgccacgtaaactatacacagcgaagcaattgtaaaatgagtagtttaaggattcactcattaagatctgccatgtgtccagagaagactttttttgacttattcactcgttattattatacctttatgagttttataaactctttgcgtatgaatgtgtggctgttaaggatttagtgtactaggtgtagggtaaccgttattcattattatattcctgaataaagaaattgtcgttaattgttcacccgtgtattagacataaagattgtgagaggatatttaaagatgctcttcttgtgtaatttctcccattcttatagcacatccttctagaatatgaattgggagagtagatatttgtgcaacaaagtataaaaaagtatagaacataataatagtcgtccgtatataagcacgtaagtcaccaagtagttttggcggaaaaacttttgaatttaatttgggtgaatgatcaaatgtaacattttagtgctttttacggttgaattaataaacagtttgaaaagttatgaaatatggtattttggaaaatttaactagaagggtaacaacatattgtaactttaggaaaaccctaaatagactgctaattaaaattctcaatcatcattatacatataaaataaataatcaaatattattggtttagagttataaaaaattgttaatcacaaaaatgatgattgagaatttaacaaaaagttgtttttttaatatgtataaaaaatttagaatttagatcaattagaagcatgcagttgtaattgtagatcggatcgcgaaacgagtctgaaacctaattttgatcacataaaagtagttaattatatttaatattttctaccatcatgcattaacaaatggtggggtgtgttagatttatgagacaaaatagtaaaaggtttgagtatatgacaaaaagaaaatgtaataaaagaacatattacattaagttgatcacaatctcaacgccctctctctcactcgaaactcttttctctcttttctctccagccagcgcacttccttctcactcaaagaagtttctcttcttcatgtattctctcatttccttcaaccaccacgtccttagtcatatgattctctattctttagctacctcttccccaccttcccttgacgaaaattcttgcataattcataattagaagaatttcctcccaaggtactcgtgctaacccttttgatcacatactttcttttgatcacatacgtatttatttgacccatttgaatgttctacatccatcatgattttttttgttttacggtatgcaatctaaaatcatgtgttctccatccattcgctactgatttaatcattatctgagtttttcaacaaaaagaacacaatttataaacatagacaaccatgattagtttcggaagtcaaaataaaaagcatgttaatcaattgtcttttatctcgtatccccaattttacttctcaaagtactaaaatagtctaaaaacaatcatacgtacgtaataagaaaataatttacttcctgctgtgtttaaacaaaacttctatgagatgtaaaaaaagaaaaagagtctacgatggatgatcaagcgtaattgctttgttacgtctaaaaggtgtttaacaaaactatagcgcagaaaataatcagtttaattaactaaacaaaaacatgttagtggattaagccaagaattagtccgatagaactataaaatctacaaaatatctcaaatctcaataatacgtatataatatctcaataatacctatataatatctcaactccaatcagaaagctaaataaaatatcagcataagttatattcgcttccaaaaaaagtctgcctcgttacctacctctcacactcaagtctctcacgttatttgagatatttaggagaagcaagacgacaacgagaagaaaaaagagtgggtatggtcaagaaaaagacaaattatgattttagtggaaaatagaaagtaaagagtgaagtgacgcgacacgtggtacgagactccacagcgagccacgtaaggggggacaaagaagagaaggtatggacaatggtttccgcggtcgagccacgctttcagaattctgattggcactgggttatcttgtggaacccatctgaaagatatttttggttgtcgtacggatttgtttatttcgggtttgttgaattagtttgtttcggttttatacactattttaggaaacttttttttatattctttatagtgaactgggctgaatttttttggttgctagattcgagacgagccaatttatgtaatattttgtggctttctgttgctaaattgtaagatctgtaacttacatgagatagaataaaataatgtaatgcaggttttgtggcatatttacaaacatcatccacgtgtaatgatctgtccacatattttgccttgaaagcaactacaatatgacttttaatatcttttttgttaaatatttgacttttaacttatgtgaagcaaagaagtagaaaacgatttgttttgtattgaattattttccactcgtttctacaacaataaaataaaataaaatgaaggaaccattctaaaaaaaggaactagaatattttcaaactatagtacaaaaatggaaacgactatcgaatattagtaactccaaagcgacacgtcaccatctccttcgccgtcataattatgattccattgaacagacggcggcggtaaaagcatgccttcagccatattatccaacaaagtcggcatcccaaacattgtctcctcatccatataaaacgcaccttcgctctgttccggtgtataaatagcttccaccatcgtctcctccatgtccaggccatgattcgtggtcgtcgtatcacacgtctcatcttgaaaagccaacgccgcttcagcagccgctttttggatatccttggcgcatgttgactccgggattcgtagccgccaagccgagtcagcgaagttgagacatgctgatcggccacggagggctaatgcagcgacgtcgtgagcacgagctgccatctcagcggtttggaaagtcccgagccaaatcctggttttcttgtttggctctctcacttcagaaacccacttaccggagtttctttgacgaactcctctgtaaattgggtgacgagtctcacgaaacttcttacggcccgccggtttcttcggacaactcgtggccaacgtcggacaataatctccgccttgaggctcgtaatcggagccaaacatttcagaaaaagctgaaaatgagttcattgatcagagtactctgtttcaagaaactggataaggtttaagtagtacgtagttactagagttctcagtctttttggattaataaaagatagtatatctgtcttggtaaagctatttatatctctctctcttttttttcttttcaggtagattctttttcaagtgtgtagttagtataaaaagtgagagtgagaattggtgtttatattggccggaggagagataacggatatgtggggagcacacggagtttttgtctctgtgaatgacacgtgtatagtacatagcgaagcaatcccacgatgttccactcgctgtctgacgtgtgtcctttgacccttgtaaagagacttttgactcttcactcgttaacctttatgagttctttaaattctatcgagtgtgtgcctgtgtggttggctggctgctgttgttacaatcgtttttaaattcctatgaataaacaaattgtcattaattgtcacccgtctataacataatagacataaatatctctgtgaaatgatattttaaatactcatgtagtatttgtattggaagtagatgtcctaatatttaaccaaaaataatactacaatatagaaaagcttgattttttaaaaaaattaatcagatttggtaatggataattatcaatttcgatggacggttaaaaatgagtcataaatgcatatgatgaacaaaattattcagtttaaacaaactataaccaaaaacatgtaaatggaccaggacaggactaagcgaaggattagaccaatacaaaatagcaagttatcttgaatcccaataattcccacaaaatatctcaatctcaataatagctatattgtattgacaaaaaaaaggtataaaaaatcttcacaataagatatgcatgaaatatattcgctgacaaaaatatctctctcgttacctctcgctctcacgttattgacatttaggagaaaagaagacacaacaaagagggaaaaaaagagtggtaaggtgaagaaaacaacaaaattggctttagtggaaaatagaaagtaaagcttgagagtgacgtatggggccagtgaaggctggtggggaaggtagggacagtgtttccgcggccgaaccacgggtttagaggattttgacgtccccacgcattatcttgtggaacccatctttctgtttttggaaaatcgtacggacgttcgtttttgaattatttgctgaatcgggttgtttgggtttctactctgttttgggattcttcagtggattggactggatcttttgtagctttttgttggtagatttgagacgcctctattttatgaatatcttaatagctttttgttgcatattcaagcgagataagaagataattgaggctttatggcatatttgaaaagtcgaaactcgttctcattccacgtgtgatgatatgttcgtggccacatatcattcggccttgaaagcaactactaaactcttaacataagtgaagcaatccaatgaagaggaaaacaatttatttaattaattgtaatatataaatatacacatttctttataacaacaattattaaacttactaacaaactcatatgtttcatcgaatccaaaacttgacatgtgggatcttgagagtgttaagttgcaagactttttaaaaacttgtatgcattattcattgtgtagatgttatgtgatacatgttctagttctattaatcagtatattctaatcaaaattaaaaaatctaatatttgtttgtcttcataatctgttattgttttgtttttttagaaagcagcttcaattttgtttacttgttgggcttcttataatttgtttaacatataggcccaatactcctaaaaagtagacgttctcgacttctcgtccttcagacaaaataagaaagtcaaaatgtgttctgaaaaaaatatctttgaaactaaaaagaaaagaaaataaaataaaaatccaaatgatctctcttgccttctttatctaaatcgtacctaactctgttttcagtttcacctatctctcgacgcgagcttcttcttcttctagggcttccacgcgactacgcctgccaaaatcattctacaggtaaattgatgcagtttattcactctctatatcgtcgtggttctcatctccttcttccttcttttttttttggttggtgaaaagtagaacaagagaattggtccatctcgttttttataagttgaatctcatcagagccttctttgtttttctggtatgaaagattcatgctttcgtggattgttctcgttttctctatcttgtgaatgatattcagatctaactgtagttagattagatctgttgcattgtacttttgattctaatactgtctagttcagttcctagatttaactgatttggagctcgaatagatgagtttcaagtcctaatttactgcaaaacaattcgatttagtgtgagggctctagtttttagtgttaaaagttttcatcttggtgacaaattagttgtgatattcgtgtttaaattatcatttaaggaagtctcatgaatcttttttactattgtggttgtctatacaggaagcatgaagccagtcttctgtgggaactttgagtatgatgcgcgcgaaggtgacctggaacgactattcaggaaatacggcaaggttgagagggttgatatgaaagctggtgagccttttttttctttctttctttcttctgcctcttactactctgtctttgtggttaacctgaatgaattataataagcagtattgttatccactaagtacaatgaaaaagcgaaattcaaatgcatttcatgaaatccactctcgtcttcattccatccacgagaaggctctggtggactatctccctttggaaggagtactaaacattgaccacattcacctggccacctgatgcagcctgcttgaactttggaaagtacttcagaggaataagatttttagaaaaaaaattagtgtaaaaccgcattttctttgacgcaggatgtgtttgataatcttgggacgcctatactcacacctggccatgaatggaccatagggaaatccatctcttatccctcaaaatcagtcactttccatccgcattagcactgccatcttaattgcatttcattcctcatcactttgcacacttggacatgcctctgcaatggagaaggctctctattttcattcatatccccgtctgacttccacattttcagttgttccttgacatattaattccataatgcaaggtctgtaactgcttcactggtcatttggagtttttttaaggttctaggaatgttcaaaatttaatatgttctaggagttaagttaggcgttgaaggagggaggacagtgttcgtgtatgttgaaggttcttaatctggtccacttcctcactgttaatgtactcagatctttgcttttggctttttcttttttctccagggtttgcttttgtatacatggaagatgaaagggatgcggaagatgccatccgagcacttgaccgctttgaatttgggcgtaagggacgcagacttcgtgttgaatggacaaaggtaggatacttaccccaggatttatttctttccagacttagttatgaggtttgaaatactgataacataaatggttctgtgtatatagagtgaacgtggaggtgataaaagatctggtggtggttcaaggagatcctcatccagcatgagaccttccaagactctctttgtgattaactttgatgcggataatactaggacccgggatctagagaaacactttgagccgtatggaaagatcgtaaacgttaggatcaggaggaattttgcatttatccagtacgaggcacaagaggatgccaccagagcattggatgcttcaaataacaggtttgttctgtccattttagtatctaatcactttcctttcttagactcacgtttcatctgtgttttcattcagtaagctgatggataaggtgatctcggtggagtatgctgtgaaggatgatgatgctagaggaaatggacacagtcctgaaagacgccgtgataggtcacctgaaaggagaaggcgatcacctagtccttacaaaagagaaagaggaagccctgattatggccgaggagctagtcctgttgctgcctacagaaaggaaaggaccagtcctgactatggtcgaagacgtagcccaagtccttacaagaaatcaagacgtggcagtcccgagtatggtcgtgaccgcagaggcaatgatagccctcgcaggagggagagagtcgcaagccctactaagtacagccgcagtcccaacaacaagagagagaggatgagccctaatcacagcccgttcaagaaggagagtccgagaaatggggttggtgaagttgaaagtcccattgaaaggagagagagatcgaggtctagccccgagaatggccaagttgaaagccctgggtcaataggaagaagagacagtgatggtgggtatgatggtgcagagagcccaatgcagaagaggttagattctgaaataggtcgatacttgtttatatattattgatgacatgaatcgtaaaccatttctcttgttgttgcagccggtctcctcgttcgccaccagctgacgagtgataagagtggatccacaatctctatcaaagtaggatgttgtaactgtttgtagtcaacaacgctatgtcgtcgtgattagtttttgtcgtttggtttttgatagattcgaactcggatcacttttattgtcggattgaaaaacttatgtcaagttactacatttccgtttttttttatcacctctcagtttgaaccccaatcatgtaatgctttcccgtgacaataagatgcgaacctcaaaacatcttgcatcgaaacaccttgagagtgacaaaatcgaacgcatcgttaagtaacttaaatggtacgccgaaattatggaaggcaagaacggttctattgacttaattgggtctaaaaactactctaaacgcctcttgtcaacgttcgaactagtccctaacctttgactcaaatataaatattggctacaaatagacttatagttctgcctacattggtcgtctgctttagtatatttgttaccaagtaaaatgctgctgtagagtttaatgatctctttgtctactgggtttctccaattttctgatcgttgggattcgtgcaagtcgagagagtctacttggttgaaactttctgggttttgatttgagttgcccattggatttgaagttttagtcttttgttggtaagttttaccctttgagatatgctcgtctgatagtatagggctttcgagtgttatgaaaaattcgccttttcgtcttctgatttggttttcatttccttcagctaaatcttcgtaatacttggatcctgaatgattaatcatagctagaatccgtttggctttgttatttgggtcagagattctgagaggacgctttaaagagtcaagcttttcattcctctgaatccgtccttgtattggacgtcttgatctctgtatgctctcctggagctatcgaatcgagtttctcattgactgatgctcttggttccgaagctgtatatatgcagaggagcagtggcatcaataatctgcatatcccgacttcgccaatgtctttctcttcgaatggcattaacctgcctggatcaatggttcttgatggatctccttcaatgcaacacttacctcagcagcagcagcggcaactactagaacagcaagcaggacaaggttcagttccaatgagggaaaacagttattcccatgtagataagaaac

SEQ ID NO: 626 - DNA, 80386 bp, Arabidopsis thaliana
gatctatatctctatctataatatataaaattatattaaaaaggagaaaatgtgctgaaaagtttgtatgatgaaaatgaataaatcattgttttaaattgaagttaaatttacgtaaatgtgtgccgctattccacataattgtaaaaggcaatcttaaaaagtaattttcaaagtcaaggtaaaagagtagatatttaatttatagttcgtcaagtaaagataaatcctcctattttagtagtcacatgttttattgctagggctgctgctttatttgtcatattacttgcgatcgagacaatagagtagagacgacgatgtatgtccaccaaaacaaatcgattttcatgaaatattatcaactattctttattatttttttgggtatgaatgttaagtaactattatttattttttcaaaccagatcctaacaatctacataaagagctaaaccaccatgtgcataatgagctaacacactttgcaatgacaatatgtgataggacgcatcacacacatcttccgtaaagagaatactaacaacattattacgtctacctaaaattgtgtacatgctttgataggatgtaatagaaaaacttgaccaacaccacacatgttttctactttaaaacaagtacatttgtatggacttaacaccataatgttttgaaacccggtatctgaaccatgttcagtttttttttcttataaatatcagtcttaagaatttttcttaaggattcacaatccaacatgagcataatagagagagaagtaattgctatattctcaataacaacacttgacatatactaatttaagagcatcctcataataacatctaagtattttgttatacaacttctttaagtttccaataatgacttaaatgttagatggtcattggaagacatccatgattgcttcgagtggcttctactaaggatatgctcatctattcaaaagactatattttgccatgattgatgataaaatctaaaaaatgtatattaacatcgcaaatgaaattggatattcacatacaaaaataattgtatattacgtattccatagtacttaagtattatgatatatatattttttctttttctttttcaaagcattagaataaaaacattcaaaatatgtttgataggtttttctatacttcatttatgttactgatatagtgtttaaataatgtaaaagtgaatatccaacttctcaagagacaaagaaaggtaaagggtcgcattcgtacacacgcacgagggatacacgtaaaagtcattacgcaactcaacaaaagcaaaagaagaagagaatgcgatgcacacgtgcgctctcttttagcccataaaacccttctcttcttccctttttcattggcctataaaatcaattttactaaactaacctctcaaatctttttagtcgctttggtttagtttaatcattcacaaatgacaaatgacaaaccctacaaaatccttatcgaaaccaccctcacaaatcttctttgtcgctttggtttagtttaaatgtttaatcattcataaaacacaaaccctacaaaatcataatcgatacatcatcgaagatccgccattactaaagtatggcggctaagagcagtgaaattctcctcctaattctagtctcatgtgtataaaaaaccttaaaaggaaataacaataataaaaagtcaactactggttaggcaaactaatagtatagttgttaaccattttgataaggccgtttacaaattacaaccgttcgattcgattctaaagaatctctttaactctttttagttgactatccactcccaccgtctaataaatcgataatttttagacctctttttacgtcgataatttctagagctaattggtattttaaggatatttaaaattagaaactaatcaatttcgaagatacccatcaaagatttccaagtcttcacatcaaataggtctaattgtgcatctcatgggtggacgaagagacatcttattattggcatttattagaatatgcatattcaaatatatcacatggaagtcattcgattttttctagctaacaaagtatgttataccatcttattatttggtgattttattaatcttattagcattatatgtttagaagtataatttgcccaacaaatatattccatttcaagttcattgagaaatattctcataacatgcaaaagaagctcaaaactgaccacactagaatccaaaatcgccaaagaattgatagagtcagtctcatcatagcttacacgagaatataaacttgactagataaagaatattaactttttcagctgttaaaagctctctagtgaatatattggacatacgtacttgattgtagtagatagacgtgttctttcacatgtgtacaccatgcaaaatagaaacattgccgttttataaattaaaaaaaaaccattaaaagaaatcattccaaacccgaccttagcaataactatgttgatatgaaagctaataaataagttagagaaaaaaactaatgtaagtcacgaggatctcactcgccacccaacggaatgaaatcagcggcgcatttatcttaaaagactcgcaatgctcacgagtttcgcgacgccagccattactgagtggcatacccctgtaattaccacgacaataacgagggtaatcttggtataaacatgttttcttgaagtttattttatttttttaagtcactccaatcaattttgcctttgaaaaaaagaaagccatttgtctgcattggggactcatcacttatatatatgcgttactctcccttttttaagtgttttttttcttttgttcctttccaattatttttagcaataatcataatgataattttaatattttaacacaataatagcgaataaataatatatacatggaagcgcgtgggtccaaaccgtcaaattatgatgacgtggcaaaatctcgtgggaaattgaatgaaaactgtaaaagataacgaccggtgacagagagagagagagaggagaagaagaatagaagaagcggctcatatccataataaaagccatttgctcctttatttattctctcattctttcttcttcattattcatttctctcgttattcgtttcgtattttgtttgtgtttatgattttacctccttagttgctgtgagatcaagaagtggtgaaagaaaagttactaaatctggatgttatttgattgtcgtcgttggtcttgagctatgaggagcgttaataatagtagtgtcgacaccgtgaacgccgccgcttccgccatcgtctccgctgagtctagaacacaaccgtcgtcggttcaggtacttctatgagctcttttttttttttctgagtgaaaatgtttttattttggttctttttttttttttttaaagatcagtgttgttgctttgatttgccgacgtttctgacggtgtatcgtgattgtagttttgattgctcagagacatggtttttataagtaaaagtgagaatttcgtgatgtttttgatgtttgatctgtttttgcaagtgttacgtaacgaaattaaacaaagttttaagagatttttgcgttacttattagttatgctcatttacctgttattgctttacttaactaggattaaagagtttttgacgaaagtagaaatataagaagattcgagatttgaacttattttaaatgtctattatttatcagcagcaccagagtaggtgtggtttcagcaagatttaaacttcttgataaagctataagccattgaatctttagctgatcactaatcttgtttttattatgtcctttgaatttcaaaagaaaaaaaggggaagctggtggagcttgtactggtgttttggatccaagaagaacaataaaaggataggccacgcggtgcttgtacccgaaccagctgcatcaggagctgcggtggctccagtccaaaactcttcgagcaattctacttcaatattcatgccctttatagctcctccttcatctcctgcttcctttctgccatcaggtcctccctctgcgtcacatactcctgatcctggtctactttgttccctaaccgtcaatgaaccgccttcagcctttactattggaccatacgctcatgagactcaacctgttactcctccagtgttctctgctttcacaacggaaccctccaccgcgccattcacgccacctcctgaatcaccttcttcccctgaagtgccttttgctcagttacttacatcttcattggaaagggctaggaggaacagtggtggtggaatgaatcagaagttttcagctgcacactacgagtttaagtcttgtcaagtgtatcctggaagtccaggtggtaatctaatctctcctggttcaggtacatcttctccttacccagggaaatgctccatcatcgagtttcgtatcggcgaacctccaaagtttcttggttttgagcacttcacagcgcgtaaatggggatcaagattcggttctggatccatcacacctgctggacaaggttcaaggttgggttcaggtgctttgactcctgatggctcaaagctaacttctggtgtagtgacaccaaatggtgcagagactgttataagaatgagttatgggaatctcacaccacttgaaggcagtcttttggatagtcagatctctgaggttgcgtctttagccaattcggaccacgggtcgtcaaggcataatgatgaagctctcgtggttcctcacagagtttctttcgagttgactggtgaagacgttgcacggtgtcttgcaagcaagctaaaccgttccggttcacatgaaaaagcaagcggcgaacatttaagaccaaactgttgtaaaacgtcgggagaaacagagagcgaacagagtcagaagctaagatcgttttctacaggctctaacaaagaattcaagtttgatagcaccaatgaagagatgatagagaaaattcgatcggagtggtgggcgaatgagaaggtcgccggaaaaggtgatcacagtccaagaaacagttggactttctttccagtcttacgctctggacatacttagcacaaagaaatagcttttaccttcttcattacctctaacatgggaagcaaagtcagtgatatggtaagagattggggtctaacaactatacatatatatagcttggtattgtaggtgtctttgttctttgtactgttaattatataaaatagttttaacacttaaatggtagacttatcattgacaaaagaaaagaaactgtattctttcttggttatgtataaacataaaaatcatctctttactatattgtcttacatttttgagttagaaaggcgagctctacacgcggtgtgcgtgttgagaaaaaaattcattgcacaaaagatctgagaaccccatttcagtttcaaatcttaaaccctcaaaatggcaaaaaaaaaggtcaacaaaataacaaaacaatctctttctaccaagaatatgaagtcaaaaaaagaaaagaatgaagactcttaaaatgggaaaaaatctctctagaagcaaagaaaatatctgtctcgctcgctaacactgcacttttggtatacctaaaaagaatgatactctggtccagaatcaggcttgtctttttgttttcaagttttcaaggaatcctctgttttggaacatactttacctttgtgcccttttcggctttcgtcctcagctttgatcttgcggttataacaccatttgaggactcgtgagtgttgttgcctgagatgtcggtttcctgagacagaaccaatgtcacgtgttctgcagaggttgcctctttccatcctgacaagccatttattcagattgagtaaacaacttccaaaatataaacgatagggagattaagataaaaagaaagggtaaaagaaggtttactctttgcaagaaacgcctttgcttcgtggttgttaaactgcaagcttatgtgatgagcgtttttcacttcgggtgtagttgggtttgatctcttatcttctttgtctgtgtttccattgactgttgaggtttttcttccctgactgctcactggtctccatatttttacagttgattgctcagatgcgggtttcacctcaacagtctttgttcttctctccccttcactgcatttggtttggttatgttcgccactgtttcggattgatacactcaacgatccaactataaattcgctgctctttgtctgatcctgctgagtcactgctgcatgttgtgatatcaatttggggttatcggattttcggctccaaactttagtagtattggctcttgcgtctctgttggttccattctttcgcatgcctccaaggtttggtgcatgatcagcatggaacccattcggcattccctgttgtgatctttgcatttgcctacggccacttcgcctttccatgttttggccattgtctaagccatcaaccattggcacttgcgtttcactgtttcttccattattagtttccaaaacttgaggttcctcgagggatgaagaatcatcaattggtaaggaatctggtgtctgtgcctcagaatcagaagctacagataaagggcttgatggctcagctggatattgttgttcctctgatgtggtgctctcgtcttccttagcatcttttttctggtccttctctctctgctctttctgccttagcttcttcctcttcttcctctccaagagctcagcttttctgctccgaacataataccagtgaattagactcaacacttagtggattcagcaacgttatattactggcattgcaattaataagcacttaccttcttcgagcagcttcttcctcttcaaccagtaaattttggcacctcagagcttcagcatctttgtcagcaagccatgctttaatcttcacattaagaatataaagataaatcgcgtgtaatggatacatgaaaagtaaagttctcgtattagacacttcgctttaccaactagagaggaatggtgaaactttgaaggaaaaatttaccaatcgctgttccagaaggaagcttgcgcaagcaacaacattttttgcctccagtacagtttttcctatttccccgtcaaaaatgtacttttgcattggtgcagcctcgctagacaggaaagttttttcacttgcatcatcaagaatgctaaaaagttcctgcgaagaaattggaagtctaggtggtctagcctggagaagatcctggagaaagaggaacatatatcagccatgaggttgaacattgaggatagtttatctagacagggaaaaagaaaccgtcaagagagagatgcaattcataccaaaaggccagaaccagctcttagataatattgtggcagagcagtatagcctggtttttcgataagtgacattaatcctgactccactgatgccccaggaatatcctacaagaatccaaacaaagcatctcgagttagtctacaaatcattttaatcaggacacaggtccatgatgcataatgcgagagaaaagaaggtaagaaaggtacatcatggatcagatatgcatactcaacaagcctgtgagtgtatgtatacgaatctggtatggtatactcttacttttgtttaatgaaaaagtatttatttggaaacgaatcccataaccctgatgaagtcatatggcattctaggaaacatttatgacaatgcttattatgtatcacacctttcactaatgaagaaaaaagagcgataaagcattcataaaaagtcaaacccttagacaagatgtgacaaacaacaatgaaattagaattgggcctgaagaacatgttatgccacactcgtatgtgaggatcaccatgcgttttaagttaagataaaggtaaaagggaaagcatcaatgggaatcatagtacctcaagcatcatgctctttactgagagaatctcctttgcatcagttgcagagagctgaaataacaacagagatcagtacctgatggaaaaactaatcgaattggcaataactgtgagaagactactagagggaaaactaccttattccaaaaggctcccagcgcatccctctctttgccaaaatcctggtaacatttaaacacaaacttcagatgacttcaaagaaaagagtaaagcaaccagtaaagacataaaaggaagaaagtatagttaagctcagactaagcaaaccttttccggctttctttgacggcgatgcatgcggttatgtcttctaaagttcacaggagagcaaaactccctactgcacttttcacacttctgcatttgtatcttcaaaggggtcagcaatggccagcctgggaacgaaatagaacatcaaataaagtccatgtaccataccctaggccacatgtaattcaagcatcacttggatctaaaaaaaactcaataagctaatatgataaacccctcgagaccaaaacgatatatccacagagtactcaatccaccaaattccaaagtatttggtcagtgaaaatgtcaaatccaaaaaaagatgagagacaatgagacattacctggacgttctaaggtatggagaagttgaaaaagctggacaggagtattttcaggtctagggaaggaaagaaacggatcctttccaaccgcacgtctgataagcatatcgagagaatcattcccatcttgtttcacaagctccattgaattcgactgcaacatacattcacaaaacacaaattcctataaacaaagcacctatatactgaaccgattcttcccctaagcaactatataaatcaacagtattcgattcaaatagcgtcaaaatcactaacacagacagatgcctaatttcctccatgactaagccacctaacagagaaaaatcggaattgaaatcatagtattcgcggtttgaaatctaatcaaataccagtgatgtatagacgaaggaatgaattcaaatcgatttagtgtgtgttcatgagaagagaatggttagtccgatcacgtaccagtaaaaaaaaaaacagtaacagatcgggcggagaataggaggaagagaagaatcgagagcgatccttctggggattcagaggagcttgggacggaagaaagtcgccgagaaaatcagagaaagtgatgggacgcaaaaaaggagaagagagaaaaatgagagaaaatttcggagagaggaggaggaggcaaaagagctctggaagaaaaattataaaggcctagtacgggcaaacaaaacaacccttgaggctcaaatcacaaaaaaatccagcaaatatttgatcagtaaatttgtatttttgttttaaaaataactaagaaagaaaaaacttttttttttctttatcaatcctttattttattatttcttaacatgtaagatattagaatagactgttatgtttgaagaaagttattgggatagacatacaaaaattatgattcatgaacaattgtctagatcttgttggtccgatgataggagagtgatacaatttctaattttttctttcttctgattttttttcaaaattgatggaaccaaatggagtatttattttctccagataaatatccaatttttataggaaaaaatattacaatttaaaatttttcctgtatacttaactacttaacttttgattaccattttttaaaaactatgaaattttgggcttagatcataatctcttcgatgggaccataacatgttaaactagtccaacttttcatcaatagtgctctaacttgtgataaaacatttgtttgttttttttggttagccaacaagtacactggttgatatgtttttaaaatatctagtatttataggaaattgcaattttaaaaatgttggaactagcaagagaaagggactatgctgcgtaagaaacagcaagatgcaaatttatgattcgagagaaacatagataacaacatagacaaagacttctagttatatcaaagaagatctaagtgagtatattcttttctcctatggccaagaggaattaattaccaccacgacccttaactattcactatttattctatcttatagaccaaaaacagctcaagtacttgagtatgaaaatgttcaattatttgcgataagattgaagaatcaacaagcgttacaactctttctgcaggtaccgtagtaatcaggagagccaatcatatagacagggtttttcttgcactccccaagcttagcccatcgtccacagttttcgtcttcatcactgcattccccactctcctcaattcttgcttgtttcttcgcatagatcagttttgttgccactaacagttctcctttcaccacagggcacctcaaatgagtgcttttcccatccaaagatgcattcaagagcctggtgaagaacagaattgcgtttccttttactggtcttaaaatgttaccgccctccaagcaactgtttttgggtttcatctggaaaaaaaggagaactcaacattcattgtggtgtgccaaataaaagtcatctttttgcctctcaggttagaaatcaaactgacctctgaatttgggaagagaagctctcctccttgagttgtgtttgagaggtagagaacgacggttgccagcaaagattcatgcaatacggagctaggttcctctccaaaataatccaacttctttcctgacttctcagaagtgtaacttcttaccttgatagagccgccattttctgaaaaatgtgcgtcaagagagaaacataagccagcagtttggccacaagaaaagagaccttccaagagcaatcacaaagtctccgtagattacaaaaccaagataagtaaagttacctcctgggaggaaagtccacgcagaaactttttcttcaatcccagcaactactggatcctagtttatccaaaatgataccaaaataaggaacggaacatgacaattgtaaaggccattttgatcaaccaagatggaaactgctatactagggtgtgaaatcatttgtgttaacttgacaatatatgagaaagggtgttacataaaactccaaacatatatctcaaagtctacaacaacactagcgtctttacaacatagtgttataagaacatgacaatatctaattggaaagttgaagaatacaaagaacttacaagttgcgtctttccatcagcatccactgagtaaacctctgtagtctcctttctctaacagaaaagaagtaaccattacacaaagaacaatgtatcactatatctcaaacacaaaagaactggaaattaaccagagatatcagatgatcacactcttcctccgacaagaacccgcggtatagaaagaccctatacataccaaattgcttcagacccctaaaatttgaagcagtaaaacatacattcctatgtgcagaaatgatccatgatggtagaaccagatatcaatcagaagtacctgaccttggtagccatgaaagttgaagaacacgtgtcgggtccacaaatttagatcctaaaacataactcgcctgtgtatcatcactcttactcgtaatttctttatctcggagctccttccgactgcaaaaagtagaaaacaaatcctggattaaaagctagattcatcgctagaaagaagaaaccaggtatcacaggtaggtgggtgataatgattgcaaaatgagggattttgaaatacaccttccaccggaacagaaaggaggagacgaagaagacatagtaatcatcagaataaggaagattcggctaaggcaagccattgctccactccactgggtactactgctacatcgctgaaacgaggaacagaaagatgttcccgatgcgttaacgacgtcgtttagtaagttgtgtccttcgaagcttttcttttatcaaagttaacttagaaaaatgccaaattttcaaaactaccccaaaaaaatatatatttttcattttcggagtatcatcgttttggctcattttcatttatgcattcaaaaaatggagacaaaatatgaaaatgatttgatcaatgtgtaagcaaacgtcaagtggacactaacgccaagtcgccaagcgatttgccatattttagtattcatgcaaaaaaaagtaaaaaaaaaaaatagaatgtatgaatgaatggatggatgatgtgtacacacatatagattgctaaaaatagagaagaaagtgcttgaaaaaggggatggttaggcgatttttaaggtttgataaaaaagaaaacacaatgtgtgggtggtgatcacaaatacagatcagagaccaatattaaggagcctttaattagttgtccgagtttgcctcgatcctttcttcacaaaaggaattcatcttcttccttcacaatattctcacataacaacaaatctttcgatcttcctcaagtcttatcatagaacctagacaaaagcaatggtttgttctcttctctttttctaattcatttgtaggattgtttggttctagcattacatgccatcaatgtgatgatttttttctagtcggggcgaaagatacacgatattcaaatctatgaaatgtactagtcacaaaatctgatttaatttttgtctaatcatatgttaattagacgtcgattttaccatgttattgacgtgtctctcattttacatgctatattttgtgtcttgtctagttcataattgtcataactcaattgctagactaagattattactaatgttttgacatatggaaattagtaatggaaccgaaaacgcctagctaacttgaaagtatttttttcccccggtatacaaaaaatgctctcctcctaatttatgtgaatgaaaaggcgaacgcggcgtcggggatggcagtggaggacgagtgcaagctgaagtttttggagctcaagtcgaaaagaaactatcgattcataatattcaggatagacgggcaacaagtggtggtcgaaaagttaggaaaccccgatgagacttacgatgatttcaccgcctccctccctgcgaacgagtgccgctatgcagtcttcgactttgacttcatcaccgatgaaaattgccagaagagcaaaatcttcttcattgcatggtatcattttttttttaatctttcacttcacttccttaattcctattaataagcttaaatttgattatttgttaaaacttggatgatgaaacatatataggtcaccagattcatcaagggtgaggatgaagatggtgtatgcaagctctaaggatagatttaagagagaattggacggcattcaggtggagttacaagccactgatcctagcgagatgagcttcgacattatcaaaagccgagctctctagatccttttcaacgatctatatctctatcatcgatcctgatcttcacaaaaaaaattaccatgtcatctggttgaaaactgaattctttatctgtcttattcattttataaacattcttttctttctacttccgtttgggagagaagttcaaaccttgtagctttgttgtgtaactctcaaataaacgaataatatttcctacctcgtcgtggttaaacaagaagtcgatatgtccgagtggttaaggagacagacttgaaatctgttgggcttcgcccgcgcaggttcgaaccctgctgtcgacgataatttttactccttttgtgttgtactaagttacaatactatttaactcaatttattcatacttttacatggtactagtagtagatacatcaaaataagccatggatcatcaaaccacaacgcacattagaaaggattaacaaaccatacatttaaaaagaagaagcagaatctcagtttccagattcttgaaatctcttttgcaaaggcatagaaccttgttggcctgcctcacctcctcccgaacccgtaattcccattttattccctaaccatcattacaccaaattaaaagtcattaccaccgtcaaaagccgaaaacgttgtttaacaggaagaggcgtgtattaccaatggtggagccaagtgactgtgtagagtcttgaacagattctgtagacttttgcgtcacttcttccgtcgtaccagcgatccaagaagtaacagctcctctcagcttctccgcaatccctccttcgcctttctccgcatatgcttcaccctgtttcgtagctgcttccgagctcggatccttaaaccctcctaaccttttctccacctcctccgattgtgtcactatccctctcttcggtggcgcagtttcgccaccgcctcctccaagatgaagcttctcagtgaccacttccgacaaagccttgtcttcctctcccggactcagtttctccgtaaggaattctttcgccgagacgcccctgtcttgtccttgctctgtcccggtcccggtgaatggtaacttcgtcattacactagctcctgtctctttaaccttctcgtaaactggagtcaccatacttgcgaccgtacttccgtatccaccagcggagctaggattttctgctccttccacacgattctcgtggccgccttccccggagtaacctaacttcgaagcgacggcgtttttcgccgccacagctttgtctgctacgaccgaagtcgctaatgagatcttatcggtgtagctgctctgattaggctggtgcatctcctctcctctcctctgacctctggaatcaaaaccctgagggttttgtataccttgagttctcgtcggcaaatcttttcccagatcaaattcatcactccgctccggagattctttccccaatctagatccatagtctcccgccggtatgtgcttgcccatttcaggtcttgacttagtatcaaaaccatgacttttctcccggagatctcttcccagtcccatgtgatcatcttcacctgtttcgttcctcctcccaaaagctgcgacactcggttgttctccagctcctagaataaagaaaggacacaagtcaaaagatataaattcctgaatcagaattccgagaagaaaaaaaacttacctttaccggtgggatcagtaactttggactgataactcgacattccaccatgagatccctgagcagtcggttttgtatcaaggccatggcttttcttctgcagatcagttcccaaccctaaccttccaatagctgagacagtcgatgctgctccaatttctccagtagctagataaagaaacagacaggtgaaaagagttgaaacttcttagcaaaaaacgtagagctgaaactttaaatcaggattaagagactagagaaaagatcttacattttccgatggggtcagtaactttggactgataatttgacaacccaccatgagatcccggagcagctggatcttggtccaatcctttgggtctgtcgatattaactttactttggtttcgagacttgtgttcatcaggaacaaatgttcttgtcacatcttctgttgcagatagtaaagacacgggagtgttatgcggcgtcagtgtaggagcccctcttctctcttctttctccggtacaccggagtgttttataggacgagacattgcttcgtggccaactcctctcactggctcagagggttttgtatgtgaagaggaaacaactggaaaagctttcgatcctggagggactatctcctccttcaccggaatatgagcttttcctcgtgctgctgggaccaatccaaaacattaaatactctgttttggtcaatagagagatcaaagtgaagcgaaggactgacaaacctggtgcaccgccgtggagttggttgtcgttgtagtcatcttcatcgtcttcttggtctagatcgtgatcgtcagggatgtgttctccacgatcgtgctcatgaccatgtccatgtttagtaagaacattcttgatcttctttgctttttccttcactttcttcagaacttttgatggtcctttttcatgatgcccttcttcctctgcattcaaaacagaggaacacgtaaaaaacattcattaggctctctcacttccagattttagaatatcaatagaaaaaaaactttacattgagattagaatctggtttcgcaatacctggatggtgaatccttattggctcctgtgcttggtgatgaccatgagtacgttgcaactgcgcttgtgaatccattttatttgctagatttgattttgttcttttcctttctatgcatccaaattgtttctgagaaaatatgaggagcttcttcaaagttttatacagagtcagagagtatgggaaagaggaggaagacgcatagccgaactacctctggatggctgtgtcctctgtactttatcttacgaaataccacgtgtcatgccacgtatcaggctcttgattgtgtgcgtggcgctctcagcctaatctttatccgagaagaaccgtcgatgttaccttctttcacaagttagcccactagcccattccaacaacatgccgtttcgatcattggaaaaacagcataacacagtcactgaaatccgaaaacgacaagaaatgatatcatatgaatagtttccattgcgcaatgggttggtccaacagaaatgtacataatgggccttaaaaaagatccagtatgctctatcgcggtttaatggtttggttggtggtagaagaaacagacacgaagcgcggaagcggaactagtagatgcagctactacaatatccacgtggcgaaacattagtcgtttatcgagaactgccccacgaaattacacgtctgaatagataaatcgaaaatggatcgtgaggcccacgtgtctgcgaagaagggcccacagtggattattgaaaagaagaaatggaaaatctgaggattgattcgtctcagaggccgaggttgaagattaatcggacaaaggagattagaagagtagaaaaaacgacaagaagaaagaaacacagttgcaggagagaaagagatatggctgtccggataaacgcgatggcggtgacgtttgtggcgcacgcgctggcggtaatagcggcgattatggtactggtttggagtatcagttacagaggtggattggcctgggaagctactaacaagaatctcatcttcaatgtatgtttctttctttaatctcctttaaagttttctcttttctgtctctcgcatctgcgttgactttttgtatgtcttgtatctgactgcgaagcttcttatttgttcctcagtactgtttctgagtgagtgactttattatgtaaaggagaattcttttgttgtcttgatatctgttatagcttgtaaaatgactcttttggaagcaatagtcctctggtttgtcccaagttttgctatggacgtgatttaggatctatgagtgttgttggggtcgtattctgtttattacagtgtgagtgaatgtacgtaagatgatgtttcgatcttctggtttaggtttagttgatggtattcacaactagcatccaaaaatcgacattatcgttgtgttaccaaagcaaaggggacatctcttcagttgtttttaatccgtctgtgtttgtgttctgatccattttgttttcttatgtgatccagctgcatcctgttctgatgctcatcggatttataatcttgggaggagaaggtaactgataacaacatctgttcaacaacgagagaaataagatattactttcatttcagttttgattagtattgttgatgatgatcactttatataaacctgtttgttgaaaatggaaatgcagccatcataagttacaaatcgcttccgctggagaaaccagtgaagaagttgatccaccttatactccatgccattgctctggctcttgggatatttggcatctgtgcagcctttaagaaccacaatgaaagccatatccctaatctctacagtctccattcctggattggtattggagtcatttctctttatggcttccaggtaaattccatagcgttttgctccttagacaaacattttcccattatacatgtaatcagtttacataggaatccttttgataagtgtttcatttggttcagctactaaatcaaccttataaatgtttctgagttctctgtatcaaactgaaagaacaattacagacagcagaaaacactgtatataaagctattggaccggctgattcatagaaaatggctaacaagttgatcaatttctatggaaaaatgtttttacctattgttgtatattgttcctgaccagaacaagagttttgaactttacagtgggtgtacagcttcatagtgttcttcttcccaggaggatcaacaaatttgaaaagcggattgcttccgtggcacgcaatgcttggcctgtttgtttacatacttgctgtcgggaatgcagctttagggtttctggaaaagctgactttcttggagaatggagggcttgacaagtatggatccgaagcatttcttatcaacttcacggccattatcactattctctttggtgcctttgtggtactcactgcttctgctgagtctccttctccttctccttccgtctccaatgatgatagtgttgacttcagttattctgctatataaaacactttctacattccacgttacatctgtatcgccccttgtactctcaaaactccatttatgtatgatgcatttgtagcgaaaagctttgtgtgttacggctttgctacttctggtgtgtaaaatcttcaatgatattgatgaatcttttaaatcattttcttttcttttcttttctttcatattgccattcctttaaccatatatgctatttgccttattggtgtcaaagcatttaagacaaaacaaaaaacaaaacattttttttccggttttgccttagaaatttgatttacattacaataaacgcaatttacgtcgttgttgatggagaaaagaattcagcagaagaattacaatctgaagcctctctataaatatgatgctcctgcttcttacatttggaaccaaacacaatgtcgttaagagtccagttgctgttgttgatcatcatttcgttgtaatggaactgatcaacatcacccatttcttcataagctgagagagtctcttcgacatttggagcttgactgtgcttagagtcggtaaactcagaggaataatcggtgtggggatatgaagaagaaagccattcagagaagaaaagccttggaatctcaggagcagaagaacattgatggctgttatttccgttgctttcttgtgagggagatgaagatttgttctctagaagtctctggaaggagaacacgtgattcgagatcaaggtttccggatttctttttccacaagcaacaagtgatgatgatgaagacgaaggaggggaaatagattttgcatcttgtaagctctgagacttgagccatttctttttcaaatgagagtgccaatagttctttatctcattgtctgttcttcccggtaagaatttagctatttgcgaccacctaattacacctaaatcattagtctctctataactagcatctgctaaaacaatagggttaggtcttagagatacacttacttgttacccaaggaagaatgaaacgtcaagatagtctcttcttcttctgcactaatcatatccctctttaaccctggtcttaggtaattaatccatcttaatctgcagctcttcccattcctttgtaaccctatcaaattaaatcccaacaacaattatcaaagttgactcagtttgagaaactaaaaactaataaagaagaagatgaaagagagaccagctttgatgggaacagtggtccagcaagaatggccataagagaggatgaagctccttagcttctcgtcttcttcaggtgaccataaccctttcctatgtctctctccatatttcgtcttcgccatttctctttagtcagctgtctgtcctgatacaagaaaacatgtctcaatactatatatggtgattgagacaacatatatatcaccaaacgtccacagatagagcctacatacttggtgttaagaaatgaccaaatgggcctgcttagagtaaatgacaaatgacatatatatttctatttttatgaaaatttgggatataatttatgtgttaatttcttatgagtatactgtatgcatttgtataagcagtgaggagaaaagtcataatggaatatgtaaggattaattaggtgtcaaaagtctgcttggataaatttaaattattgatataatgttccaacttaaaataaattagcaattttcagtatatataagatttgagattcctacctataaaaaaaaaaaaaaagaagaatctttgcttgtttttgttctttcactttgttttcttattgtttgttttccttatatttacttcatttataatggacgatgccttaagaatttacacactaatcagataacatcttcatatccaaaaatctctaaaatgtcggcaagaattttatattaacgacttctttaatttatgtttaaatcgcgtcaatgagttttttggttagaaacgatcatccgggtggaataatctgtctgattcaatccaatgattgtgaataatgaagtaatgattatagagaatcatccaatctgttaatcttttcgtaaagcatcattagcaagcagacaaattgcatttgctaatacaagtacttgaaataattattatatgatttgagagctctttttctcttaattataaaattttgtagtgaagtcaacattgagctcctatttgctgctagtaattatttcatattttttcctctcacgatgtttttcttacattcacactgacaagtggaccaataataagagttatttgaggaatattgtgaatttcaacaatttgaattccttctgtcccgatcgaaatggcctgtcccaattttaaaaatactctgattttgttttttacttgttggctcttttggcctgtggaaaatgacgagtaaagaaaattgagagggaaacaataaaaaagtgtctaccttgtcttggtcgtcttgataacataatataatttgccgtcaaactaatccccaatgaaacacgactaataaattttatacatctaatgttatgatgacttaatccttagccctcggagaataaattttatacatctaatgttatgataactaggatactttagattgttcgtctacaacaaaacttctcctccttcgaccattaggccttgtggtatgttgataaaactttatgaaatatgttgacaaagaaggttaaacatggcttagttttatgcaccaaaataaaaacatcattcaacattgaatgaaacacatgttttacggttagagaagacaggcgttagtcaaacaatgacaaatgcttttaaaaatgagatacaataatctttgttttttgtgctgacactttgaaccggttctacataaaagccaacaagtctataatgcaaaaaacccaactcgcatcattggaaaaccccatctctaatccggtagctacagctctctaccgtacctaagtaacttacccatctgataggttccttgttcttgaacacaccgagtcgaaatcacgaactaatcatgttgaaatggaatctggatagctgctgcggaatggttgatataaccggtccatatctctgtttcaagaaaataatatacggttagatgtttgaggtaaaaaccattttccaaaggttggtattctggatataagcaaaacctgaacattgtcatagagttcgaacaaagggacggccaagagcttcaaatttttgggcacagcaaagtactctttctcagacaagtgaacaatgtagagtctcttgcattcctgccattccacaaaaaagaggagatataaggagaagagtaaagggaaattctgagaagctttacattgtgtttttttactacctttggtttcgtgatgtgaggagggcaatacgggtacatcatggtttcaaagtttggacgccaccatgtcgcaacacattctcctacctgttaaagggacataaagtacccaacggatcagggacagagctatatacataactcaatcagacaactgtggactcatggcaaagtcttctttcttcatctagtacgtatatgattctctagcaaagctaccaggcctatccttgttttcttttatgaaccctcattcctggcatgcttaagtgtaataaccaaaataatttcaattgcttctcgtttgctttaagagcaagcacatgcaacaccaacctagttcttttaaggcatctatctacccctaaatatcttgtcactatcactcaacgaaaaagaagaaaccagaatagtaccgtccagtcaggtacaagagcagccgaattgcctccaagtttactggtcagctttcttttcagaccatcagcttctgcagacacaacatagtacacccaaaacttaagcagccaagaaactcataacagtgtagaaagtattactaacgggtggtaactgtataccattttcaccaggcttcaggcgtccacctggaagtttgcagaatgtgttaccaatttgtagcagaagtatatgaggatggttgtgttcttgcacctaatatgttaagcagcataaggtattaagaagaatcttaggttagagagatatcactaaaatcaaatcaaattaggtggtagtaattgctagactcaaacgcaaattatttgaagcatatgatactccatgggaaaatattaaagcttggaagggcaatggtgcatacaaacaatgaaagaaacggaacaataagatgcatcaataaatggcacccttcacttttatgactcttattaagtgcaggttaagttcattggatccataaagcttgtgactatatattaaggtcagattaatccacttatgtgattcgagcttcttcgtaatataaggttacccaatcagtacaaaattgtgttggagatggcaactagaaaaggaagtagatgacttcaatcaaaatatcacacagatctatatctctgccaagttttaaatgatacattgggtagagaacacatatttacagagaacgctacgattaagtacaaataaagtgacacttcagtggcattatgtatatgacagtatggccactcaagtcttgaaccacataactgtaccaccgattttaagacagtgggcagttaaacaacacagagaaaactacagaagagttggataacaagtagagcagatcgaaaattatcataccagtagaatcccttcaacgctagtcctcatgccctctttcatatagctgcaacaccccattaagaaaacaagaaagagataatcagactccagaatgtcttaagtaagagctatcaaattccagacttcatgtatccatgtaaaaagcatgagactttacttgcaaaactaaagtattgtataacatatacagtagctatatctgttccctaatcaaatcattcactggaaatttaaatagcctatagctgttctttgttcacaaaaaaaaaacacagatcgttggaagaagttgttctaacaatatatgtaccaccaagttgtagttttgaaaccttaaagttgtgtaaaatggccaaaagattattcctttaaggagaagctagtaaattcagcagcagcgagaaagcagataagcatttagaaaacatcgagatcatgatctaagaatgtaaaagcctggagatttctagggttttcaattctcaggcatcttctccagcagtagctataagaagaaaacaaaaaagagaaagaaggaaagaggaatcgtacttgattttcatacgagcgagccggtcggcgacggaggtgtccttttccagcttgggttccttagttccgaagctgtagttcgaaagcgggtacgtgttcaccacctgagacatagccatctctctctctcaacagaatccacttagacaaaatatggtgaaatcttcttcgccgtgtgtgtttctctgtttcgatctatcactcagcggtggggacggacggcaacggggagagaagcgatctcgacggagaattaatgacaccaccaacttctagagtatactcatttgttatagtggcactttaggcccatttaaaaaataccggcccatttataaagacccggcccataataaccgctccgaaccgatggcttcgtcactttgttgttcagtgacagtgatggattagagagattggcaacctaagaaagcgcgcgaaaattggcaacccaagttcgccatagccacgaccacgaccttccatttctcttaaacggaggagattacgaataaagcaattatgggcaagcaaaagcagcagacgatttctcgtttcttcgctcccaaacccaaatccccgactcacgaaccgaatccggtagccgaatcatcaacaccgccaccgaagatatccgccactgtatccttctctccttccaagcgtaagcttctctccgaccacctcgccgccgcgtcacccaaaaagcctaaactttctcctcacactcaaaacccagtacccgatcccaatttacaccaaagatttctccagagatttctggaaccctcgccggaggaatatgttcccgaaacgtcatcatcgaggaaatacacaccattggaacagcaagtggtggagctaaagagcaagtacccagatgtggttttgatggtggaagttggttacaggtacagattcttcggagaagacgcggagatcgcagcacgcgtgttgggtatttacgctcatatggatcacaatttcatgacggcgagtgtgccaacatttcgattgaatttccatgtgagaagactggtgaatgcaggatacaagattggtgtagtgaagcagactgaaactgcagccattaagtcccatggtgcaaaccggaccggcccttttttccggggactgtcggcgttgtataccaaagccacgcttgaagcggctgaggatataagtggtggttgtggtggtgaagaaggttttggttcacagagtaatttcttggtttgtgttgtggatgagagagttaagtcggagacattaggctgtggtattgaaatgagttttgatgttagagtcggtgttgttggcgttgaaatttcgacaggtgaagttgtttatgaagagttcaatgataatttcatgagaagtggattagaggctgtgattttgagcttgtcaccagctgagctgttgcttggccagcctctttcacaacaaactgagaaggtacgtttatctgtgtacgagtaaatattactaattcaagcattgttgattaattttgaacaatttagctcctcagttagttttacaagattctgtctatactaatccctgaatccttcctgatgaacagtttgacaagaatctttgtctgtatgtataatcactatatggattagttttgaagactagaacttctgttcttggtcgatgtgtatacatgtactgatagatgttcgtgtggtatctttgtttggcagtttttggtggcacatgctggacctacctcaaacgttcgagtggaacgtgcctcactggattgtttcagcaatggtaatgcagtagatgaggttatttcattatgtgaaaaaatcagcgcaggtaacttagaagatgataaagaaatgaagctggaggctgctgaaaaaggaatgtcttgcttgacagttcatgtatgtcatttgactttctaaaaactttccctttattttattttttatgatgatctgttaatgcgatattgttaatgaccacatcttgctttcaaaaagtttttttcatctattaaatgcttactgcaattcctgctaatttattccttcgttgatggtgcagacaattatgaacatgccacatctgactgttcaagccctcgccctaacgttttgccatctcaaacagtttggatttgaaaggatcctttaccaaggggcctcatttcgctctttgtcaagtaacacagagatgactctctcagccaatactctgcaacagttggaggtactttccgctttatttggctagtcacatgttcagttttaagtttcctaactgagtttctcttaaaataatttttatatatattcaggttgtgaaaaataattcagatggatcggaatctggctccttattccataatatgaatcacacacttacagtatatggttccaggcttcttagacactgggtaagacacaatctcttttcttcttagattttccgcaaaagggctttgtttatttgtagttctatagatgcagtaagtcgtcttatagtaaagaaaaaaaagactttactggcatctttcagtttttgaaggggagagatttgagatttctgtacttactcctcattgactttttgctaagtggtagggaaattttttaaaagatctcttatcatgatttgtggacactttcatttcaacaggtgactcatcctctatgcgatagaaatttgatatctgctcggcttgatgctgtttctgagatttctgcttgcatgggatctcatagttcttcccagctcagcagtgagttggttgaagaaggttctgagagagcaattgtatcacctgagttttatctcgtgctctcctcagtcttgacagctatgtctagatcatctgatattcaacgtggaataacaagaatctttcatcggactgctaaagccacagaggtaaaaatttggcctgtcctttgccctcttatgtatgtgcctgtgtaagttagttcaactcatatagtgcaatactgtaataattttgtccacaaaggaagtttaaatcgcccccatgtatattgataaaccaagtctaatcattaaaaaatccctctgaagtgagttggcaaataatacagcgtattggtatctttgtgatatctagtcatagagatacttgtttcatggttataggatctgttagacattattcaatatcctatcctcttttctcacgatgattttcgttttctatatagtcatatgtaaagctataaacatcaccgcgccaattcttagttatcttgattaagaaaaataaacaaaggggagaggaggatagagtgcagaattatacgagttttgcttcccacccctgtttttgttaactagctcttgctttacagctcctcctcacctggcttgagggttcttaactttttggatgaaaagttcattgcagttatggaagctattttacttgcggggaagcaaattcagcggcttggcataaagcaagactctgaaatgaggagtatgcaatctgcaactgtgcgatctactcttttgagaaaattgatttctgttatttcatcccctgttgtggttgacaatgccggaaaacttctctctgccctaaataaggaagcggctgttcgaggtgacttgctcgacatactaatcacttccagcgaccaatttcctgaggtttgtatcttgtttggaaattgatactatctacggcctctctctttatgttctgtttttgtgcatcacacagcttcttaaacttgatttgcttatcataaattaacggtttagtggcgattttgttccataactcagttgtgtttttcgcaatgtacagcttgctgaagctcgccaagcagttttagtcatcagggaaaagctggattcctcgatagcttcatttcgcaagaagctcgctattcgaaatttggaatttcttcaagtgtcggggatcacacatttgatagaggtatcctctcgagaaactcgtaatttttagatgatgctgtcttccgcaagagtgcagctttcttgatttttttataaattgcacctaaatggatacccaataagtattgttgtgtatggggatgagaataagtttcaagaaggtactttgtgttggtttacttttggggctttactgttctcactttctttctcgtgcacatatccattaaaagttattcactgctctagaacctaatatcttctttggtaccaagtataacatatgtgcatatgatactctcatctttgaaagttgtggacctttatttctgatctgaaactaaggctttgtacagctgcccgttgattccaaggtccctatgaattgggtgaaagtaaatagcaccaagaagactattcgatatcatcccccagaaatagtagctggcttggatgagctagctctagcaactgaacatcttgccattgtgaaccgagcttcgtgggatagtttcctcaagagtttcagtagatactacacagattttaaggctgccgttcaagctcttgctgcactggactgtttgcactccctttcaactctatctagaaacaaggtgtaacgaaggaacaaaccacaataaatgttcttgtactcactgcttttcaatttgtaactctggcttccaattttttccctctgcagaactatgtccgtcccgagtttgtggatgactgtgaaccagttgagataaacatacagtctggtcgtcatcctgtatgcatcttgctctcgcttctatttctttttctttctatttttaaataagttggaatgattttgttcatttcgttttaaaaatttgccaggtactggagactatattacaagataacttcgtcccaaatgacacaattttgcatgcagaaggggaatattgccaaattatcaccggacctaacatgggaggaaagagctgctatatccgtcaagttgctttaatttccataatggctcaggtaacataaacattaacagtagaaaaaatctcttgcatatgttgaaatgctaaatgattcaagatattcccattggttttccaggttggttcctttgtaccagcgtcattcgccaagctgcacgtgcttgatggtgttttcactcggatgggtgcttcagacagtatccagcatggcagaagtacctttctagaagaattaagtgaagcgtcacacataatcagaacctgttcttctcgttcgcttgttatattagatgagcttggaagaggcactagcacacacgacggtgtagccattgcctatgcaacattacagcatctcctagcagaaaagagatgtttggttctttttgtcacgcattaccctgaaatagctgagatcagtaacggattcccaggttctgttgggacataccatgtctcgtatctgacattgcagaaggataaaggcagttatgatcatgatgatgtgacctacctatataagcttgtgcgtggtctttgcagcaggagctttggttttaaggttgctcagcttgcccaggtatactccctccctcttttctcatacgcaagtttataccaacatacagaatgattagaggtaggccaccctagaggccttaaagaacgcattaatcactgaaatatggctgtttttggtccaatcatttatgaagctgactcacatatatacttgactgtagatacctccatcatgtatacgtcgagccatttcaatggctgcaaaattggaagctgaggtacgtgcaagagagagaaatacacgcatgggagaaccagaaggacatgaagaaccgagaggcgcagaagaatctatttcggctctaggtgacttgtttgcagacctgaaatttgctctctctgaagaggacccttggaaagcattcgagtttttaaagcatgcttggaagattgctggcaaaatcagactaaaaccaacttgttcattttgatttaatcttaacattatagcaactgcaaggtcttgatcatctgttagttgcgtactaacttatgtgtattagtataacaagaaaagagaattagagagatggattctaatccggtgttgcagtacatcttttctccacccgcaaccctgtttcttttcagcttgatttctagtagttattagaattctggaatgcatttttcacctgatatagtgaagcatgatctccatcaatgttgaatacgaaatatattgttctaactctctattaattctggtttgtaacaatttgagagtttcagaaaaggaaagaagaaaggaagcaagaaatatccagcaaacagatcaacaaacgcataaaaaagttaatccagaagagtcttggttggaaaagcaaactagggcacaagccaatgtcgaatttcttgcggaacaacggaaactggagctgctgatggttacgtctgtaaatctaacgcggatttgatcttgacaatagtatgagccatgagtgtctcgacacttttgacagtaccttgaatgagtgcagcagttggattgatgcccaccaagatctgaagtccaaatgtcagtagacatcctccaccagtattgcctctatgatatgacccatttactccatctggcactatcgaaaatcccgaaggaagaaacttcacagaatctgaattttcacctctcttgaccagctcaatagaattggtttccactggtgcatacaccaccattgcacctgatgcatcattccaaatctcttgcagaaccagcataccattattctgtttgcattgcaaaactcacgaaaatcaatggaaacatagacaaaacgacactcattaaaccaaaaataaatgttttgaaactcacaacgattttcagaagagagatgatgtttccatggcgttttgctttttgaatccggattgtttcttccatggtagtatcattggtcaagatatcccactcgtgtctgaaactcaggtggctaatgaaagcaaagagtgtatgctggttcactgggagccaaacagaagtggatgcactcagcacaatcccagttagctcaccaggctcattcacgttctttcggatcatgaaactcatgttttgtgccacattctccacctgaattttctgccacttgtccaccgaaggactcgtaatacctctgtagtagttgagagtcattcgctgtgctagcttcactatttcagttgcaccttttgcagacaatcctatatcgaaaacatatatcacaatcaaggcctgtccaaatttagtggagaaccgaaaatgacctaaaaagtagttgtaatgagatttattctataatttaaatagctttcacctggactaatttcagtcaagttggtagatgaaagggtcgagaggctttcgcagtgtctctgcagcgtcgcgagccatctctttgcacctagcccgatcccatagccaatcaaaggctggtagagttggtggatgtgactctcattatattccgcttgttcaatccatgtaacctgtgaaatcaaatctctatgtgttatacatgtggtgaatataataataaccattaaccatttatttatgtctccacagtacaagatgctctgatagatcattaattatgattgcgagtaataacaagtgaaccaacatatattgttcaaagaacaggattcagaagtaacctgggagtacccattggacaggtcgtctatgataaggcctgagggtagcctcttagaacaaccatagggcagcaaagtcggattttgagtaggagtaacgtcgacgaccacccataagccctgtctgatctctttgcagtatctaataaacgttacttttctctttggtaccagcggagaaattacttgaaattctgcttgaatctgccaaaattatatgatcacaaatttgaaatgtttctacttctcttggattatcaaccaatatagacgactcagaaaactatatatattatacctgttggagtgagccacttttggttccaccagaaccggtagatagcactttatgggttgatgccacagggactataggtgcaaacacgttgacccatttgccctgtttaaaaaaaaaaaaaaaaaacttgttaacatttcatgtaacaacatttcactaaaaaatgggtggtggtttaaaggttattactgtgtccataagagtcttgaccagagtcacgcaagtcatgggaactaaacctttagctcttgaagcctccacaatttgcccgggaggttttgtgacattgttgaaagaacttctatacttctcatagatctttgatactcctttggatctaacgattggatctatcatccaaaatggacagtccacttctcccaatgtaatcaactctctcaaagccgtaatggcaagattcagaaaaattgatgtctccttctcagacgtcctagttccaccactaaaatcaagtactggtgttgcatttattcctggattagaggaagaagaaggcgcctgttcggatgtactgaccatcctttgtttgggatgagaaaggtatctggaattgaactggtctatctcccgctccaagttagcattctcagccataagtttttgcacctcatattcagtgtctccacaattagttgccttaccacaaatgttgcataaactacgtagcattgcgcttctaagctgatcctgagttgctagcaatctgtcatgctcttctctaagagttacattctcaaggtggtcattattgatctgcttacccaaaaaaccacactcaataattataccataatcaaggcagattttgaggatgagagagagaggtggtaaactatatacagtatttgtttttaacatagggcagaaacatggtccataatacggtacgtgcaaagaataagaaaagacacagccacatgcatgtatacacttctgtattttttggtaccttctcgagatttcttttattctggaaccaattcttgacttgattgacacccatattaagcctttgtccaagctcgtacctctgttcttcagtgggatgaggattttccatgtagaaactacactcattttaaagtaaagagcaaagtaaagagaaacattccaaactcaaaataaaaaaataaaaaaaataataggaaatgttgcatgatgatgaaatgaagaagaaagtgaacaaacttttcaagttcttgagtttgataagcagtgcgcctatgggttcttctcatccttccaccatcttgatcattaacaccagacatatcattaatcatatcaatctcatcgccttcagcttcacctggttttggaatgtttccaaccgcatccaaatcaccttgtccattcattttccctcaatgcaataacctggacattgcatactattagtactcgatatagaggtttagctccctggacatatagtgagtgtgatcaaattaatacacgtataaactttatattaaccaccaaacaaaaaagacttaaaaagttttttctttttggttttaatgctgaagattttatcgataaattatgccccaaaaacacaatgttaagatttactaccaacctaagattatttactatttcattccaaagtttgacaattgcaacaactcaaaagagacaaagccaatctaaactgaaaaataacaaaaaacaatctgctttatactggaaaagaaatacaaccagaataaaattcaagtagagaatgaaccagtaaatggttctttttggaagaagagaattaaattaacatttctagtgtctcgacaacgaacaagacaaaagaactcaaaaatttgggatacccattgtagagttaacacaatatttttcaaagtactttacacataagcgaaaaacagacaaatcgggaaccaaaatcattctctaaacaaaatgtaaaaaaatctgatttttggctgaaaaaaacaacaaaaatctgattgtcagtatcctacaaatcgataaatcgtaagaagaaaacataaaaataatattaaagttgtgtgctaaaagcaaccttaaacaaccaaatagcacttcgaccaatgtcgaaaagcaaaaaccgtaaagcggtgctcgtatgaatgttgaatgggataaagagcggcgcaagatctgatatttggctggaaaaaacaacaataatctgattgtcagtatcccacaaatcgataaatcgtaagaagaaaaacataaaaataatattaaagttgtgtgctaaaagcaaccttaaacaaccaaatagcacttggaccaatggcgaaaagcaaaaaccctagagcggcgctcgtatgaatgttgaatgggataaggtatatatgagattctcgacggaaagatgtatgggcttcgataaagaatatatgagattctcgacggaaagatgtatgggcttcggcccataactctttgatattagtatagaaccataacaaaagaaaaaaaaaaaaccttaaacaagtaaacactaaacccaattgattctttactaaatttagtaatcaatggttattgtgaaatgaaatttaacttttctttcatatgaaaaaaaaaattgaaaccatccatggatggcctagttttatttagataactaaatatctatgttttgaaatagtaatctattacatgacacaagaacgaagattaactaaatcgagaaagaaaaaaaagtgtagatttggtagacgctgaatatataaaaaaactaaagtgataaaacaaattgtctttttaaaaaagtatggaattttcaaatttcccattctttcggtatatgatgagaaccttcacatggattttatttttaacaacaaaaatcaatgttgaaaagtgtatgtacctatgaaacaaaatcagggtcttaactagttttttgttttggttttggttttaatcttttctagttgctttgccttatttataagcgcagatgaggaagagaaaggcgaaggcacatcagctgcatgggacgttgctgaagctgtggcgctctcattgtgtgatatcttcaatctctgttaatagctttgtaatggtggtaacaatccaaaaatacccaattacaatcttataagtaccaatcatcatccatcctatggtttttcttttttaaacaaaatccgatataaaattaataaaaatctattgtattaacactaaaggtctatttacgaaaatttatagttacaatgatatgaaatgatagaaaaaatgaaagattataaaattgtattgaccgaaaaaagaagtttaatatatatatatatatatagggatactcattagaaaatctatatgcttagtgaaaaatgactccttcccataatattaaaaacagataaacgaaattgttaactaaatttattcaacaataataaacttttaacaatgacaggtcacactttaaatggaaatatgcattgatagactttctcggttgaagttgtaactctagatttatttttgtagaatttaaagatgtattttgttccttttgttgtgagctatgaaattaataccttataattgtaggttttaggaagcggttgatgtatagcatgtgcagagtaagctcgaaatggctgagacgaaaaaaagtgtcgccacaatgatttactttttactactatacttttgatcattgggacctaatggatgaatgttgtgtgttgtggacgagtttatgacacataacaatattgtagacaaattgtctaatttgagtagagatactaaaatttatctccatataattgtatactgtatatgtataacaaataattcaattcattggcctaagatgttttattgtatctttgtagaattttacactttagagaaaaatcattgcaataactcgatgaaaaaaaatgtttatcttatcctagttacaactaactatctatctatctctttgtggtaggagatttgcatctgatcgaacgattcatatggtgccacgtaactatggtcccacttctattacgagatctactaagacatcagcacgtgtcggtgtcgtttgatccacgaggtcggtgacgcttagagctagttgaccggtacagtcggttattaccggttatactatatgtatgttttttggtcaaagatttggagctattttatagttaataaatcaagagttttttttttccacaactaggtcttaatttgtgattgtttttttcttccatttttccaaaattctcttatcaatttcaggttagtatttttgttactgtccctagcttttgactattgtactactgtataccctttttttttggcttgagaaattagattttgttatgtttgcgtaaaatatttgtgaactcaaaaataaaatctctttttttttcattgccgatattttttcttccatgaatgctgctgtaaagtattaatttccctctctactgagtttcttccaaatttctgatttttgggatttgtgcaactcccaagtcgatttcagtttctgggttttgatttgagttcgccgattggatttgaagttttagtctttgttggtaagttctatcctttttgagatgttgaatttgctcttctgataattagggcttctgattattagcctaccaatctttgatttggttttcatttccttcagctaaatatttgtaattcttggatcctgaatgattaaccatcttagtttgattggtgaaagtataccatagctgcttaggatccgtttggctttgttatttgctcagattctgaaaggaagggtttaaagtttcaagcttttcattccgctgaatcagtccttgtatttggacggcttgatctgttatctgctctcgtgggtggggcatgaacagaacggtggtctcgggagctgttgaatcgagtttctcattgactgatgctgttggcacggaagctctaaatatgcagaggagcagtggcatcaataataatatgcgtatcccaacatcaccgatgtctttctcctcgaatagcgttaacataccgggttcattggttcttgatggctctgctgcttcaatgcaacacttacctcagcagcagcagcagcaactactacaacagcaaacaggacaaggttctgttccaatgagggagaacagttattcccatgtagataagaaacccagattagaagtgaagcaagaagatatgttgcagcagcagattttacagcagttgatccagcgtcaggaccccacggggaggaatccgcagatgcaagctttgcttcagcagcagagactgaggcaacatcagcagatgcttcaatccatgtcaccctctcagagactccaacttcagcaacagcagcagctgagacagcagttacagcaacaaggaacccaacagattcctcctaatgtacgtccttatgaagttggcgtctgtgctcggaaattgatgatgtacttgtatcatctgcagcaacggcctgctgtaagctaatcctaacctatggacttccagttatttcatcacatctatgcacccatcgctgatacctcttttctaggaaaattgcattacctattggaggaaatttgtggcagaatacttttcacctcgtgcaaagcagagattgtgcttgtcacagtacgaaagtgctgggcaccatgcgcttggcatgttcccacaggcagctccggtcagtttatttttagctctgggtgttttgattttttatgatatcagtgttctgcatccctgtatctttagccatacacacggtttctccacctgtactatttatgaatttcacttcattgatttctcaattgataagtccatcatcttctcattgtgtttgcaggatatgtggcagtgtgatctttgcggcaccaagtctggaaagggatttggtaagttagttgcaaatttcattcttgtgtgtacttatatatctgtgccttcacttgagcacaatgaagcaacttacacatgctaattggtctctttttattgtttataactattaagtcaaaatagtagctaactgtcacttctcgtgttaatccgcagaggcaacgtttgatgtgcttgccagactaattgaaatcaaatttgcaagtggtattattgatgagctgttatatctggatcaccctcgagaaaacagatttcccaatggactgatgatgttagaatatagaaaagcagttcaggaaactgtacacgagcagtttcgtgttgtccgtgagggccatcttcgcatcatattttctcaagatttgaaggtatctagaacaattctctggttccaaattgtgtaaagcgatgaaaaaatcaggcaccagtatgctaatgcttagttaatcttgactttgcttctatctagatactttcttgggagttttgcgctcggcgtcatgaagagcttcttcttcgcagacttattgctccacaggtattctaatggcacgacccttgcgtttattaattggaacttaagactttacataaaatgtttgtggtcaactgtatgactttgtttccttaaacccttgttatgaaattgaggatagctaatacccggtttctgtgtagcttatcttctggtttcctatgaatagagcacaaagtctgttattttacttcagaacagatgtttacagatgctgcaacggtgctaagaagtgtactaaaatcttatttattggtcatgcaggtgaaccaattgcttcaggttgcacagaaatgccagagcacgatctcagagagtgggtcagagggggtttctcagcaggatttacagtcaaatagtaacatgtaagttaatgcacattattcttttattgtcgatactctggcatttgtttctagtgctttttatcattgctgggtgccattttgtgtatcagggtcttgggagcaggacggcaactggcaaagttcatggaactacagtcgctgaatgatcttggctatccaaaaagatatatcaggactctgcaggtattcctttgctcctttccttactgttactgttgtatatgaagtcgtaagaagtcctaatattgaggcatgcgagtgacagatatctgaagttgtcaagagcatgaaggatctgatgaatttcactggcgagcaaaaaatcggtcctattggtaagtatacaatttccatccacaatattcttcttgaatgagatccaaaaccaggtttcccctctggtgcaccttttacttgaaatatgtactggtcgttgtaactctcctggtgaaaatgttctgactgaatctgaatgttatgatacctgcttatgtcatttatgtagaggggttgaaacggcttttggaacagacggtgacagtgaagctacagaaacagaaaatgcaagagatggagcagtttgggaataatggagctataaatgggccagttcaagctcaaatggtgttaacttcaggaacgatgaatggctcaacgggcaataacaccaataatcaccatcaaattgttggtcgtggagctatgagtgggccagctgaaggtcaaatggtgatatcttcaggaacggtgagcggcgcaactgccaacaacaactccaataatcacaatcaaattgttggtcgtggagctatgaatggctctgctcaagccgcagcagctctgaccaactaccaaagcatgcttatgaggcaaaatgctatgaataacccaaactcaaatacgggtaaacaagaggggttctcgagtcagaacccaaccccaaactcaaaccagagtccatcttcttcatcccagcagaggcataacttagttacaggtggatttcccaactctcctcaaatgcaacagcagcagcgcaccatgaatggccctaccaacatacttccgcagaatcatcctcatcagttacaatcaccacattcacatggtaacactccggagcagcagatgcttcatcagctgttgcaggagatgtctgaaaatggagggagtgtgcaacagcaacaagccttttcgggtcaaagtggtagcaacagtaacgcagagagaaacacaactgcctctacttccaacatctcaggaggaggccgagctccaagtcgaaacaacagttttaaagcagcctcgaacaacaaccttcatttttcagaagatatatcgatcacagaccatgatttctcagaagatggcttcttcaacaacaatgatatctatggtggcttgtaatattcccacagaacgcaggcattgttactttgacttaacacagtgaaagagaatttagggcttatttttctcatttaggttggtctttgtatagaaaccaaagagatatgaggccggccaatgaaggaatttgtgatttgttgtaacttatctataggaacttttaagcatcttcatttccccttttagagatagtaagattaaatcttagataacttctgcagacactttcaagtaatcttatttagttttatgcttttactttgataacagtttgtttatataaaggcttcttgagtcactccttttacggtttgcacatagtaataatactatggtctcgatttagctttgaaaccaaatgatttagcagatactggattaaaagacttgtaccaaaaaatttgcgaataaccaaagtaaaactctttggttttgttgatttgacgttatggatatcaaaatataaggaatctcttttgaacacacaatggtaagtagatatgcaaatatagaactcagattaagatgtttactggcatatatcagagggttcatttttttgttaaagataagaaaacaaaacatacaagtaagatgcttaaggaaaaatgtaaacaaatattactatttgaaatccgttaaaggatgagcaacttaagatgcttttctattaacagatcgttatcaaagtaaaagcaaaaacaaagaatatgattacttcatagtgtgttagcagaaatcataatctaagatttcaccccactatcactaaaagggcagagaaacaaaaaacaaaaacaaaaatctagtgtctatgggtcggtagaccgtaggttacagcaaatcacaaactcctttggtctctcatatcactgaggtttctatacaaagatgaaagaccaaaccaacctaaatgagaacaataagcctacactctctttcactgtgttagtcaaagtaccaatgcatctgttgtttggatattacaagccaccatagatatcactgttgttgaagaagccatcttctgagaaatcatggtccgtaaccgatatatcttctgaaaaaggaaggttgttgtttgaagatgctttaaaactattgatgcggcttggaactcggcctcctcctgagatattggaagtagaggcagttgtgtttctctcggtgttattattgctaccactttgacccggaaaggcctgttgctgttccacactcgctccattttcagtcatctcctgcaacagctgatgaagcatctgctgctcctgagtgttaccatgtgaatgtggcgattgcaactgatgaggatgattctgcggaagcatgttgggagtgccattcaggatgtgctgctgctgttgcatttgaggagagctgggaaatccacttgtagctaagttctccctctgctgcgatgaagaagatggactctggtttgagttcagcgttgggttctgactcgagaacccctcttggttgcccgtatttgagttttggttattcatagcattttgccttataagcatgctttggtagttggtcagagctgctgtggcttgaggtgacccattcatagctccacgaccaacaatttgatggtgattattggagttgttgttggcagttgaaccgctcatcgttcctgaagataaagtcatttgagcttgagctggcccactcattgctccactattcccaaactgctccatctcttgcattttctgtctctgaagcttcactgtcgccgtctgttccagaagctgttttaacccctctgcataagggacataagtaggcttcaaaaggttaatcatatcaaatacaaagcctttaaatcggagagttacagaaatcctacaccagaggggcaacctcgttttgggtctcattcaagaagaatgttgtagatgggaattctagacttaccgagagggccgactttgtgctcgccagtgaaattcatcagatccttcatgctcttgactacttcagatatctgtcactcgcaacgagttactctatcatgacttccaaaggctacagatacaaaagtaacaacaaggaaaggagctaatgagtacctgtagagttctgatatatctttttggatagccaagatcattgagcgactgtaattccatgaactttgccagctgcctccctgctcccaagaccctgacacataaattagcaccggaaatgatatagagcactagagacaaaagccagaacatatacaaataaaagaatagttggcatccaccaaattggatgtacaaaggtaaatttagtgttagggattaacttacatgttactgtttgactgtatatcctgctgagaaactccctgtgaaccactctcagaaatcgtgctctggcatttctgagcaacctgaagcaactggttcacctgcataaccaataataagttttcaatacacttcccaaaaccattgcagcatatgtctgttctgaagtagatttacaaactatttgctctaattcatacagactgtttagggaaatagtcacaaacggtttcataaattctgagatatcctcatttcataagggtttaaggaaacagatttatacagttgaccacaaacggtttttgtaaaatcttatgctcctaatagttaacgcaagggctacgcaattagaataggacctgcggagcaataagcctgcgaagaagaagctcttcatgacgccgagcacaaaactcccaagacagtatctagaaagaaacacagtcaagattaggtaagcattagcacactggtgattgctagatattttcggtaaataggcagggcaaaagaaaattggaagaaagtcacacatttttaaccagggaatttttctagataccttcagatctggagagaatatgatacgaagatggccctcacgaacaacacgaaactgctcgtgtacagtttcctgaactgcttttctatattctagcatcatcagtccattgggaaatctgttttctcgtgggtggtcaagatataagagctcatcaatgatgccacttgcaaattttatttcaataagtctggctagcacatcaaaagtagcctctgcggaacgaaaagatgacactttagctactattttgacggaagactttttaatacgattatcaaagttttaaacaataaagagagagcaattagcatgtgtaagctgcttcattgtgctcaagtaaaggcacagaaatacaagtaaaaacaagaaatttgcaactatcttaccaaatccctttccagacttagtgccgcaaagatcacactgccacatatcctataaacagaatgagaagatgatgaacttattcattaaaaaatcagtgaagtgaaattcataaatagtacaggtggagtaaagatgtgtatagctaaagatatgctgatgcagaacacagatatcataacagaccaaaacacacagagcaaagacgatactgaccggagctgcctgtggaaacatgccaagggcatggtgcccaacactttcgtactgtgacaagcacaacctctgctttgcacgaggtgaaagtattctgccacaaatttcctccaataagtaatgcaattttcctacagaaaaggtatcagtgatgggagaacttgaatagatgtgataaaataactagaagtccataggttagtattagcttacagcaggccgttgctgcagatgatacaagtacatcatcaatttccgagcacagacgccaacttcataaggacgtacattaggagaaatctgttgggttccttgttgctgtaactgctgtctcagctgctgctgtttctgaagttggagtctctgagagggtgacatggattgaagcatctgctgatgttgcctcactctctgctgctgaagcaaagcttgcatctgcggatttcttcccgtggggtcctggcgctggatcaactgctgtaaaatctgctgctgcaacaagtcttcttgcttcacttctaatctcagtttcttatctacatgggaataactgttttccctcattggaactgaaccttgtcctgcttgctgttctagtagttgccgctgctgctgctgaggtaagtgttgcattgaaggagatccatcaagaaccattgatccaggcaggttaatgccattcgaagagaaagacattggcgaagtcgggatatgcagattattgatgccactgctcctctgcatatatacagcttcggaaccaagagcatcagtcaatgagaaactcgattcgatagctccaggagagcatacagagatcaagacgtccaatacaaggacggattcagaggaatgaaaagcttgactctttaaagcgtcctctcagaatctctgacccaaataacaaagccaaacggattctagctatgattaatcattcaggatccaagtattacgaagatttagctgaaggaaatgaaaaccaaatcagaagacgaaaaggcgaatttttcataacactcgaaagccctatactatcagacgagcatatctcaaagggtaaaacttaccaacaaaagactaaaacttcaaatccaatgggcaactcaaatcaaaacccagaaagtttcaaccaagtagactctctcgacttgcacgaatcccaacgatcagaaaattggagaaacccagtagacaaagagatcattaaactctacagcagcattttacttggtaacaaatatactaaagcagacgaccaatgtaggcagaactataagtctatttgtagccaatatttatatttgagtcaaaggttagggactagttcgaacgttgacaagaggcgtttagagtagtttttagacccaattaagtcaatagaaccgttcttgccttccataatttcggcgtaccatttaagttacttaacgatgcgttcgattttgtcactctcaaggtgtttcgatgcaagatgttttgaggttcgcatcttattgtcacgggaaagcattacatgattggggttcaaactgagaggtgataaaaaaaaacggaaatgtagtaacttgacataagtttttcaatccgacaataaaagtgatccgagttcgaatctatcaaaaaccaaacgacaaaaactaatcacgacgacatagcgttgttgactacaaacagttacaacatcctactttgatagagattgtggatccactcttatcactcgtcagctggtggcgaacgaggagaccggctgcaacaacaagagaaatggtttacgattcatgtcatcaataatatataaacaagtatcgacctatttcagaatctaacctcttctgcattgggctctctgcaccatcatacccaccatcactgtctcttcttcctattgacccagggctttcaacttggccattctcggggctagacctcgatctctctctcctttcaatgggactttcaacttcaccaaccccatttctcggactctccttcttgaacgggctgtgattagggctcatcctctctctcttgttgttgggactgcggctgtacttagtagggcttgcgactctctccctcctgcgagggctatcattgcctctgcggtcacgaccatactcgggactgccacgtcttgatttcttgtaaggacttgggctacgtcttcgaccatagtcaggactggtcctttcctttctgtaggcagcaacaggactagctcctcggccataatcagggcttcctctttctcttttgtaaggactaggtgatcgccttctcctttcaggtgacctatcacggcgtctttcaggactgtgtccatttcctctagcatcatcatccttcacagcatactccaccgagatcaccttatccatcagcttactgaatgaaaacacagatgaaacgtgagtctaagaaaggaaagtgattagatactaaaatggacagaacaaacctgttatttgaagcatccaatgctctggtggcatcctcttgtgcctcgtactggataaatgcaaaattcctcctgatcctaacgtttacgatctttccatacggctcaaagtgtttctctagatcccgggtcctagtattatccgcatcaaagttaatcacaaagagagtcttggaaggtctcatgctggatgaggatctccttgaaccaccaccagatcttttatcacctccacgttcactctatatacacagaaccatttatgttatcagtatttcaaacctcataactaagtctggaaagaaataaatcctggggtaagtatcctacctttgtccattcaacacgaagtctgcgtcccttacgcccaaattcaaagcggtcaagtgctcggatggcatcttccgcatccctttcatcttccatgtatacaaaagcaaaccctggagaaaaaagaaaaagccaaaagcaaagatctgagtacattaacagtgaggaagtggaccagattaagaaccttcaacatacacgaacactgtcctccctccttcaacgcctaacttaactcctagaacatattaaattttgaacattcctagaaccttaaaaaaactccaaatgaccagtgaagcagttacagaccttgcattatggaattaatatgtcaaggaacaactgaaaatgtggaagtcagacggggatatgaatgaaaatagagagccttctccattgcagaggcatgtccaagtgtgcaaagtgatgaggaatgaaatgcaattaagatggcagtgctaatgcggatggaaagtgactgattttgagggataagagatggatttccctatggtccattcatggccaggtgtgagtataggcgtcccaagattatcaaacacatcctgcgtcaaagaaaatgcggttttacactaattttttttctaaaaatcttattcctctgaagtactttccaaagttcaagcaggctgcatcaggtggccaggtgaatgtggtcaatgtttagtactccttccaaagggagatagtccaccagagccttctcgtggatggaatgaagacgagagtggatttcatgaaatgcatttgaatttcgctttttcattgtacttagtggataacaatactgcttattataattcattcaggttaaccacaaagacagagtagtaagaggcagaagaaagaaagaaagaaaaaaaaggctcaccagctttcatatcaaccctctcaaccttgccgtatttcctgaatagtcgttccaggtcaccttcgcgcgcatcatactcaaagttcccacagaagactggcttcatgcttcctgtatagacaaccacaatagtaaaaaagattcatgagacttccttaaatgataatttaaacacgaatatcacaactaatttgtcaccaagatgaaaacttttaacactaaaaactagagccctcacactaaatcgaattgttttgcagtaaattaggacttgaaactcatctattcgagctccaaatcagttaaatctaggaactgaactagacagtattagaatcaaaagtacaatgcaacagatctaatctaactacagttagatctgaatatcattcacaagatagagaaaacgagaacaatccacgaaagcatgaatctttcataccagaaaaacaaagaaggctctgatgagattcaacttataaaaaacgagatggaccaattctcttgttctacttttcaccaaccaaaaaaaaaagaaggaagaaggagatgagaaccacgacgatatagagagtgaataaactgcatcaatttacctgtagaatgattttggcaggcgtagtcgcgtggaagccctagaagaagaagaagctcgcgtcgagagataggtgaaactgaaaacagagttaggtacgatttagataaagaaggcaagagagatcatttggatttttattttattttcttttctttttagtttcaaagatatttttttcagaacacattttgactttcttattttgtctgaaggacgagaagtcgagaacgtctactttttaggagtattgggcctatatgttaaacaaattataagaagcccaacaagtaaacaaaattgaagctgctttctaaaaaaacaaaacaataacagattatgaagacaaacaaatattagattttttaattttgattagaatatactgattaatagaactagaacatgtatcacataacatctacacaatgaataatgcatacaagtttttaaaaagtcttgcaacttaacactctcaagatcccacatgtcaagttttggattcgatgaaacatatgagtttgttagtaagtttaataattgttgttataaagaaatgtgtatatttatatattacaattaattaaataaattgttttcctcttcattggattgcttcacttatgttaagagtttagtagttgctttcaaggccgaatgatatgtggccacgaacatatcatcacacgtggaatgagaacgagtttcgacttttcaaatatgccataaagcctcaattatcttcttatctcgcttgaatatgcaacaaaaagctattaagatattcataaaatagaggcgtctcaaatctaccaacaaaaagctacaaaagatccagtccaatccactgaagaatcccaaaacagagtagaaacccaaacaacccgattcagcaaataattcaaaaacgaacgtccgtacgattttccaaaaacagaaagatgggttccacaagataatgcgtggggacgtcaaaatcctctaaacccgtggttcggccgcggaaacactgtccctaccttccccaccagccttcactggccccatacgtcactctcaagctttactttctattttccactaaagccaattttgttgttttcttcaccttaccactctttttttccctctttgttgtgtcttcttttctcctaaatgtcaataacgtgagagcgagaggtaacgagagagatatttttgtcagcgaatatatttcatgcatatcttattgtgaagattttttataccttttttttgtcaatacaatatagctattattgagattgagatattttgtgggaattattgggattcaagataacttgctattttgtattggtctaatccttcgcttagtcctgtcctggtccatttacatgtttttggttatagtttgtttaaactgaataattttgttcatcatatgcatttatgactcatttttaaccgtccatcgaaattgataattatccattaccaaatctgattaatttttttaaaaaatcaagcttttctatattgtagtattatttttggttaaatattaggacatctacttccaatacaaatactacatgagtatttaaaatatcatttcacagagatatttatgtctattatgttatagacgggtgacaattaatgacaatttgtttattcataggaatttaaaaacgattgtaacaacagcagccagccaaccacacaggcacacactcgatagaatttaaagaactcataaaggttaacgagtgaagagtcaaaagtctctttacaagggtcaaaggacacacgtcagacagcgagtggaacatcgtgggattgcttcgctatgtactatacacgtgtcattcacagagacaaaaactccgtgtgctccccacatatccgttatctctcctccggccaatataaacaccaattctcactctcactttttatactaactacacacttgaaaaagaatctacctgaaaagaaaaaaaagagagagagatataaatagctttaccaagacagatatactatcttttattaatccaaaaagactgagaactctagtaactacgtactacttaaaccttatccagtttcttgaaacagagtactctgatcaatgaactcattttcagctttttctgaaatgtttggctccgattacgagcctcaaggcggagattattgtccgacgttggccacgagttgtccgaagaaaccggcgggccgtaagaagtttcgtgagactcgtcacccaatttacagaggagttcgtcaaagaaactccggtaagtgggtttctgaagtgagagagccaaacaagaaaaccaggatttggctcgggactttccaaaccgctgagatggcagctcgtgctcacgacgtcgctgcattagccctccgtggccgatcagcatgtctcaacttcgctgactcggcttggcggctacgaatcccggagtcaacatgcgccaaggatatccaaaaagcggctgctgaagcggcgttggcttttcaagatgagacgtgtgatacgacgaccacgaatcatggcctggacatggaggagacgatggtggaagctatttatacaccggaacagagcgaaggtgcgttttatatggatgaggagacaatgtttgggatgccgactttgttggataatatggctgaaggcatgcttttaccgccgccgtctgttcaatggaatcataattatgacggcgaaggagatggtgacgtgtcgctttggagttactaatattcgatagtcgtttccatttttgtactatagtttgaaaatattctagttcctttttttagaatggttccttcattttattttattttattgttgtagaaacgagtggaaaataattcaatacaaaacaaatcgttttctacttctttgcttcacataagttaaaagtcaaatatttaacaaaaaagatattaaaagtcatattgtagttgctttcaaggcaaaatatgtggacagatcattacacgtggatgatgtttgtaaatatgccacaaaacctgcattacattattttattctatctcatgtaagttacagatcttacaatttagcaacagaaagccacaaaatattacataaattggctcgtctcgaatctagcaaccaaaaaaattcagcccagttcactataaagaatataaaaaaaagtttcctaaaatagtgtataaaaccgaaacaaactaattcaacaaacccgaaataaacaaatccgtacgacaaccaaaaatatctttcagatgggttccacaagataacccagtgccaatcagaattctgaaagcgtggctcgaccgcggaaaccattgtccataccttctcttctttgtccccccttacgtggctcgctgtggagtctcgtaccacgtgtcgcgtcacttcactctttactttctattttccactaaaatcataatttgtctttttcttgaccatacccactcttttttcttctcgttgtcgtcttgcttctcctaaatatctcaaataacgtgagagacttgagtgtgagaggtaggtaacgaggcagactttttttggaagcgaatataacttatgctgatattttatttagctttctgattggagttgagatattatataggtattattgagatattatatacgtattattgagatttgagatattttgtagattttatagttctatcggactaattcttggcttaatccactaacatgtttttgtttagttaattaaactgattattttctgcgctatagttttgttaaacaccttttagacgtaacaaagcaattacgcttgatcatccatcgtagactctttttctttttttacatctcatagaagttttgtttaaacacagcaggaagtaaattattttcttattacgtacgtatgattgtttttagactattttagtactttgagaagtaaaattggggatacgagataaaagacaattgattaacatgctttttattttgacttccgaaactaatcatggttgtctatgtttataaattgtgttctttttgttgaaaaactcagataatgattaaatcagtagcgaatggatggagaacacatgattttagattgcataccgtaaaacaaaaaaaatcatgatggatgtagaacattcaaatgggtcaaataaatacgtatgtgatcaaaagaaagtatgtgatcaaaagggttagcacgagtaccttgggaggaaattcttctaattatgaattatgcaagaattttcgtcaagggaaggtggggaagaggtagctaaagaatagagaatcatatgactaaggacgtggtggttgaaggaaatgagagaatacatgaagaagagaaacttctttgagtgagaaggaagtgcgctggctggagagaaaagagagaaaagagtttcgagtgagagagagggcgttgagattgtgatcaacttaatgtaatatgttcttttattacattttctttttgtcatatactcaaaccttttactattttgtctcataaatctaacacaccccaccatttgttaatgcatgatggtagaaaatattaaatataattaactacttttatgtgatcaaaattaggtttcagactcgtttcgcgatccgatctacaattacaactgcatgcttctaattgatctaaattctaaattttttatacatattaaaaaaacaactttttgttaaattctcaatcatcatttttgtgattaacaattttttataactctaaaccaataatatttgattatttattttatatgtataatgatgattgagaattttaattagcagtctatttagggttttcctaaagttacaatatgttgttacccttctagttaaattttccaaaataccatatttcataacttttcaaactgtttattaattcaaccgtaaaaagcactaaaatgttacatttgatcattcacccaaattaaattcaaaagtttttccgccaaaactacttggtgacttacgtgcttatatacggacgactattattatgttctatacttttttatactttgttgcacaaatatctactctcccaattcatattctagaaggatgtgctataagaatgggagaaattacacaagaagagcatctttaaatatcctctcacaatctttatgtctaatacacgggtgaacaattaacgacaatttctttattcaggaatataataatgaataacggttaccctacacctagtacactaaatccttaacagccacacattcatacgcaaagagtttataaaactcataaaggtataataataacgagtgaataagtcaaaaaaagtcttctctggacacatggcagatcttaatgagtgaatccttaaactactcattttacaattgcttcgctgtgtatagtttacgtggcattaccagagacacaaactccgtcttcgccttttcttttgcctctaaaatatcttccgccattataaaacagcatgctctcactccaacttttatttatctacaaacattaaatccacctgaactagaacagaaagagagagaaactattatttcagcaaaccataccaacaaaaaagacagagatcttttagttaccttatccagtttcttgaaacagagtactcttctgatcaatgaactcattttctgctttttctgaaatgtttggctccgattacgagtcttcggtttcctcaggcggtgattatattccgacgcttgcgagcagctgccccaagaaaccggcgggtcgtaagaagtttcgtgagactcgtcacccaatatacagaggagttcgtcggagaaactccggtaagtgggtttgtgaggttagagaaccaaacaagaaaacaaggatttggctcggaacatttcaaaccgctgagatggcagctcgagctcacgacgttgccgctttagcccttcgtggccgatcagcctgtctcaatttcgctgactcggcttggagactccgaatcccggaatcaacttgcgctaaggacatccaaaaggcggcggctgaagctgcgttggcgtttcaggatgagatgtgtgatgcgacgacggatcatggcttcgacatggaggagacgttggtggaggctatttacacggcggaacagagcgaaaatgcgttttatatgcacgatgaggcgatgtttgagatgccgagtttgttggctaatatggcagaagggatgcttttgccgcttccgtccgtacagtggaatcataatcatgaagtcgacggcgatgatgacgacgtatcgttatggagttattaaaactcagattattatttccatttttagtacgatactttttattttattattatttttagatccttttttagaatggaatcttcattatgtttgtaaaactgagaaacgagtgtaaattaaattgattcagtttcagtataagtgtgggctattcttaaatgcaagtatttttagagcagtaacaaaaaaatgttgtttaaattagagtataaaaccgaaacaaccgattcagcaaaacctccaataatagaccgtacaccataaacagaaatatgggtcccacaagagagcactgtccgtagcttccccttcattggccctctacgtggctcctcttgtaaccaatgtcatgtcattttcaagttttactttctttttttatactaatatcttgtttgtcgttttctgtaccttaaggtcctaaaccactttctttcgcgcaccattccttgtcgtattatttctccgaatatgtcaataccgtgagacgacaattgatagcgagaggtagcgagagagagaaacgttcgttgtgaagatattttattgctgttgttgagatttgagatattttatagctattattggaatttgaaagtgatgtataacttgctactatatcggtctaatccttggcttaaaccagtttttatttagtaattttatgctcctgtattattattcggtggagtatttttttctcaaaaaatatatgagtcgagtttaagaaatatataagcgaaaaaacaaaaaaaatatatataagcggggttaatagatcaaccacaatcaatttaatttggactttagaattaataaaattgtttacttcgtaattattattatttttgttgttctggcaaatctgataatccagattattattagacaagtagcgaagggacggtgaacatttatgattttaatttgtatgttgtaaggaaaacaaaacaaataagttctgtaaaaaaggtttacctttctactttgccggaaaactcaactcacggtggcgtccggcgagttttcagaccaaaaagaaggttggaagaaatgaagatgaagaggagaggacaaaagatagagatggtggttgaacaaaagaagagtaaagaggacgaagacgctctaagtctaagccaagggggagaagaagagaagaggtatgaggaggaaccatacttttgttagagagatgctggaaattgtgatcaactacatgcaaaatgtcttttcgcctaaccacttaccatatttgatattttccttttgccaaattacacaaaccctatcttgtctctcacatatatatccaattaatacacccctgccacttgttaattctcgaccatgtatgtatacttatgtaaagaatatccaaaagctttctttttgttccttcgattttaagcaacttgtgttctcatttctcaatatcttaaagaaatcctgagtaaaaaagtttatagcctccgtgaatcttaggaaattactctagcatattcaaattttttgaaacaatatataaatttttctgaataattaaatttacatatctatgctacgaaacttgattaattaaatcaaatatatatatatatatataataataataataataatataacattttttttaggacacaaatatctaatctcactatactctagaagtatttgcaatgcacgatatgtgaatggagaaaagacagaaagagcatttgaaaatatctcgtttcacggatcattatgtctaattattttaccatagaaaagcgacaattataaacaatttgttattcgtggaaaaataatatttaataatggttgtcgtaccctataaactacagccacacattcatacaataagaagttaaaaaaattcataccctaaaggcatcaaccagtgaagggtcagaaacttcccaagatgggtcaaaggacacatgtcagattctcagtgattgacagccttgataattacaaaaccgtgggatcgcttagctgtttcttatccacgtggcattcacagagacagaaactccgcgttcgaccccacaaatatccaaatatcttccggccaatataaacagcaagctctcactccaacatttctataacttcaaacacttacctgaattagaaaagaaagatagatagagaaataaatattttatcataccatacaaaaaaagacagagatcttctacttactctactctcataaaccttatccagtttcttgaaacagagtactcttctgatcaatgaactcattttctgccttttctgaaatgtttggctccgattacgagtctccggtttcctcaggcggtgattacagtccgaagcttgccacgagctgccccaagaaaccagcgggaaggaagaagtttcgtgagactcgtcacccaatttacagaggagttcgtcaaagaaactccggtaagtgggtgtgtgagttgagagagccaaacaagaaaacgaggatttggctcgggactttccaaaccgctgagatggcagctcgtgctcacgacgtcgccgccatagctctccgtggcagatctgcctgtctcaatttcgctgactcggcttggcggctacgaatcccggaatcaacctgtgccaaggaaatccaaaaggcggcggctgaagccgcgttgaattttcaagatgagatgtgtcatatgacgacggatgctcatggtcttgacatggaggagaccttggtggaggctatttatacgccggaacagagccaagatgcgttttatatggatgaagaggcgatgttggggatgtctagtttgttggataacatggccgaagggatgcttttaccgtcgccgtcggttcaatggaactataattttgatgtcgagggagatgatgacgtgtccttatggagctattaaaattcgatttttatttccatttttggtattatagctttttatacatttgatccttttttagaatggatcttcttctttttttggttgtgagaaacgaatgtaaatggtaaaagttgttgtcaaatgcaaatgtttttgagtgcagaatatataatctttggtctccccataagcaacaaatcaaaatataatactattacgtaattcagtgaattgaaaacaaaaagtttgggctcacctgtaaaattaaagttagatgattctggcatttccgtgtctaagaaaagttctaggcacttatgtaaatagcaaaagttccaggttggttgatagcaacagtttctgcctttctgctaattcagcaaatatcaagactcaaggacgtttggtaaatatccaaagttccgtgagtttttgtaaatatgataaattataggcactatatagatatctaacgtttcaaaaaatgtttgaccccaaaaaaaaaaaaaagggtttcaaaaaatgtctgcaaataaaaaaaaaaggatgcggagacacttttaatttagtcaaagctttaggcagtaatgtaactgagaaacgatcctatgtaaatagcaaaagatacaaaaaaaaaataaaaaaaaaaaaatagcaaaagatacaagatagtgatagtgtataagtagtatcaagagatttatatacagtatttatggaaataacaaatgtttcgagattgtaaagagaaaatgatccatatagtaaaaatctacgggatattttattggtgagtagcagtaaaatccgaacacttgtatatagcaagatacctacccggcaaagcacttcacataagtttcgggtacttcgttgaatatcaaaagatctaaggcagtaaggctctttggtaaatagaaagttgggtaacgctttggtaaataaaattttgggtaacttgggttatattcttctttgaatagcaaaagaagaagtgagcaactggggtaagtagtacagttttgatgatagcaaaagttccaagtgctatttggatttctcaattaggagacatgatgatcaattttgatgacagctaaagtttgcatcgagtccataacccaagaagaactttcacgtaaaccttttcttttggaaaagaaaaaagtgtaactatcatgatttttgtttttctttgttttgatgacaagtatttctcctcgtgaaatcagttttttttttcttttaatgaatataaagaataaatcagattattgagattcacaaaaatccatcatcgcaagttcttacgtattcgaaagacgttactacggttactaacttactgtatatgtatgtgatgtcgaaaaagaagaagagaagacgttacgtcactacttgtatgttcatcgatcagtccacgtggctttttgtaaggtccgagagaggaaagtgaaattcagacgccgcttttttttttttggatgaagttccaaaattagccattttatacagtggttaagctcgttggaccaatatcaatggcgtctgcaacgactcttctcttccaccacggttccactcgagtcctcgtcgctcgtagacggtgccaagcttcagtccttagaccctacggcggtttaaagccctttctttccttctgcagcttacctaactccactgcgccgttccgggattcgttgagagcaaaatccgatggattggctcgggcctatgttaccggagcgccgcctatcgtggaagaaccagacccaaagattgaagaatccaaatctgaggctgaatcgaaggatttaattagttgggggcttctgtggagcttgatgagcaagcacaagctcaggctcagtgtttgcttattgactctccttggatgcagtacttgcactctctctatgcctgttttttctggtaatcggttcttcaatccactctcccaccattagcaaattgtaactgtactctttttttctctttgggtttgatgtagtttaagtttgggtatgatgatttagcttgtcatctgtgtttctctttatcttggtgaagctgttttataatggtaagtgttattgttttgagtaaaggtagattctttgaagtactgattggggtgagaccggagcctttgtggcggctgctgagcaaaattgctgttttgtactcgttggaacccatctttactattgcttttgtgaccaacatgactgctatctgggaaaacgttatggcaatattaagagctcagattttcagaagggttttgatccagaaggtatgttttgtttagtatgatcaaagttcgcttaagctatattgttggctgtattgaaatatcattgatgggtttcttttttttgtcttttatatattcaggcagagttcttcgacaaatacaaggtctgttccttttattcttggtttgctcaggtttgagacattttggcacaaaccttccttatgttagattgagttcatttgttttaggttggagagctaacggggctactcacgtctgatcttggtgctctgaatagcattgtgaatgataacatctcacgagatcgtggatttagggcatttacagaggcaagccatttctttactatgcaaatgtgagatttttgtgtttgtacatacatttttcataatgaatacagatttaatcttagcctggtgttggtgtctgctgttatttttggagttctataaatgacaaagactatcctgttgcatctcaagaatgcccagttctcatggcttatgcgttatcccttttgtaggtttttggaacaatatgtatcctatttactctatctcctcaacttgcacctgtacttggtctattgatgctagctgtgtcagttctagttggtaaattctctatgtctttttcattctcctaaactttttatttttggtaattactttggtcatctttgcttactttgcttacctctacatctactccctcggtcaaatctcaaaagctgtgtacaagagatcgactgttcctgtttataaatcgcatggattagctcaagcaacaatgtctgattgtgtatcagaaacgttctctgcaatccgaactgtaagttcttgacttcatcgtatttgtatcttttagggcagattaaattatctgaagaaactttgatttacccttgaagactcaagtaatttgtatctctttataggtaagatcattcagcggcgaaaaacgtcagatgtctatcttcggtagtcaggtcatatttcagacttcttactagctaaaactgatttcttctaaacaattgttcttttttctaactgatccataatctattaatctaaacttttgtttgatgtacagattcttgcttacaagcttagcggcttaaagcttggtactttcaagtctataaatgaatctataacaagagttgctgtttatatttctctgttggctctttactgtcttgggggaagcaaggtgaagacggtaagatatacctgcctgtaagacttgttgattgccattatgatcattcaagttgaaattatgcttcttgccccctaaaacataaagagaatcgtgtttttatgaatttctattgcagaagatagtgttactcgttgtttatactttctggaacaaatgactggatgtttctagctagaatcaagttactaccttctgaatttttaaataaaaaaaaactaagaatcaaatttctctgtatctctcttttgtgtagtttcttatgttgttacattttagctcttttgcactttatttttcttggttcttattcttaaaatttctccaacccagggtgagctcgctgttggaacagttgtttcgttcattggatacacattcactctaacatttgctgtaagtacctctgtctacacatcatttactgtcacacatatgctatacatgtaatttagtttaccataaccagtgattctgttatccaggtccaagggcttgtaaacacgtttggagatctacgtgggacttttgctgctattgacaggatcaattccattttaaacgcggtggacatagatgaggctcttgcctacgggttagaaagagatatacatacaaagaaagtccaagatgaaaaccttaaattgttcttgtctgctggcccaaatgtgaatatccgtcacctcgataagtactacatgtcaaatctgaaatcaactaacaatctacgtaccctaacatgggctggagatgtctgtcttgatggtaaaatcagaccaagaaaaactctcttcatcatatcttactacagctttttacctttttcatatctgtttttcttttccatgttctattttgtctagtgtagatgtgcattttgcttatcctctacgacccgacgtgaaagttcttgatgggctgagtttgacgttgaattctggtactgtaactgctcttgttggctctagtggtgcgggaaaaagtactattgtacagttattggcacgcttctatgaggttaatctaccctcctcttccaatttgaagtttaatatctgttgagactatgtttactgccacttttacattatgctgatatgttgaattttcaattcttgcagccaacacaaggacgtattactgtgggtggagaagatgtgaggatgtttgacaagagtgaatgggctaaggttgtctcaattgtgaatcaggtgtgtatacgtaacatctatgtgtcaggcatggttggatcatttcttctcttcttcttcaaaggttatctttctgtgtgattcaggaaccggttctcttttctctctccgtggccgagaatattgcatatggtctccccaatgagcatgtgtccaaggacgacatcattaaggcagccaaagctgccaacgctcatgattttataatctcacttcctcaggttcagattcgtgtgccttatactttcctgtttcttcctggcaattgcacatcaattcttgtgagcaataccggtgtttgtttatagggatacgatacactggttggtgaaagaggaggcttgcttagcggaggacaacgacaggtatagaaacattatgagctacatgtttttgatttctgatagacttttgcaactgctttgatgtgcttgtttatcaatgtgttagagagttgccatagcccgatctctgctgaagaatgcccccatcttgattctcgatgaggtgagagactcttattttaataatctcgcctttgatgaactgtctgctttgctagaacctttacctaagtaatagcatatcaaacaagaacacaaacagttagtatgagacatctctgcttagtctctctcttgcttactttgttgcaggccacaagtgcgctggatgcagtgagcgagcggttagtccagagtgcgttgaaccgtctgatgaaagacaggacaacattagtcatcgctcacagactgagcacagttcagagcgcgaatcagatcgctgtgtgctctgatgggaagatcatagagcttggaacacattccgaattggtagcgcaaaagggatcatatgcttcacttgttggcactcagagactagcctttgagtaatttaccttaactcggtgtaatttgtaacaaattactacaaaattacaaatggtagaatctggttttatatacaactttgattaacaatagtttatagacagatcaaattttcaaaaatttatagtaaaacaagaagaaattaaacgaccattgatgtgaagctgacgtggagggatcttcacttatgttttcttcaagaatgatccgaagattaaaaaaaaccgaagccgcttgacatcttcttccaattttgatttatcaaagaaaactcctttgtgagagattatttatgtactcttgattcagagaggtaaattctgttaggggttcgttcgattttcgcgcttgtttttgtttacttatgatcggatttggtattttgaacagtaatgatccattcgacgtttacaggataatccaattccgagttttctgagtcgtaatttagagagaatccaattcgatggatttagatatgaacggaggaaacaagagagtctttcaaagactgggcggtggctctaatcggccgacgacggactcaaatcagaaggtttgtttccactggcgagctggccggtgcaatcgttacccatgcccttacctgcatagagaattgccgggtccgggttcgggtccagtagcagcttcttcaaataaaagggtcgctgatgaatctgggtttgcgggtccgagtcaccggagagggcctgggttcagcgggactgctaataactggggaagatttggtgggaacagaacggtgaccaagacggagaaactttgcaaattctgggttgatggaaattgcccttatggtgataaatgtagatacttgcattgctggagcaaaggagatagtttctccttgttgacgcagcttgacgggcatcagaaggtatcttgttgttgagtgtccttataagtgatgctggattcttgtgcttgttggcgatgttgatagttttttttttttttggttctgatttctcgagtaggttgttactgggattgctctgccttcaggatcagataagctttacacggcgagtaaagatgaaactgtgcgaatatgggattgtgcttctggacaggttttgatttgcctctgataattatttcttttattgttgtttgattgagtttcgctccatatttagtttagctattgagtttaaaacatcattttgatatggctggttgtttggactactttataggcgtacttctcattctagtatttgtttttttttctacgatgtagtgtacaggtgtactcaatcttggtggggaagttggctgcatcattagtgaaggtccctggctattggttggcatgccaaatcttgttaaggtaagttcagagtatgattcatttgcatggttccttgactattaaaactcttcatctatactgagaatcacttttgttgtcctatgtgttgaggtttattgttgttacggatatacatttttgaattatatgcaggcgtggaatatccaaaacaatgcagacctgagcctcaatggacctgttggccaagtatattcattggttgtgggtactgatctattgttcgctggcacacaagtaaatacttttactgactgtaaacttcttttctaaggccttggagagttggagtagaattttgcttcagcgtcatgtatatacttaaaatcattttttgtcttgaatatcatttcaagtttgcgtcatctcttggaaaaaccacctctgctatagaaatctacagttctattggattttgataaaaattcttctgcaggatggctctattttggtttggagatacaatagcaccactagctgttttgatccagctgcatcactattgggtcacacgcttgcagttgtctctttatatgttggggcaaacagactctattctggtgccatggacaattctataaaagtaagtagtgtggcactacttaaaaagtagtcaccagtgcctattatacctaaattaaaatcccctttctgttttttttttgtttaagctcataggcctaccttatctgtttttaataggtttggagcctggataatctgcagtgtattcaaacgcttacagagcatacatcagttgttatgtctctcatttgctgggatcagtttcttctgtcatgttcattggacaataccgtcaaggtttggttctaactcgctagataattggctcgattcctgaatatgacattaccccctgttttttttttttttttttttccgttgtagatatgggctgctactgaaggtggaaacttagaagtgacatatactcacaaagaagaatacgtacagttcctagcatttttgttgaaatattaccctttctcttgattcattctatatgtaactaagttctcaatggctatttggatatagggcgtgctagctctctgtggcgtccatgatgcagaagccaagccagtattgctatgttcgtgcaatgacaattcgttgcacctctatgatttgccatcgtaagtctttccaatgctgtttgtttcatgagtatacaattatgttttactttcaaaagcttagattctgttcttatgtaaggtttacggaaaggggcaaaattttagctaagcaagagattcggtcaatccagataggtcccgggggcatatttttcaccggtgatggaagtggtcaagttaaagtatggaagtggtctactgagtcgacccctattttgtcttgaggcgcaaaacagagccctagttcttcacctttgtcaaatctcttcttctcggagtgtcaatagttcttgtttgttttgttgttcgagagattgtaagtagcatcaaggcatctgtctctctggctccattaagtctctgcagttaagacagacggccgcagagaagattatggaccactgattgtatctactattatattgatttgatgtcagagcagagacatggtctgatcagttccagagacgcgtatggatctgcccacgttggttgcagacttactgttcttacttcttaggcataagaaacttttgtccctctttggtcaacattcttgtcatgtaatttatggcatagatctttgtagtcatgtttcagtgtaataaaagagatgatttatcataaagagaatttcttactgtattcaaattatggtcagggtcgaatgttgaagagaatgtccacaatgatggtattaacagagtttccgaagcatcttattaaccttgatagcatcacttccacgaccacgagcactgggattttccaacttcctctagagagaaactgagcctgtgggtattgagcggtttcacatcgatcttctggcttgccacagcagtacgaggcacagatgccaaatgttcttgtagctgctaggtacagagccgaacgggcattgaaaggttggccttttcatttgtgtgaccaaagattgttgaatgtttaacacttttactcaagatgagacatggggatagtttacattatttatatagttctgctggaaaattaacaacaagcccgtctagctcagttggtagagcgcaaggctcttaaccttctggtcgtgggttcgagccccacggtgggcgtgaaattacattttatttttgtaccatgatgtcagtaagcccattctctaatgaatatgaaactaaacggagttattttgtcaaaatggaaattagagcatgcgacatgatcaaaagtatttctaattagggtttgtgttacgtatggatttcttatttttgcgttaaaggtgacgtgtgggactacgtcactccaccgaagggcctcgacgggttaatgtgaaggccattatgaatttatgatggttatgatttgtgacccaccccactaatgtacattattagtaaatatctaaatgtttatataactacttgacttctgccattgccgcctcgtgattgttctccttttgaaatcatttgcttcgttgaaaccacactctccttttactttatcttctccttttcgttgaatacttgaaatcttccaatcttcctccaaattttttcagagtttgaagcatgtcagaccaagaggctcctctgcgtaatggagtagaacacaagattttcgaagtacttccgtttgtggatgatgattacggtggagtcatcgtggagatgaaaactcctatggatactaagaatttcgttgcagcgcttagagattcattcgagcagtggcgcttacaggtttgtgttggtgcgagatcacatgcatctctgtcttcttgagtgagcgagcggttgattctgtaaaacctttttgtttgttttttgttgtcagggtaaaaagggagtctggttgaacttgcctctctcacacgtaaacctcgtggaacccgcggttaaggtcacatatcagattaaatttgattcctaagtcttgcatattaacgttacttaattatcatcttttgttaattagatgtcattgtcttatctattgctaatattagtattaagatgaatctcttttgtaccatggacatattttagttttgtttttaaaaagaaaatctttttgggtttgacatatttaggttaatgggatgtatagttgatataccaagttatagctgcatatccccatgtattattacattgagggatgaacaaactggtcccataaataatttgtgcatgcaggaaggtttccggtatcaccatgctgagccaacttacctgatgctagtttattggattccggaagccgagagtactattcctttgaatgcttcccatcgtgttcgtgtaggtgctgttgtcttgaaccataacaaagaggtacttaggagataggacaccattatattgtttatttttgtatttccaagtcataatattctaatcatcctagaatggtaaggaaaatgtactccatattccagcatttgcatcttaaaattacaactagaggcagattcttgtggtgcaggaaaaatacggttcattatgcggatcaggtatctggaagatcccaacaggagttgttgacgaggtatgtgttatctgcatgtagcaacaagttttcaatcccactttatatgtttgctgaagatttcatctttaatattttattttcttgcgtctagggtgaggagattttcgccgcagccattagagaagtaaaagaagaaacaggcgtaagaagatccatatatcttaatgtaaatcagtcaaccatcaatatatataacctaacgttttcatacatttatcttcagatcgacactgagtttttggagattctagctttctggtacggatcatcgtcatatcctctgctagtctgcttcatatattgtttcttgatactttcacgttcttatcctttaagccttctgtttgcagccaaacccacgagtcattttttgcaaagtcagatttattcttcgtttgtctcttgagacctacctccttcgatattcaaaaacaggacttagagatcgaagcagctcaagtaaagtaacatatacttcttattctgaatctgaaacattaattctctcgcaatctttcccgaatttgtcggttcttgaatgtgcagtggatgcggttcgaggactctgcctctcaacctatcacacacaagaacgatctcttcaaagatattcaccacatttgctcaatgaaaatggagaagagctatagtggtttttcaaaaaaacctattacaactttctttgacgacaagttaggttatctctacttgaataaacaagaagatatggaacaacctatttcttaaacttcttccaagaacatcgtcattaagagatcatattctgatctaaaacaatcaatcgatctgaatgaaaaacaaatgcatgagtttcagatttgttatcctaaaagagatgctgaattcttctccagcaagcaaaaatacaaatacagtaagaagagagggagcttgtgacgaggaggaattaagaagtgaagatcttgtttttatttgatgatttgaaatcactagaatccactaatacaataattaaataaataaatacatacataccgaagcacaattatttgattgcactcaaatgaatcattgtcttcaagactccttcatccatttttctttaacgttccattctaaactcgactctttgaatgttgatgtatttgttttaagtaattcattttgattattccatcattaattaccactttttctaataacttggaaattgatgttgatgtgctttgtcttccagttttgaactaattaattttgaggaaatagttcaagtattgtcaaataaaacagatgtattatgctctttcttgtttaaactcgagaccattaagtagattttaaccacataataaatctaattatatcataaaattcaacaattaagtggcatttggtaacccaaaatagaattctactttatgatctcatttcttcatttaatatagaaatttaaactctattctaattaattattgtgagatagaattttgtaacttataattagcacaaacctaaaccataactctgatacatctacatcgcctaaaccggaattctttgtcacaacaaacatattataaagttcataaatctcaaatcaaaacttagactgattccaagattcatataaaacaagttttcatgctacttaacacatttataatggcaaagggaaagagaatgcaaataaaaatttacatttaatctgatctgtgacctatatctacttaacgaatcatcaaccaccaaaacacaatattttcccaaggatatttaataattctatcatcattatttcagttattatcaaatgtgagtggcctgatcattttctgtattttttctttccttattcaatatgtaattttatatgtcaatgtcatatgtcggccgacccattcagcaaaaatagacaataatatatctaataatttttgttgttttgctttctacacattcaatacaaagaaaattccacaagtcacaagcacaacaccttaggaactatacggcgctagttacacgagcgagaggcctatatgtcccacatgtacgtgtgtttgtcgtgtctattcatacgcattacgtctgatatactaagttataaccgaaagtattccacaatgccgacctcctagagaatgtttttcttttcttggtttggtatggtttcagttaataatctaattcatgttttcatcgttttattattattattaattaggttttgtatcggttataatcatattttgtcgatctaatatatttgtatgtcttcattaagttttagatcaattttttttattaggttcattcgaattcaagttttttcggatatagacatagtgaaaccatttgaacaatattaaagcatagctcagttcatatcggtttatccaaattgaacacccttaagcaaaactttgtaattaaggttcattgtatttgtggatctgccgtctactcttttgcctttttgttttgttgtgtgtcatgttatttttttcacaaaaagtacgataacaagattgattttacaaaatgtcttttatacgtgcagaaagatacaacacatgcaaacagtgaaaaccaatcattttcatgagtcatcaaatatgagaaaatatcattttcagaagcaaacagtcgattccccattacttaattaaaatcacttactagccttggttaaaatgtgattttataaaagatcccatagcctacctaattgaccaaattgcgggattaatttaattgaagagtggtgacagtgattgcttattagtaatataccacgtataacgaattaacgatacatatggcgttatataaacacaagcctcacgtttgagaaagaacaaaacacatttgtttgtgtagccatcacaaaatctctctctccctacataaacacaagcctcacgcctgagaaagaacaaaacacatttgtttgttttgccatcacaaaatttatctctctctttctctctttcgccagttataatcagagtcatgataagagttacggtgtcgcggtcaaacacagttgcgtcttactgtctggtggcactgctgatcctaacacttgcgggatcggttaaaaacagcaacggaggaggtagcggagaatattatcgaggaagaaactgtgaggtttggagagggaagcaaatgatggagaggccatgtgaggagctatacgtagtaggtgaaggagacacgcttcacagcatcagcgaaaaatgcggcgacccgtttatcgtggagcgtaacccgcatatccatgacccggatgatgtcttccctggtctcctcatcaaacttcacattaacctccctgaataagtcataacaagttcaagacatgtcgttttatgtacattatggttacatagttatctccctttctttttctttattttcttgtttggattttgaatgaatttaacttttaacatttctttgttttggtacaaacaaagatccgatacattgccattggacaactactctcttggatttgttcttgttagaaactttattttgtcatttgtgtaaaaagcggataaagccaaagagactaagaacagagtaccgaaatttaaaaacagagtcggacaaggcaattgaaaacagagccaaacatgacaactaaaaaccaaccgtcgtctcagcatggaatctattgtgcagccaagctggaccacccatatatagctaggtaagagtgaaaatgacgtttttggcaagtaaattggatttgcttggcacccttacaatccgaggctactaccacttccatctataagatgaagatttctcaaactttagacaaaccaaagaatatttcgagctatacaataatttgattttccgatgacctcgtgaaggcatggccgtgccaagctattcgggggatgagaccggtccgtcccgtctcaatatatagtggggtctctaggaaaaaacaaacaaactaaaaccccttgataaaaaatttttttttgtaaacattgggccttatcattaagaaagtttttgaaattaatattgggcccatgacatatttgaaattaatattggacccagtaagattatctctatgactctatgcatatttgaaaaataaagagtgtacaagaattctctacaatatttaatcttttctttcttcttctgaaaagattattttactatttttatacattgtggaatgtttgagtattcttttcataataatgatatagtcaaactttgtaacatcattgatatcatggatttaactccacacgcgaaatttacgtacgaatgtacctttgggctattaattccatgcatttaatatgtttgagtattcataataaataacaatgaatttttactaaagttttggtatataaccatatgattatgtgaaattgaaggattcaaaatgaatatctaatagacttccggaaacaaattaatttagagattaaacttactgaaatattagtagtctttataaattcaaatttatgggtaggttacggccaaattcgttattcgttagggtcaaaacgcagacgctgttaaaatatagccaaagccaagtcttcattgccgcacaaagctaacagcgtttgcgtttagaccccaaagcgacgtagtttctaccgtttcctgcacgagggcgtctacgatttgccgctcaatctctgagacgaccctttcctcttcctcttcaagtttgttcatccccggaacatctttttcggtttctcctgcgttgattatggtcggagaaatggtgttcgaatcgtaaaatttggaacttgacggttcttgaggaagcttcttctcgtacttgtacatcttctgaccagagcatatcgtcgcatctgccttcctctccggttcttgagctcttttcatcttaaaaatttgaaaacaaatcactgcgtaagactgcttaccacgtgtttgtgtttatttcttcaatgagagctaaacaaagaaaagttgtacctgtttccgaggacgttctgtggcagagaaagctgatgatgttacatagattttcttgcattgcttcttctctaaaagatcacatcgattagatctcgagtgtgttgatactggtgtgagcacctttctctgcttgtttcgattattgggtgttggatgaggagagaattttgatttactctctgctttttcccatccgctaataggtcttagtgactgttgattctcttttgaaagggttattaccgttgctggttgctgatattgtcttaacacaaatgcaggattagtgcttgttgtcttctctttctgtgaaatcctgttttgtgctgctcctcctgcccttttcttctcaagcaagtttgttacatccatgccaaattttctggtggtgactctcttttttgtttgtttcactatctgtctcccactatatctgggacttggactttgctcatcttgtttcaactctttcagcctcgtgcgtacaaactcttcatgcttattgttctctctgtttagctcaagagagaggcgatgattttcggaatcagaggagatcctagggctcgcaggtaatgatcttgtccctgagccattcccggagagtcgatgtcctcttactccattccttggtgatctagtaagctccaagttatcaggaagaagatcaagacccatgagtctagccacaacgttcggtgtcttggtgcgaggtaagttgcaattatgtgaaggtgtatcaacgagaagacctctaagtgttgactttttcccgcccacctgcaattgaattctcacttggctccatcaatgaagcaacttcaaatgtacattgaagtcattaatgttgacttacagagatgttcaagccttctctttccagcttgtagttggttgataatggagactcctctgataagtccaagctgtttcgtggcgccaccaagcctacaagtttcagtagcataacattcctcactcactgtcttgcaaaaagctcccaagtcctttatctatagagagatagagatagcacgtacctttacgagttctggagggagaatcaatactaggttggtggtgatgatgatgacgtgaaggaaagtaaaaatggtggaaatgaaaaaagtggtaaagtgcagtgacgcagccattagcttcattggagtttttcttgcttttagaggaacaagtggatcttcctccattgtaccactctcttcccatttctgttaagagaaaagcctgtctctaacgtataatattgacaagtggaaggcgaaaaatggactgacaaaagaagaaagaagaggttgaagaacaaaatctttttttgcaccagcaaaaaagccaaatttgaaattttatgtttttggttcctgacccgagagagctatcggaagctgcagcactgcaactttatctctatattgcattgataatcgagcagagggtggtgacagaaaataattttaaaacgtgacagtaataattaaaaagataaactgtactacaagtaaataaatgcatggtgagatgatgatatttagccacgcattttctttgaaaacagacagcttgagtattacagtatgattccaaccacaccattttctttggggttttcaagtttttgaactttacaaattaagagagaacttaaggttgtctagattttctcttggggattacaattactagaagaatattcttatgaatcgtgagttagtagcttagaaagttacagcttggccacatgtttaatgcagaggttccatgtctttgcatttactaggacttgtcttgtctcgctattatttgctcagtttcaaatttcaaccaattttttagttcaattcgctcaagatttatgtttacgtattttacatgcaatacatgcattttagacaaaataaaaataatggaggaatctcatgttagacctcaaactaattcacatagtttttactttgtagccactatatgaatttcacagtggccgaagagaagatgctagcagaaaattaaacaatggtctggaggtttaatgggcctgtgggttactgtgatttggtaggcttaataaatccaaaagccccatagctcaaactcattatggacgttttggtcgatttctgaaacagaggaagacgcatatgctaactctatcttagaattgcaacatccctctacagcttgtgaactcgttttgttgagtgttttacgcgtcaagaatcaaacttggggtttattggtttgcgaattttaattgatttagagattcaaacaaaatcttatgttattagatcattgattttaaaacttttgttgaaatcaagtcttattcatttaactaatgattcctaaattattaactgagtcgatattattcgtttaataattgaataacttattactaacagtatctactatctacgtctcgtcccctcctccgtacgtactatcataaataatcttctatgcgctttgagtggtaagggtcagtgacttagttctattcatatttttacatgctcatttgaatttgtttgaaagaaccaaccctttttttcttttcctattagaaaaattaacgtgcagttaatagtctctccaagaaacgattatatatacagcaaacttaatcgctttatttggaccacttgcacttttgaatttcggttcatgtgctttagtatgtaatggagttgcatgaaactcatgccaagaaaatgttttgagaagtaggctaggcgatgctaattaaaagaaaagaaagaagacaatgaacctcattttctcatatttagtaacagccttgtgattcttttatggatctcatggagtaagtattgctacttggtgctgctgagctatttgaatccaaattaaggatcgaaccaattcaggacttaacatgaaactagtcctagtaaactaaaaatggttgatggaaaagctgaactatgccaagaaacgaatggttgttgcaatcatagagtgagtatcatatacttttctgttttacgtatgctttgctaatgtaccacacagtataacttattgttttctactgcttgttattggaggccaccacagaacttaacttgtctctattagcttgtccttttactatactcattgttgtattttcctcgtacgagaccaagtgaatattgaggtgcatcaagtacggacaagcttttttggatcttttgactgaccagtttccatgatagaaaccatctcccaatagcattccagagaccactctatatggtacaagtaagatatccattataaccccacacacatttcatttccattgtctttttcttccacgaatatagaaagtgaaaaagaggagagaacaacctagaaatccattttcaaggttccattatttttcttgatttccttacgcattaattaattatactgtgctagactttgtgcggcacccattcactcataaaaaaactttcaaaacttacacaccaatgggaaacttgtgttaaagaaaaacaatcagcctatatatataactagaaaaagtaacaaattaatttttaggtttgtggataaaaaacctcgaacatattttgatgaaaggaaataaaaagtaatatgttttaagttaacattgttaaaccgtagatagaaaacaaaacaaatatcgtcaaatcacttggtttgatgctttgtatatattctcattaaaacccacccaaaaacttaaaaaaatatcgtataacatttgacattgccttcaatttttgttttgtacattcgaactgtaaaaaaggaatttcactcatttggtcatcacaaattatgtcatcgttactgtttcgtgatctcaaatgaaataagctactgtatagcttatacttataacttataagggatttaacgaatttagagttgagactttctgaaaacaaatatttttcgaataataaagctacaacatctcttctaggtttttttggcgatgtataacccatcatcctaactttgtattcttatttttataagtactttagtcacattatatggtatgttcttaggttgtcagtatatcaaatcagtaatttgtatacacacacaccttataaaatgaatggaaatcctatatatgatgagagacttcaatttcctaagtcgtagactaatgcataagaaaattatgtactgtgtaatcttgatcgtacacttgttccttcttgtcatttatttcaagtaacagtttaaaagttgcatgattgagttgaggaactgcacatgtgttgctcctctctgttttcaacgacagaaagcttttagcgtctagagtgtcattatttacaattcgaatgctagaaattattttcaacctctagtggtccaatggttaaagatcgttagtttataacggatagagtgatagatatccaatgtgcttccatgtttttttatttataaaaattgtgtttccatgttagtcaccagaaatgtgttattacgatcttgagctgagatgcagatatatatataggtatagtaggagatcggttagtataactgttaggacgtgagatctttaatctttatggcatattacatgatcttcgtaactttttttttgttgtcgtaactagagatttctttcatgcttttttgtctcctttttgtttttatagatatcttctaaatggcatataccaaattaccaatcttaaacagtgagacatgctttcagcgtcattaattaattggggatggagtaatgtccttttctaagaaaatcaagagaaagaaaacagatctatttcagatcatctatgcccccccagtttctagtgtgcttaggtaagagatcaatctctcgctcctcctccatctaataatgtcagagacaggacataaaaagcatgaactggttatagtggatcaataagaggattttaattggagctactatttgcgacaaaaacccatgtctaatggttgtcctttataggtccagcattgttgggtccttcaatatctctctctctcttctagtaattaagaaagagatagcacttgagctcatattaaagaagatgaacacatttggtcggcccccaccttctttatagcagccctacttagttgttagtacttctttgtcccaggattggatcaaatgtataagactataagaggctcaatgaaaaaaatggctctaattttttgtttaaattgggatttaaaagttactaaaccttatttttcaatttttattccggttaatctagatgtttcgaacctatgctatatctatcttagagccggaatcaacctttttaaaaatatccctccaaatggaaaccgaactcttgtctcactacgttattgccttacttggttcggtaatgttttttttcatcaatactaaaactcttcttccaaaaattaggctcttatcataccgactctagcatttgcaccttatgccgaccatgctcatgtctcctctttaattgatcacaataattcattagtttattccatcagatttaacatatgtaaaatataagacatagtgaaacaaaattctaacataaccgaaccaaactgtaactgaaccaatcaaattgaattcaaccaaaattaaaatttatattaatgtaagtaatagttttaaatggttaataaacaaaactaaatcgaactctatctgaacccaaaaacaaactgaaatatacacctcacactagagatatgaaccagtctaaatatagtccaaaatttttatatcttactaaaaattagttgattaggttcaaacgtaataggaggatagaggaaaacaaaaattcaccgaaagaaagaaaaaaaaaaacgagaaagtaaactctagagagagggagaaaaacagaataacaatgtggaaccaacacttccatatacatccaaagaaccttgggaagctcttttgtcctgccaactataaaaacagaccccccaccaaaaagatccacagtttttttttttttttgtttaaaatacaagtattatcttatttgtttttcttttatttgctccaattcccaatgaatagattagacaatcttggatttgtctgtaccccgattttctaacgtcttattcggttaagcggtagcaagactaatacgagtccgataaataattaactccctttagtttatcatcagtcataagatcttatgagttagtgttcatgttatatatcatctttactatttagttttcttttctttccaaaggatcatctaaaccgaaatttgacaaatctttaaatccatcgataatctgattatcggattttctaatgaatcacaaatttaacatcacttttgaatattgtaacaacaattttaacttttaaaacggaattgaatcctaatttctcaatcacccagccactaagtaatcttgtaaaacattattaaccatttaaaattaataattctattagactgattttataaaattataatatgagtagataagaaatatgtattttatctaacaatgttaaaatataagtatgcagtaatatgaatgtaaaggttcttatgataaaatatggataaattacatatttagtcagaaattattaaatttatcatttgatataattatttaattaattaaattattttgattatgtaaatgatttaatatgcaactacgtaattttattttattataaatctttaatttcaattcaagaaatatttttatatgaaaattaaaatttgtgccagttttgaatgaatggttagagctataatctttaaggtatccttatgtatggagaaatagaagggagtaaattcaaataaaatcaaccacctatgactagtaagctatacattattagtggaatagtggtaattgtccatgttgccacacaacaaacatgtagggaatcgataaaagacagttttcaacattttcaccatttcagttaaaaaaaaaaatagctttgcgtacaaaaaaaaaagaaagacaaaagacaaaaaaaaaaaaactaatcaatatgttaattagatttataatataaaatttaggaatgattccaccactgtttttgtcaacatcattccaccacttgttttagcgaatttaactccattacagtgaataatctaaaaatcctttactcttttggattatatatcactcgtggcaaaagtattgataactccattacagactatagtattgtactactagaaaacaaaaacaacaaaaaaagaagtggacaacactatacgatcgacttaaatgcttgcttatataaagactaaaaggaccattggttcccgtatctcctcgcaatactactactcactttactataatctctcaaaatggccgtaagtttcgtaacaacatctcctgaggaagaagacaaaccgaagctaggccttggaaatattcaaactccgttaatcttcaacccttcaatgcttaaccttcaagccaatatcccaaaccaattcatctggcctgacgacgaaaaaccttccatcaacgttctcgagcttgatgttcctctcatcgaccttcaaaaccttctctctgatcc

SEQ ID NO: 627 - DNA, 42446 bp, Arabidopsis thaliana
cgacactactattattaacgctcctcatagctcaagaccaacgacgacaatcaaataacatccagatttagtaacttttctttcaccacttcttgatctcacagcaactaaggaggtaaaatcataaacacaaacaaaatacgaaacgaataacgagagaaatgaataatgaagaagaaagaatgagagaataaataaaggagcaaatggcttttattatggatatgagccgcttcttctattcttcttctcctctctctctctctctgtcaccggtcgttatcttttacagttttcattcaatttcccacgagattttgccacgtcatcataatttgacggtttggacccacgcgcttccatgtatatattatttattcgctattattgtgttaaaatattaaaattatcattatgattattgctaaaaataattggaaaggaacaaaagaaaaaaaacacttaaaaaagggagagtaacgcatatatataagtgatgagtccccaatgcagacaaatggctttctttttttcaaaggcaaaattgattggagtgacttaaaaaaataaaataaacttcaagaaaacatgtttataccaagattaccctcgttattgtcgtggtaattacaggggtatgccactcagtaatggctggcgtcgcgaaactcgtgagcattgcgagtcttttaagataaatgcgccgctgatttcattccgttgggtggcgagtgagatcctcgtgacttacattagtttttttctctaacttatttattagctttcatatcaacatagttattgctaaggtcgggtttggaatgatttcttttaatggtttttttttaatttataaaacggcaatgtttctattttgcatggtgtacacatgtgaaagaacacgtctatctactacaatcaagtacgtatgtccaatatattcactagagagcttttaacagctgaaaaagttaatattctttatctagtcaagtttatattctcgtgtaagctatgatgagactgactctatcaattctttggcgattttggattctagtgtggtcagttttgagcttcttttgcatgttatgagaatatttctcaatgaacttgaaatggaatatatttgttgggcaaattatacttctaaacatataatgctaataagattaataaaatcaccaaataataagatggtataacatactttgttagctagaaaaaatcgaatgacttccatgtgatatatttgaatatgcatattctaataaatgccaataataagatgtctcttcgtccacccatgagatgcacaattagacctatttgatgtgaagacttggaaatctttgatgggtatcttcgaaattgattagtttctaattttaaatatccttaaaataccaattagctctagaaattatcgacgtaaaaagaggtctaaaaattatcgatttattagacggtgggagtggatagtcaactaaaaagagttaaagagattctttagaatcgaatcgaacggttgtaatttgtaaacggccttatcaaaatggttaacaactatactattagtttgcctaaccagtagttgactttttattattgttatttccttttaaggttttttatacacatgagactagaattaggaggagaatttcactgctcttagccgccatactttagtaatggcggatcttcgatgatgtatcgattatgattttgtagggtttgtgttttatgaatgattaaacatttaaactaaaccaaagcgacaaagaagatttgtgagggtggtttcgataaggattttgtagggtttgtcatttgtcatttgtgaatgattaaactaaaccaaagcgactaaaaagatttgagaggttagtttagtaaaattgattttataggccaatgaaaaagggaagaagagaagggttttatgggctaaaagagagcgcacgtgtgcatcgcattctcttcttcttttgcttttgttgagttgcgtaatgacttttacgtgtatccctcgtgcgtgtgtacgaatgcgaccctttacctttctttgtctcttgagaagttggatattcacttttacattatttaaacactatatcagtaacataaatgaagtatagaaaaacctatcaaacatattttgaatgtttttattctaatgctttgaaaaagaaaaagaaaaaatatatatatcataatacttaagtactatggaatacgtaatatacaattatttttgtatgtgaatatccaatttcatttgcgatgttaatatacattttttagattttatcatcaatcatggcaaaatatagtcttttgaatagatgagcatatccttagtagaagccactcgaagcaatcatggatgtcttccaatgaccatctaacatttaagtcattattggaaacttaaagaagttgtataacaaaatacttagatgttattatgaggatgctcttaaattagtatatgtcaagtgttgttattgagaatatagcaattacttctctctctattatgctcatgttggattgtgaatccttaagaaaaattcttaagactgatatttataagaaaaaaaaactgaacatggttcagataccgggtttcaaaacattatggtgttaagtccatacaaatgtacttgttttaaagtagaaaacatgtgtggtgttggtcaagtttttctattacatcctatcaaagcatgtacacaattttaggtagacgtaataatgttgttagtattctctttacggaagatgtgtgtgatgcgtcctatcacatattgtcattgcaaagtgtgttagctcattatgcacatggtggtttagctctttatgtagattgttaggatctggtttgaaaaaataaataatagttacttaacattcatacccaaaaaaataataaagaatagttgataatatttcatgaaaatcgatttgttttggtggacatacatcgtcgtctctactctattgtctcgatcgcaagtaatatgacaaataaagcagcagccctagcaataaaacatgtgactactaaaataggaggatttatctttacttgacgaactataaattaaatatctactcttttaccttgactttgaaaattactttttaagattgccttttacaattatgtggaatagcggcacacatttacgtaaatttaacttcaatttaaaacaatgatttattcattttcatcatacaaacttttcagcacattttctcctttttaatataattttatatattatagatagagatatagatcaaacaatgtatgactttaaacttagattgtaaattcttcttactatgctcgaaaatttcatctacgtatatagatctattgtaaacctaagtttaaaacggaaatcagttattgatagtaatctagtaagtttaatcaactatgcgttataacataatgaaatcatatatacgagcttagatatctaattcagttaatcaacaagtcaactaaacaaggcttcacttttccacacctctacagatcgaaattattatatattcgaattatgtaactaatgtaagtcttgcaacgtgtggatagatacaaaatggatatgtccataggtatacatattaaaaatataactagaaatggtatattactaacaaaattttacccccaaaggtggccatccactagtagccacatgcttatctagtagacattgaacatgataaaaagtgccaaataagtggaataatcaatgggaatcttcattcctataaacaaaaacattttcaagcctatgacatagctagctactctacaacatgtatatgccaattgggatataaatgtattaaagcataaccattaatttgacaaatagaaataaatagttcagaatgtataagttgagaaaagttataatgattggtagggagagactcaaaaagaaaaaaggatgggtaatgggacctattttccccaacatcccacatgcacacttccctctccattctctcacatttatttctttcattctaatttatccattccgtgtgtaacatattcactaataatctcatctcactaactcattcattgattgtgatatgtttatctagaattagtgttttaacactgtgtctacatatgatttccttttcattgtatgtgaacatgttaactcactaatcattttgtattttcgagttaacatgagtctccacttcggtagactaaagtaaagataggtttgagtataataaagtttaaaatttgctttaaaatcaatatttataaataagtttttatcataagtgatttttgtatgttatattggaccttgtataaacagactacagaagaaaattatttatgagaacttgtaatgttagagtggacctcgtataaactaattatgtgggcttttaccataaactatttatgaaaattattatggcccacaccactataactaaagcccacatatttagcagcccagtttcattgtaagagacatgttcgctctggaactagaattttctggtttttgggtatttgttttcttatgtgtagagaaatgatggtaacgattaaatgttgtgtattacaatttacaatggtaagacgattaatatatttacacacaattttgttgttgctgtaacacgttagtgtgtgtgatgatagaatttcataaagctttaactacgaggggcaaaatgttaattctaaatagttgacagcagaaaaagatatgtatacataatataaggattaaaacgtaaataataataaataaggcgagttaaattaaaaccctgttaaaaccctagcttgaaacacatgtataaaaacacttgcgagcgcagcttcatcgccatcgccattctctctctcatcaaaagcttttctccttgattttcgcattctttagagtcttaacgcaaagatgagacctcctctaactggtaagaaccctagccgcctcttctcttttcttcattgcttgcttatcagattaacaatggcgagtgacactcttagctcgtttagtctttaaaactttatgtctttagctgaactgattgtcaactttgttcttttttgcttagaactgtattgggtctgcgttagttctatcggatatagagttgatggttgggttttatgttaaacatggagtctctaatgaatggtcttttgtgttcaggaagtggtggtgggttcagtggtggaagagggcgtggtggatacagtggtggtagaggtgacggtggattcagtggtggtcgaggtggcggtggtagaggaggaggaagaggtttcagcgaccgtggtggtcgcggcagaggaagaggaccaccacgtggtggtgctcgcggcggcagaggaccagctggccgtggaggcatgaaaggaggaagcaaagtgattgtggaacctcacagacacgcaggagtgttcattgcaaagggtaaagaagatgcccttgttaccaagaatttggttcctggtgaagctgtctacaacgagaagagaatctctgttcaggtattatagaggattgattaattgattgatggtttgtatttgcactccttttgatgaatttgtttttaatggttcttgtgattgaatctgcagaacgaagatggaaccaagactgaatacagagtttggaatcctttccgttcgaagttggctgctgctattcttggtggtgttgataacatctggattgtaagcatcagcttgtgtgaatcttattgttgttgtttgcgagacttggttcatatattgattgttgttcccgtttcaatgtagaaacctggtgctaaagttctataccttggtgctgcttctggaaccacagtctctcatgtgtctgatcttgttggccctgtaagcagaacccgtcctttatgttgtgattatcaggttttagacgtgtattggagtttcttatatattgcctttgtgatctgataggaggggtgtgtgtacgcggttgagttttctcatagaagtggtagagatttggtgaacatggcaaagaagagaaccaatgttattccaatcatcgaggatgctagacacccagctaaatacagaatgcttgtaggcatggttgatgttatcttctctgatgttgctcagccagatcaggtttgcttcttttgtttaactcacaatgaatgtctaaatatttgcctcaaaaagcttgacccaataccattatatgtgtcctttgctttaaaatggtgttttgataattgcaaatgatgatcttacttggattccccttcagatcattatgggtgatgcaatctccaagtttctgatgtactgaaaattcttgtttttgtttttgttaagcttaatcttattttactatgtacttgttttacaatttcgtttttaagaacaatactaaatttaaatgtctattattgctcggttttggttctcctgatgttaaacctacttgttttctaaatgccattcagcttgtgggttgcttctagtatactttatactgttttgtttatgaaattttctgtgccatttaaaaccgtgcaggctaggatcttggctttgaatgcatcatacttcctcaagtcaggaggacactttgtgatctcaataaaggtgggtagcaatcgaaacatttatttaatccatgatctctcaagagagaaagattagtgaacatgtattgtctcatttttgcaggcaaactgtatcgactccaccgttccagcagaagctgtgttccagactgaagtgaagaagcttcaacaggagcaattcaaaccagctgagcaagtgacgcttgagccatttgagcgtgaccatgcatgtgtcgttggtggctaccgtatgcctaagaagccaaaggctgctactgctgcttagaagttttctactctacgctcttcccagtacctcagattttgctttgtctcggtctctttagaatctgtatggttttagggtttatcttaaattttgagctttgtaatcattttgaaccctggttatgttcacttggcttccagcgctaactttttcgacaagtttttgatatatggaacaattataatagaattttgtcgactgaggttgatttctttaaataatgacacctcgtaatgcaaatgtaaaacgccgcaagaatttgcacacaaacaaaacaaagtttgaagacacgttgcatttttaggacacaagccaaggaaatgtaaatacaaaaagctcacgcagaaactgtaacaaaaaactaatgtcagaagtggggtttgaacccacgccctcttacgaagaccagaacttgagtctggcgccttagaccactcggccatcctgaccttctttattaaatatcattgacaacatatatagcaggatgaaaaaactagaatggcttattctcaagcatctggaattttatttgggttacaaatttttttgatacatttgggttacatgaggaaaagtaactaacatttgtaatgcaatttttccttttggaagtaagtaacaaaacataactgatggaacagtttcctacaatctaaaactctaaatagaacaatttggtgcccaaaccaatgaaagacaaacaaaaagtcactactaagcttaacaaaaaaaaaacatcaatcacgcaagtatatccttggatgtcgtctcactccctccccatttcttcatacgttccatcgtctcctccacctgttcatcacagttgagatcgattcaattcaaggaatgaaaaagtgtatataacaaacatggtgttgtatatctggttcttacctctttattccagtttgtcttatacagaacaatcaacagtaacaacgtttgaagcgctgtcccggctatcattccagaccaaagtccctgaaaacattatacataagttttagcttcagcattaactgacttaactcatgccattttctaaattctctaaccatcactccaaagtttgcaatgtaaccaagaagatatccaaagggaaggccaaaaatgtagtaacagcccaagttgatataggccactaagccttgccaaccgcctccaacagccacacctaaaaagatgaacaaatcaggacggttataatctgatgagatatccagttcggtttatatatatatcaggtttagattttagtaccagaaacaaccggctgcacactgttgagaaccatggttataccaagaagataagctagcttagacactgcacgctgaagtactttactgcttgtgaagatgatagcaaaatggtctctggctatgatgatagccaccataaagacaagaccaatgaggagagactggaagaccgtgacatagacagagtacttagctgctcgtggacggcctaggccaagctcattggatacacggacactaatagtacacaaatatacacatgagtttactagttacctgaataacaggaaaaaaggtcagatagtgatgataccttatagctgcatttattccgatgaataacatagcctccaagccgttgatattcatgctgaaatgttaaaaaccaaagagtgaaaacgttaaagagtcagatacaagtttctcaagcttattgatgtaaaatgttgcagaaaactaaccatatagaaagggaatcaacagcgataactgcattgtcaagacggccagtaagaacaatgatactcatcatataccagatctcaagacaaagcataacagcagatgcaatggagagtctaacgaaagcccaaatctctttaaaagccaaccaagataaaccagtccagccttcattacaccaaccaatcacataaacaatttgagcaattgcagttccccagtttgtaatattaaacgccaaagcagcaccatttgtcccccaaccaaactcgattataaacaaccagagcataataacgtgaagggaaagagccacaaatccaatccaagcaatagcaaccactttgctctgtgcttgaaggaacttagaggttgggaaattaaaggccagtgagaagagctgtggtatggttagaagagtgaactgtccagctggaacagcgatctcctctgcttgaccgagtagtctcagaaccggcgtggcaaagatgtaaataggaaggaggaagaaacaagaaacgaacaagataatccaagatctctgcatataaactcctaacatattgacttgaccagctccatatgcttgaccacataatgtttcaagagcacttcccataccaagctgcaaggattcaaaaccaaaaacagaacttataattcctctgtatgttctcttgattcattttcacagtaaatttctcgattcgaaagttacaacagtaaaaaaatgaagctagagagtgaaagagagtaataccaagaaaccgaaggagaaggtaccgatgacggaaagagagatagagacggcggagagctcgacttcgccgatgtgaccgacaaagatattagtgactgagctaactccgtattggcagatgatgttgaaccccacaggagcagctatcatccacaacttggccgactctgtagataagactcgtttcacatcggtccagctcctcgccggagcataatcctcctctacttcgccaccgtgtgtaagcaacggcgccgtcggatccatcttctgaaaatgattaaccaaacgccactcacttctcttctatatctctctctctctctctctctgcctctctgagtcaaggtttgttgcggacttaatggttggtttatataacaaaccgttgaatcatgaatcatgcattttctctttctttaaaataaaagaaaaaaatcctcgtggaagctaatgataattaaaatatatactcgtggactctaataattcttcaatgaaaaatccttaaatattatttgacgatgactttccaccaatccatgcactagatccacaagtatatacatgtctcaatttctggacaagaaatctaatgtgttggttttgtttatgtcttataagattgcagatttaattcgtaacgtaacgcacccgattacctctaattatgtaactaacgaaatatcattaatggttgtgtctattttgcttgtattaatttatgtacgttttgtcttcggagtagataacgtaggtgagggctaatcggtggttcatgaggaaccacgttgctatatcaacaatccataagaatgaaagactatccgaagcatccaaataaacttaaaagagaaagtcttcctgatatgacgacgtggtgtctttcttagatgctttcccttttcagtcaaaagatacacgtatttattagggtacggttgtgaaggtctggtagagattttacccccaaaaaataatgtttggtagagagaaaatcacatgaatttttttattacgttatgggatccaatacttttcagtgactgatagaaagaaaatcacatgaaaattgttattacgttatgggatccaatacttttctagtgactgatattatatcttacatttatgaccaatttttgtttacatgttttcccggtattaaatttcatgtgcaataatactacttttataatgatattttcagctttttttttttgatgaaaatatattttttatctaaaaatgtgatattttataatactgtataacataattatacgaaaaaagcaaattgcattttggtcaatgtatttagtttggtcacttggtaattaatttaaaagtcttaaacaacagagaatatatgcaataggcttattaaccctccattttgacatctatcccttaattattactactatattgaaaagagattccggaaaaataagaagcaaactttctcatactcaaaaacaaaagtcgaaggctcaaacaaaactctacattttgaactcaagtggtcaagaaaatcaaacttcctaagatagctggaagtcattaaaatgaatatgtaagttaggaaaattgcttaatccaactataagctcggataaaaatggaaattaggtaccaaaatggaatgctgtcgtttccaaaaataggtgattccgtatactgttttttacaaggcttctagaaggcaaaaaagatgcgaattaggttacgtatgcaaatgaaatgaatataggtagaagagtcatagagaagatctttttataattgcgtttctacggaaacttcatagtccagtggtccagcattcttatttatgtcttcatccttttgtatttattgactctgcttcatcatttaaaacctttgtctttaacccaaacagatgatgatgacattttccattgactattattatttgtgcatgtcaaaaaaaaaaaaaaaaagacttcatgtcgaccaagcccagtcagttcaccagttacggccaggcccatttcgattttgtatcataagatacacatcgttgttagatgatgatgatactattgacaaaaacaaaaacattatcataaaacaaatatcttaccgagcagatcatttaaaccgataaatttgttcgggaggataaaatagactcagaaaatgctcatgaggccatttcttcagtaaatgaatcatctagaatgttagtaaacggtatagattcaagaattagtttctgtataactgttatgtacaacaccatgtggactgaatacatccgatgagtatatatacgaagtacaaacaccaatatacatttcaaacaacagcatggttgtagtcatggtaatggaatgtcttgtagatgaagtgtgatagccactttgaagctgcaaaacttaaaacagccgccacaagcactgcaattctagccacattcgacattgtcgtttgcttcaacaccgccatgactccgatcatagcaacggatgcgatttgtaagatcacctctagcgcattgagatatttgtgagctttcttgcagctgctgcagttctcaacatgcgaccaatacctggaacacgcaacttttatcattaggatgtttagcactacttttcattaaacctcacaagcgagataaataacctgtcgaagagctgttctcggggaggcgtaggaggaagaagaaatggatcaaactttcctctccaatcgactcgagcctcgctgtacttgttaaaccatctcctgaatgtaaccacattagcgtctgattttgttgggataaagcaagctttttgccagttttcagggcctctctccagtatcttccgctcctacacacattccattacaagatacaaatcagtctggtacattgatcagcctctactcagaacaatgtgtgtactagatagatttggaattacctctacatgaaggaggtgcaaatctgagtctagaatcgtattttgaccaatgtgaaacacccatctagggacaatcttatcaataaatacaccaaaattcctcgggaacgtccatatcagcctactacgacctggactgaccggaatacatataaagatcaaagacaatctccgctttgacaatgccgcctgtatacagaaccatactgttaggtaactaaaacatgtgactctaaacaagaaaatcttgatacaagttaaaatctatgaccttgtcagaagcagctggtgcgggatactcatgttcctgctctggtagagggtctgtggaagagcgatacacacatggtgcaataaaattagaataaccccattcttgttttgaaaagaaccctttgttgtctagttttttaacgttgatttcgagtggtttccccccttctctgtcaatcttctctgcaagaagaatctgaaggttggtaaaaggattaaaacaactatttgaaatacaaattatgtatttgccttttggtttaggaaaccgcatcagtccataatgtgcataaggaacatgagccgggtccatgaggttttccaccaagacatcgtacctgaaagatttcagatttacacaaaaacatcaacggagaattaccacacatagttgaaatgatgtaaaagccaatagatacccgtaaggaatatcacgattccccatcaacttagtgaatgatgggtcttctaactctggaatgtaaggaggcttgttggtttcaataatgtttttgtactttggatcactgtttggccaaaaccaaatgatctcatgctgcacagtactcgggtaaacagctacacaagcttgcttgaaagtgtggacctgatttgcattaccaaaataatcattgatacaaccaaagactttgactttatgttccatataaaccatatgctaaaccaatctaaaacaaacaaatcatcatcaatagctataaaaatttaccggaggaccatcaggaggagcttgaggaatgagtttacagtcaccggaaccattaaagcaccatccatgataaacacattgcaacctcccccattgatcaatccttccatcagacaaaggagcaagacgatgaggacacgtgtcatccatcactttccattgcttctcgttcctatcccaccaaacaaccaaatcaatccccataactttcttcccatgaggaaccttcttgtcaagatcgcaaattggcatcactgggtaccaattagcgtaccaatcgaacttatccgacccgggttcgaatagggcttcaggttccggtggagaattcgttgacgtagcggctgatgatgatggtggtgatgatactgcggttgtgaatcgacttgatttgcgggtgataagggaattaggagaaatgggtaggcttggattggagaaggaacatctgaaacgaggtttcgtattgagaattcggagcgatggaagagcgcatgcagcaagagcagcttccatggcgttgtgtggtggtaacaaccggagagacgaagcaaatgaaagtcttctttaccaatctcttttgacaaatttataatccaacggttcaaattaaaatatctcaggatgtatttaaaccaattgataatcatttttctggtttaatgaaaactaaaccggttaattgaaagagaaagtgtcggttgagtgtgaaaccggcgtcggcaaagtgagggtataagggtcctttccagacaccacagcatcagtttcttcaatctcccacgtctgagattgaaaagtttgggagaagataaacaaactcaaaatacctcagctttagatcaaaatctaaaaacaagagtttcgtgcagtggtttcttagagatctagtagattagagaatttggatttgttgaagaaaagtggatttggtacgattctataggtttccttcttctctgaagctactatagagagaatctgcgagctcaatttcgtagtaaattagggttcgtgtttcttggtaaagatagaatcaatggcggaggttgttctgcacatatacgatgtgacgaacagtggatcagagaagactaacaacaccatagttcagatcaataggttcttcaaagacgggatcggtcttggcggtatattccacagcgctattcaggtactactactccactgcctcgatcttcttcgtctttagtctatcaatctacatctgcacatgtatcgatgatgtctctcttttgagttgttgtttgtgtgtctgtatgtggaaatgaagaatttgaaggaatgatatttttggttttatctgtgaggctctaatctaatggcatatggtcgtaaaggtctctgtaagatcttgagcttaagctcccttttcgtctgtactgaggatctcaatactcggttcttcaagtaattttagaaacgtgttatgggattatgggtgcgatgaactttaggtttacatgttgctattgattcgcagggaagagtgattgaatagaatcttgtatgaactttgtgcaggtatatggaaacgatgaatggtcttatgggtattgtgaacaaggaactggtgtgttcagctgtcctagtggcaagaatccaatgtacacatatcgtgagaaaattgttcttgggaagacagattgtacaatcttcatggtaaatcagatcttgcgtgagctcagcagggaatggccaggacacacttatgatttgctgtccaaaaattgcaatcacttctgcgatgtattatgtgaccgccttggtgtgccaaagatcccaggtaaaaccattattgtgggaatcagggtttgtgtgtgtgtttatgttatgtgacggcttgggttctgtctcttaacaggttgggtgaatcgttttgctcatgctggcgacacagccttggaagtagcaggaaacacagcaatgcgggtgggttctctctcattttgctctgcccacgctgtttctttttttacacctgaatgcatgtggatgttaagtccttgtgaactgtgacttttgcaggtaaagcaagccaaaactgaacttgtttcagccagtaaagtggcttatcgcttcctttcgaatgttacctcaaacataaccaatggttcaaatggctccagtggctctccacagcggccaggaactctcaacaattcagacaatgggagctttagattgcaaggtagttggttgaaaggtatacttaacactgccaaaccctccacaagtacagagatagggaacaaagaggaagatacaaatcatacaatcaccaatcagaaaaagcagaaccgtgactctgatgttctactatttcagtagcaactgtactgatccaccccaatgtattcacttactgtatatccacctatccaaaatttattcgtttgtatccattactttgtatcacgattcgaacacacctctctttttttttccccttttcacagcagaacgtgtgattttgttaagaagatattttcaacacgttactggcaaagaccaagcaagtcttagcatatgcattgcacacctattagagggtttgttaaaagaatgtgatataagataagcaacaatgcagtatgaagagacttcaacatgtataatagatacaactcaaaatgcgtctttaatattacagcgaacgaaaacagagtataaggtctaacgtcaagagaaaaaaacagagcattgacaccaaagcaagcagaaggcaaatgtttattttaaaaaccgaatgaggacgagtcgtggcatctgtcatccccggaacatcccattgaacacaaaggcgttcccatcagcattttcagatatctgtagcgccgagacagcctgagcagcaatcaaatcagctgatattcccatgttgttatcccaagcacccctcctcgtgaatggcgaccagttactatctcctagtccatagccatttgacacaaacccaatcccttgaaccgcatagctagcacagctttggcgaggaacgtagttagttctttcatctctaaacagatccattgtgaaacccttttcttcaccaaacttgactcgagatgaatcatcagaatcttcgcccagtaggacgtgcagagcaacagcttctgcaattgcagctccttcttcatctaacctttgttgttcttccaatctcttctgcttcttcttttcaagctcagcccggatggctgcagaagtagcaagagctttctccaaacgtctctttttcttctcagcttgtttgatacgatcaaattcatctttaccatgcttcttcttcgctttcctaacgactggctgaacttgcttgcacaccgtgtgatccattattgcttgactataaatttctaactaaaaaactgcactaaactcgatgatgttgtagaggaactcaagaactacacccactctggtatataggaatacctcatggtgcggacaatacaatcccagaaagaaacaacaggagacaactgaagagagaggttataagaattcgcagacttattcttcgaaatcattcgtccaacattcccgcaccccttagactcgcccattttctgcattgacaattacttgattagtttcaagttgcagaggagtagtaacacagaaatccataacatcaaaatctgaaagccaaaacaatagcattcaaacttgtaaaagctaacagttgtagatagaccaccaaccaagcagacacaattgttctaatgacctcgaaagacaccaaaagtcctaaagaagtcaaacaaaatcagccaccaattagattgaagatagtcaacaacagccaaagagtaaaacctaatgattactcaaaccctaatttcccagagtaggagcaaagttgaagaatacaaagggtatccatccatccacagaaagagttaattccacggcaaatttcaggatctctcttaatcctcagctaataactcaattaagactaatggatacaaattacacaaatacagacaccagatctgccgcagaaactaattttcagatcaaaattaacctcaattcaacaagaacaataagagaaacaatcggatttaatccattatgtaggtctaagatccatgaataagcataagatccgaggaagctaatcaaaaagacttttaacgaaataagtcaattatattgaaaagataaagggaaattgaagataaacggagaaacaaagatgatgatgaaatttagatccaaacctcggcaatatggcatagaagcagctgccttcaaagaactcctttaaattaatcggataatacagagagataaacaaaaacgcagaagtaaagttgctgttttgatgcagagagaaagagagaggaatttcgagagataaaaaagaagagcagacgaagaagacgagagagagaggataatagaaggaattataactagtacagagaaagaaacgcagcgcgacttctaatgaaatggggacacgtgtcgaatgatgtctgacttttttttcaagtgtaagttttcaattgggactttggagacttggccggtgcgacttcgtctactcccagtattttgtgggtcctaatgagggctattagcagccgttagatcccccgataactgttttgagatgtttccggttccaacttttttttttgtcgacttccggttccaactttgcaatatttatcatgtaagaaagaaaatttgagcctttcacgaatatgtacaagtgtcatgttaccttacattacaataaaatataagagcttaatttgcattcaaagtttatcaacttgactaagctttgtttgtgctttgagcatcccattcaagattcatccaccaaaatgagactttgaatacacttttgatataacaaaaaacttggtcgaatttctttggtcctaatttatttcctgaatcccatctgttgtactgggcctaggcccaattggcccaatatgtatgtaccataaaaaagaagtcattaagtttttatgattgacttttttacatagaagcaaaattataaatttggtgtatgaatggatggactaattcgagacgaatcagatggctaacgaaaaccagacttgtgtccgttttgcattttcgaaaattatcggaagaatcggtcaattgattaccctcttttttttttgtttaccccattttttaatagtcatgaatcatcttccttggttgtgtcagattacttaagtcattattttgttatagagatgctttactagtatttttgatttgttttggtaaggacacttgtctagctaaagaaatgttagttaaatgaaagaaaaaaggttcagtagttgacccgtttaatcaactgcgaacaacgttcatactaatataatttgttaccataaattcataatctaaacgcgtgcttaagttgtaaacaaaaggaattaacaagggacacgtaaagtagcaattccgcaggaaaagcgagggtaaaattgtcatttcagtggatccccaccaccaccaccaccgccgcaccagtttcttcttcatctcctacgtctgaaattgagaaatcggaagaagaaagataagtctaatcttgtgcctttagatttcttttcggggagatctagtagttgttggattcgttaaacggagaagtggatttggtacgagtctttaggtttccttcttcaccaaaagctctatatagagagaatctgcgagctctttttggtaggaaattagggttcgtgttgcttggtaaatatagaatcaatgacggaggttgttctgcatatatacgatgtgacgaacagtggatcggagaagactaacaacaccattgttcagatcaataggttcttcaaagacgggatcggtcttggcggtatattccacagcgctattcaggtactactcttcgtctatattctatgaatctacatttatgtacaattatcgatgatgtctaagcttggttttggtctactttatgtagatttggtttttgtttctgtgtatgtatgtggaaattaagaagttgacggcatgatacttttcttttgatatgtgaggctttagtttaatggtttatggtcctaaaggtctggagctgaagtctctcttttgctcaggatcttgtgtttcctagtacttttggtaactttccatatgataatgattgcgatatattgaccaagtgctctctggagacttgttaaatccaatgatggcttacgtttacttctgtgatctttgacctgggcaaatataattgcatataccactttcccatttgagtcgtgacaatttggtgtattccaacaaaactaccagaatttaggttttcaagttagtgctaatcattctatgttcttaggtctgtatatctatgcaatatcatttgattattcttgttcatggttttgttatttttttgtgtcttgtagatgactattgattcgcagggaagagtgattgaatagaatattttatgacctttgtgcaggtatatggaaacgatgaatggtcttacgggtattgtgaactaggaactggtgtattcagctgcccgagtggaaagaatccaatgtacacataccgtgagaaaatcgtccttggcaaaacagattgcacaatcttcatggtgaatcagatgttgcgtgaactcagcagggaatggcctggacacacttatgatttgttgtcaaaaaattgcaatcacttctgcgatgtactctgtgaccggcttggtgtgccaaagatcccaggtaaagccattttttgggaatctggtgtgtgtgtgtgtgtgttttgtcttcaaggcttatgtgacggcttgggttctgtctcttaacaggttgggttaatcgctttgctaatgctggggacacagccttggaagtggcaggaaacacagcaatgcgggtgggttcccttttgtttagcttctctacaacgtaaatgcaacattatgggtgttcaaaacttgtaaattgggattttgcagatgaagcaagccaaaactgaacttgtgtcagctagtaaagtggcttatcgcttcctctcgaatgttacttcgaacgtaaccaatggctccaatggctctccacaacgaccgggaactctcaacaattcagacagcgggaacttgagattgcaaggtagttggctcaaaggcttacttaacacagccaaaccctccactagtacagagatagggaacaaagatgaagatgcaaatcatgcagtcaccaatcagaagaaacaaagccgtgactctgatgttctactgtttcagtagcaaccgtaccgatccaccacaatgcattcggttagctgtatatccaccggtctaagagtcacgcactattctcctcgtctgtacccattactctgtatcaacgttggaacctgtcattttttcttgagtttttagctcacgtgtgcttttgttaagatcattctcgcttgttactgtcaaatcttaacatcaaaaggtttattagtctcaatacactagaaattgtgactgaatttggataatcacgtgattcaagaggtactctgtaatctgtataaaacttagaacgtatttgtgaatgttacaaagagaattcagaaaacatcttttcagctagtctaacatcaaaagataaacaacgaggaggaattttcacaccaaaaggggttctagaataaagaaaaaaactgcaactctactcatagcaaacacttgtttctgcagccaagtttggcacgatggcttttgtcatcccccgaacatcgtctcgaagacataagcgttcctatcagcgtcctcagatatctgtagtgacgaaacagcctgagcagcaatcaaatctgcagatattaccatgttgttatcccagacatccttcatgaatggcttatatgacactgaccagttactatctcctagtccataaccatttgacacaaacccaatcccttgaaccgcatagctagcacaactttggcgaggaacatagttggttctttcatctctaaacagatccattccgaaacccgtttcttcgccaaacttgactcgagatgaatcatcagaatcttcgcccagtaggacgtgcagagcgacagcttctgcaattgcagctccttcttcatctaacctttgttgttcttccaatctcttctgcttcttcttttcaagctcagcccgaatggctgcagaagtagcaagagctttctccaaacgtctctttttcttctcagcttgtttgatacgatcaaattcatctttaccatgcttcttcactttcctagtaactggctgaacaacttgcttgcacaacgtgtgatccattattgcttgctataactctttgattccaactaaagtaaaatgcactaaactcgttgtctaagaggatttcaaagactacaaccactcaggtatataggaatacctcatggtccgaacattacaatcccaaacagagtcaacaagagacaactcaagggagaggttataagaattagcagacttatgatttggaatcattagtcctcctttcccacaccccgtagactctcccattttctgcattgacgattacttgattagcttatagtagttgcaaaggagaaacagataagccttgtgcataacatcaatcttaaagcaacagtcaaaacaatagcattcaaacttgtagaagctaacaattgtagttgcaaaacattccactttattcaaggaacataaaaagacaccaagtccaaagaaagtggtcaaacataaatcaactaacgatttcaacagtcaacaataacacaagatagaagatacaacaaacaagctaatgcctgatcatttcaatggatgcaaactagaagcaatcaatcgagagtgaccagatctgcctcagaaacccataattaagcattaaatctgatgaacaaatgaaactgctcgaaaaacttttctcgaaagaagtcaattcaattagaaaaaatctatggaaattgaagataaacggatcaacaagatgatgaaattggatccaaacctctagaaaatggcatagaagcagctgactcaaagaactactctaaaatttaatcggataatacaaagagagaaagagaaacgtagctttctggatccagaagactctatagagacagaacatgacatacagtagttcaagaaacgtaggctgacttgttgtttgtatccaatcaaaacaagccacgtggtaaatgacttagaagcaaattttacttgcagtttccttctttgggacgtctatctactacacttggaccggtgcaaccatatcttgtccattagcttaattcagctatctaaaattattatctcaattttttcactattcaaatatacaagatcatgtatttcacgtgattcggatggttttaaatttgtaattttttttgagcatttgttaatattttgaagtaacttttttaaagaaaaaatcaaactaataatttagattttagaccctcgtcgtcttatatcctacccctttatgtatctgttaaaataattaatttttccaaacaaataataatataacgggtatggtcatggaacggaaaaaattgggacggaaatgtgtatgacccgaaatagatatgcatagttgtgcctttcataacaaagctattaaccgtcttcagaatccatgtagcttttcttcgaacgattgatcgagacttcggtcccaactttgaaaacaacttaatgcataagcgttttcaagaatgctctcttaatttttaaaaaattcagtggacttaagcttttaagtgtagctaagacacgtagcaaattggggaaccttaagctctttgtcattagaaaatggaaattgcaaaacgcgtggggtttacttatttttcgtattggaaccgaataatcgtgatcttggttaggttaaaaataacaactcattttggttggtggagtagccacaagagataccattcgtccacgaatcaatcttgactttacaaaaactgtataataagggaatgtgtaataatggattgattagtgcatgtgttaacggttattattattggagcttattcgtcaaaaagcgtacccaacttcctatttatgtcaatagaaagctatgcatgatcgatcattcgatctttctattgcagttttgtgtccttatcaaattatgcctccacgccacctcatcctttctcccacttttcaccatttcaatattgcaagtttttaaaacctgtatttagtatttatttagtggacagatgactaatgtgagagtcgtgagaccataacatatctttcggtgaccaaacacgtttgattaattctcaattcattttaagattgaaaacatatagttatatacaataagcagataattcttttccttatctcttgggatttaattggatagtgttgtgggagtgcacataataacttccacttaattagaattggtgagcatgaggaaatattgtgatgtatccactttagtgagatatattggacaagcacgtaacacgtaacacgtttcaaaaactttacgttttaaagtcaaatcccttttatgatcccacccgccaaataattaactttttatacagaactcgacctgtccatagtgtgtaatgccttaaactatataatcctctctattatttggaagtaagttttgtagaaagtgtttatgtaggtgtcgcaaccatgtctattctcaaaattttcttttagaaataacattgttttttataagatacaaccagaagtgtcacgggaaaatattcaataatctaatacaagattatccattacgtgaatgctgaactctttacataatctaatacaaaattatgtccttacacgcaacgagggcgtctaacaatttcaacaagatcgcgaagaagctgccatatatactgtgaacgtaagcgtgtaaaatgcatatattattctacgtaaagaggaaaattccataaacatcaatctatgtagatgtcatttgatttatcagataagaaatatttgacgtaatgggtttgaaggaagtcaaacgtaattcctggttttggtgtcgttggtttaggacgtcgagcaatagccaatatgtagttggtgtcataattttttgtaagttccatgttctagaattgtgattgtaggtcactcccgatcatagtgaatttgattctagtaaaatataactttaacatatagttttatcagtatgtattttgttgttatagtagcaacgacaaaacaaacaacgtaatatgtcaatcgtcgctacagtgcttgctacacgcacaaatacaattgcaagaaagagaggtatttatattttttaaaatattcattaaaatcaaaatcggcatataggatttatcaacatagaccgtcttaagatgatcataatgacagaagacaaaaaaagaatttgggatttaaaacttgtttaaagtcaagaactcgaactcgacccggagcccgaggcctttttgtatgatttgattctccgactaatctccttatctaactcttcatttcctccaacttcttccaattcctgaatcaccaaatccaaattagcaaaaaaagccaacaacatgaagaagattaagaagaatataaacaaatcaagagacttcttaccttgggtccaagaaacagtccatatggtacaccattgaacttgtctgtgtgatgtagctgaaacataatcatgcacgatcaataacaataaaaatatgattattaagatactaataataataaaataaaatctattttgggaaagaaaccgtttgtatttacctggtgagcggcggcgacctttcggaggtaagggacgtcggcgatgggacctacagggaaacgcttgtgcacgagaccatcgtggacaaacatgtaggcgattccaaacaccgttatgcctaacccctgtttcaaggacgagcttaaaattaagccaccaggtcatttgtgttaatgcagccaacaaagtcatttgtcatcacatgtatccaatattaaaatacaacatacacagagagagagacacacaaaatcctgctacatagatacgttaattaaaattctgttttaacgtatgattaatctcagtccactactattattatttttattttctaacattaagtagcgattaaaaaaaggcaccgaaatgtcctaattctggtgattagttagtgtttaaactaattaaaacaaaaagaccaaaccatagagtcaaagatcttggaagttggttttgtgcgttttatttagtaagaccaaatgaaagagggacttacggcgccaaagcagagaccaggaacgagtcctttattgaagaatccataagagaggagaccaatcgctggaccagcgttcactatagcaaaaacatcgtttagctcaaacggtccttctcttggtttgtgatgtgactgcaacaaaattcaaatcaggcggtttgaaattggatagtcatgatgagaattttcagcaagcaaagtaacctcatgcatattccatagagaagcgtgccacagagctctatgagcccatcttgcccagaattccataccaacctgaataatccaaaaatctcagccaaacttttttgtttatgaatcagaaaaattgggatgaagttttgaaacttacagcagcaccaacagagagagcaaatgtaccaaacatttccaacattgagatctcacctccctgatttttgcaaccaaacaaaaggatgtgagaattcagaatttcgaattggtttagttagttagttagttagttatacctccatttgccaagagaatctgtagtaaacagccataacagccatagaagtgataccaaagctcgacaacatagcagcgattagataagtggacctctccgatttcttcctctccaatttctccgccaaacgcaacgccagatactcagcgtctatagcgtttgtggagctcgtgctctccggtctctcatcgttctcaatcggagaattctgtctccgttcttcgacgacgtaacagacagaaaagcgtttaaatcgaagagacggagagaatccggataaggatttcgggaggcggagtcggaaatcggtagaggaggaggagaaagagcggtggagtggtttgaatgtaacggcggttgagagtcctgccgccatcctaatggaaggaggagctacttgttttgaggttaaccttttatgcgagcgagagagatagatagacagagagagagatgtggtgtggatggatttaaatgcaagtgaggccacgatttttttgtttttgggtaaaagtaagtgctcttttttttgccttttcaaaattaaattaaacaagtgaaggatggtttagtttcgtgtgactaaaattgccctcaagtttttttagcgactaatcctaccccacccttatatcacatttacattattacccccactcaaaatgggttactttcttattttttgataatatttgttttcttttttggatttttttccatcttttctttgaccaaaaatgtatttgcttacctttttcacataagctcagttatgtttaatttattaatttctagatttttagtataaatatgttttataaaccaaattagcatttactataagacttaaaccatacaaaagcctttttttattcttctcacttgtctacaaagctaacaatatcttaagaacactttagtattttagtatgaatcacatcaatttagtttataaatgatttatcttttttaattaaatccaagatacagtattttgtaaaccataattaaggtgaaacaaatttataaacattattgttgttataaaatataagatatatagagaaagtaaacttatgtagaaattctactagattcatttactgtctattgttttggattcgttttctaaaaagtagattttttcattttaaggaatgtggatatgtttaggacgctacatcatcactacatgagtacatgtggagacttgtggcatggttgtcatagttccgtgtattgcgtgtgattttgtattgtttatatccgtttgttctaaacgtcatttgtataattttcgatatcgtgatgaataatgatgtaattctaagatgtctggactaagtccttaacttaaaatggcataaacgtaaaatcacagaaacagcgatggtgaaagacaaagaaacaaaaagttaggctccaaaccagaaacgaacgcaacaagttccttacaagttacacccatttatgaggctgatgatgccatatgggctttctctacgtgtcacatcactattcactatgacaaatcctcctagtatctttgttttttggttcttttatagaattattattttttttttctttttttggacctcaaattgtgatatggatactgcaacttgggtcatggaccttcaattacactcttctgctaaaggccgttgtagatataagatgatgaaacgtttgattctcttgcgctttggattctgagattttgggatgaatatagattatggtttgcattaaagaatgaccggactattgctaatgtgcacaaaaaccttgtcaccaagacactgttagaatttctcctgctccaacattgtaatgtgcaatgacttgttgtcctctaaaaccccagctttccacttaacatctgtctgtgtgataacgagtccaccgtgatttcaaagactccacatagtcgtctgcaccagaaactctgatcatgatcctaaagggaccctgaaaatgtattactgctagttagatacacgagtctagtcacaaggaaggaaaacaaaaacattaccggattttgagctagaaactggtcctctggaacaagagcgccaaactttcgtctctttgcctcacgttcctagggtcgtgcagtttgcatcttctccattgaacacccttatctcagcggtggtatttccttcattatacttaaaaggggttcagctggtggcactaaatcacaatagctaacatcctccttgtcagcaaaatagtcaacaccactcgaaaacgcatgcatagcgagatttattaccaaataggcgttgcttgtcactatgccgttcaagacatcaataccctacattgcagacaagattaaggcaagggaaaatgagttttaaaaatgacttattaagggagacaaaatttgtgaacttcaaatctcagctcaccccatgtccagatttcagcatgttagttagaaaagaagaagtaagagtatcatggtataacacgacggtttattctaaacaatgacatgttacaagaaacaatgaccttaattttggtaacagtatccatccaagcagtgatccgtcattgggtgaaattctagcaatacaattagactggtatcttctactgcaccatttattcaagataatgaatactccatttgctactaagctcaaataggatacttgtttattccaatcgtctctttacaaaaggatcttaaactaccgagccaaaagagcaagacaaacaatcaaataaactaaataaaatcgaaatcaaagccaataaatcataaaataccacagaacaaagaccacaatacaacggttacacaaaaagatgaagacacggttcaagcatactgacacattcatctcagagagtagcagaaagagcgttgtagtaagaacgtatcttagggacatgaagcacatgatcagaccactcaacattccccaaaatttcacaagtattgcgcctttcaagcgcaatcactgcacaccaaagcatctgccaatcgccgacaccttggttccaaaaaacagcgagctttccaccataatcagccaaactaacaaaagcacgcggagataacttgggtagtcgtcctcctatcaaacactccaaatttctccatgttcttacctcagtgtcataccatctgaacactcggtcaatagcacatgagtacaaaacattaccaaccacgcaaaaacattttgaaaacataaactcacacatggtatctccaacctcctcccagctaccttccactggattgtaatcaaccacctttctcccagtcacgaggttgacctttccgccaacacttgtgcttatgaagatctccttgccttgtgacacgctgcatgggatagccacccgatcacttacttgtgtttctgtgtccaacaccgtaaccgagttcttcaaggaatccgagccatcttcttggtgtaaccctgctacatatatcttttgatcaaggacgctaacagaaactctaaatagctccaccggcaagcttggagcctggcgccacgtgtgagaccggcaatccagaacccagacactagaggaggtcaaatggtggtatctggttacgccaatgttatagatattagaaccaaccgccgcgaggctatatctctgagtcaaaggagaatggggaattgggattcttgccaagacataaccacttgacctgtcctcctccttattactactggttgttgttcgatccggtttccggcagagggtgaaccagctagggccgtttttataagaatacatatttatgcacacatagagacgactctccctgcggcccaagagtgacctgaccttgtaaagctccggtgaagccaggagagatcgaaagctcttggagacgagtgagagaataggatagtataatattgagacgcgtgcgatgatgaccaataccaaatcatcgggaagtgacggatttgttgtcgacgacaccttcttcttcttcttcttcatgttcgacgacgtcgttgtctctccgctgaccaacctctccatttcttttacttttttctttggggatcggcggcggaaggagacaacagattaggtgttaatattcgttgggccctttatgggccttgatcactttttaactaaaaacgttttgtgtttagtttttttgccgaagatgttggtcaagggtattatactatttatgggattatgttttgtggtgtggcatttgcagagtgtcagagacgtcgtttgattttgggagagacttttgttaaccgaggggaattgtaatttccttttgccgcgattttggattttcaaggtacgaggttttgattctcatcttcaatcattgaagtttgctaaatgctaatgttcagaaattatggtaaattatagccagtatacattctaaccattaccaagcgcaatattttcataccaagcattgttgctcgatataatttccgctctttgctgatgcttgttttagcttgatttggtacagctttggccacagtttccccgttactgcaaaacaaatgatcgagacacaaaattgatggagacacaaaatgttgtgactatgaggcgacgtcgagtaatcaagcctagaggggatgataacaagatttattaccaaagaggcgttgcttgtcactgtcccatgctatgccattcaaaacatcaataccctatagtgcatgcaagattaaggtaagggaaaaaatagttttaaagatgacttattaagagacaacctgtgaacttttttccatattttaactcaccctatgtccagatttcagcaatccccgactgcgaaaaaatgtcagaaaataagtaaaaaaaaaaaaaaaagaggaccagtggtataacacagtggtttatcctaaacaaagacatgttagaaggaacaataaccttaattttgaaagcagtatccatccaagcagagatccgtccttgggtgaaattctagcaatacaatcagactagaatagaaaaataaacatcagcctaaatgataaaccctgtaaggcttgtcattacgacattgccacatgataaagttcctagcaaaacagtgatccaataaaacctaatttccaatatctcaaagagagagaataatgagccagattcgtttcacatattgaaattttgcaggcagcgcaattttgtttagtaaaaatagaatttgcagtaaaacatgttatcttaatttttgtaacaatttttatttcagatgccacaactaatagatgcaaatatcagaaacagttggaatacctgccacacatttgcccaaacttcgttgtttatgtactcgagctcattaaggtaacgtacctcacggccattatatctgactatatgcttatcagtaactgcagagaagagacacaataaaatgctaaatatactactccctatgtaaataattaagtaagtggctcaagggcacaaaaacttaatcagtataagcaagaaacctttcattgtttgagggtccatccgatataatgtagaagtgccatcacttccaaataacgcttttccatcggtagccagtccccatccatctttcatatgatgtttaaatggttttacctacagtgaaatcaaatgcttaatataaaagaaaataacaatactagtccataataaagtggtgaagcaatggaaacatggtagcttaaacctatgacaaagaactgtcctctacttaaaaaaaaactaaatcagctgaaaagtccactaaataatatagcaagcaggctgacttatacttgcttatctgtgatgattaaatagctgataaaccaaagtatgaggaagataagagcactacacactttacttaagttgcgaaggtcatatgtgaaacccgtgtttgtcaaccatgcgacttgaaagagcctacaacaaataaagaatgggtggatcagatgagtattttaacagttaaactttctgttggcaaatgtatccatgtaggacaacaagatccaagaagcaacattacaactgagcaagttgttgtaacatgtgagagtttctttctgaattacaaactagcttaatgaaagaaaaggcccacctttctccaaggagtgttaaaccctctccaaaatatgtattgtccattttttcaagaatttcaacctacggaagggaaaaacaaaacaaacaaatttcaccgatgtatgaaaacataaacacgaccaattcaagtaaggctaactccataataacggctgattcaagaaatcaattaacgagaagtttcaattcattctcttttgcaatcacactatcattccccacttggaaattcactaccatggctgattatacaacatgttaaaaccgtcaaaccacaagatgaaacccatacctttcctgttcgtagatccactttcctcactgaagactgtaagaatggggaaaaaagcaaaatggatcatcaaactaaagcatcacattgaaattttcaatgactagagaatgagactcgaatcgaattcaaagacaaagagtaagacaatgccaggcaaatcaatcaccttcccgtatagaccagtggattcgaacagtgtatcgtttcccgcataaagaagaccctgcgccggacaaaaacatgtaagtaattctgaaattcgaaaatgtgagatgatgattatagtcgaaacataaacctgagtaaaggcgtccggatcatgaggaaactcagcaactacttcaatttcattgatcctatgggagagatccagagaagaaccagatgattggccccagctattgaatggcataaagaataggaaaacggcgccggagaggagagcaagaggaatcatcatcgcgaacctcttccgagaaatgaatcggcggcgagatgatgcagaagaagaagctggaagagactgaatcatggatcgcttcgtttgtctcttataaggcgatctagtcgccattaaacttcattcgcagtcgttggattggaaattgcagtctgtcaaatttgatttgtagctctgaccagactttggcaacgtaattttgagaaatgcgttaaagtgtgttgttgactcatttgtgtttttgctttttatggaaaaattgaattcttttttagaaaactttttttaaatcgatcgttcaatattggaagcttattaaactactgttctcaatccagatgtgaatattaggaacttccatggtacaagaacattgtcgattacggtaaatttgataaacaagatagatagatccactaagttttaacttaggacaccacgaacacagattatcagagtaaacaagtaaatccagaagtcaagaattgccaaaacttaaattaaaatacgtaacaaaacttcctgttcgcctcattcgacattgaggtcttacccgggtttccttccccgaggtttcccagcaggcctttttcctttctggcctgctttaccagtgcccttctgcccgttcctaccgggctttcctcccccacgtttcctatcatcactcttcatcctcctatccactctcttctgtcccttaccaactttaaccccaactcctttcttagacacaaccagttctttccttggctttcttggctctgctgctttcttgtatagcttgtctatcatcttgtcctttgaacggtctgatatatctgctgtgtcagatattgtgtttgccttcttcctcactttctccaatcttttctgggcagctcgcttcttccgtgccttggcctctgccaccttcttggctggacgagcattgatctctttgaactgtgctttcattgcattaacttcatctttcgtaacaggtttcattggttgtctgtgctgcttctcgtcatccacaaaccattttggtaaaccttcatctacaaacatgtgtttgttatatgcatcatcaagcatctgttctctctgcttcttcctcagcatttttttggcacatgccagtatctcggccttggtatgaacatcatcttcagaggatgaatctgagtcagaatctgtggctggtgcagggactacctcaaactcatcttccttcttggagctattgggcaagctctgatcagacaacacacttgcttttgaagccttctgctttgacttgtctggtttagacagatttttgctctttttcttatttgctatttcgtcttcactgtcatcttttcccaagtctccttcttccacggcttctgcaaatatattctgactgaaccactggttggatatttcctcctttgtttggaccactccatcatcaagtggtacaacaagagggtttgcctcatccttttcttcattcatatctgaatcgtaatcgatcttcatttcttcatctccatcaccttcctgcaaagccaaaaagaaaaaagtgtttagttccaaaaatctgttctatcctaagaaattggggtaagaaaatgatagtacctccagcttttcagcatgggcctgcctagcccgcttcctttgctttgcgcttccttctttcttcaccatataccgctcatatgcctgctcaaaaatctcttccatttgttcagtgtatctgtaatgttaaaaagactattaagatgaagtaactccacaaacttcagaaatatacgacgttcttgtaacagcactctataatctacaaaaaggtataggtttagcggtcgtacttctgacgttcttcatcagaatctctgtcactgtctttggagtcatctgaagctccttcgccatggtcttcgttctcactgtcaacggcattgccattatcatcttcatcattgtcaactgccattagatctttctttccctgtaaagaaaataaatgaaaatctttacaatctcattcagaatataatgatatgttcaaacaattgaattgtaagaactgatagcagggtgaaaggagaatgctcttcaaccaatgaaagagtaataaacacttcttcgaatgccatcataataaacaaaattccgcagagatggtatcaaaaatgaagtaccttgatagcattaagagagaacaattcattgtcgacgaaaccatcttcaagtacatccatctgtggaccagtcgccttccgcgccttgtcctggcaaaagatattgaatttagtgaaggaagtataaagtctaagggatccatcactaaggccactgactaagacataaagacttgataggttattatcataaggttaaaaataaccttagcccttcgttttgcaagaatcttctttgcctgtttcttcttgcggtcaactgtgtttgtcagctcttccaattcattgagtagtttatcatcttcattttcctcatcttcctttcccacatcaggctcaggtttagcaacttcctttttctcaggagtcagagctttcctgatttgcattcgccatctacaaaatagagagttcaatgaccattaagcaactaatataatttctagacgcatagatggatgacgacaaatgctaaagtcttaacaaaaccagtagtttcccacacgccaattcctaacacccatggacacccgtttacccatttcacacagtgctttatcgggttgagcactcaaaacagcataggtaaaaacttgaagtgctaaggaaaccgttctttaccgaaccaatttacagctaactaattctacaatagctgaattcattttagtcaaagctctaccacatccttggaaaagcttagaaattaacaagtgagacataaagattaaaaagatccatgaaggagtcaataatactgttcttactttaggatatgcttgaagtcattcttccccaagacaggaagatcatcgcatagaattttaatctaccaacagaaaaataaaacgttaccatggcgtagagaaggacataaatacttgattagcaaaggtatggaaaattagaaacagtacctcctctgtcgtcaaatcatgttcctttaaaggtagagaggcttgatcatcaaatgatatggaagtagtcgtgccaagaacgtcaagaggattttcagaccaaatgaaatcagcagcagatgcaactcttctcaaaatggactccccatcttcatacctgtaaattacactcggttataaaaagttcatctataacgaagaaaaaacagatggcggattttgcctacccatcacggtttctcttttgttttgatcctccaagcacatccaccacctgcaaacacaagtagtattacacacaaaactttagggacaatgggagagttgtaaaaacaactccaaacaccaaataagccatagtgattacctttctcgtgggttctgctgactccttaaagagatgtctataatcaagaagacggggatcaatcttggcaggggctaagtatttcaaacccacaagatatgtttctgcagatgctgaacgactagccggcggcttaaacacttcaactttttcaaacagctgaaccaataaaaatgccaataagaaaaaaggctcgggaacacacatctaaatgaaaaagaaaaaagaaaaaatcagagttataaacaaacagtaccctcccaagacagtagagcacagagttgtagtctcgagacctgaaaacctaagagcagaaacacacataaaccaaaatttcagaaaagtcacatcactgatggcacaagatcaaagacagaacaaattcaaaataaaacaatcggaaagtaagtttatttcagaagcagaccttggtgactaaattcccgttgcgagctaagaactcagtggctaatctaacagaatcaataaccaaagcgttctggctcatagcctcttgtgcccacgcaccaccaacatttggagacccatcgtgcagaaccaaattaaaagcactaacaccatgctgctccatcacttgcttgatcttcgatttacactcagtccttgtgatatcttgcgtcatagtaacacagccacgaacagggagaatcgggacaagatcgataccgagaacgaggctgccgacgggaactttctcgacggcgacttgcatccaaccaccaggggcggcgcagagatcgagaacggcatgagctgagtggagaagagagtacttggcgtcgagctgaagaagcttgtaggaagctcgagaacggaatccacgttccttagcgagacgatagtacttatccaaacgatgctttcctttgaccttacccatggcgatattttgctagggtttcgttctggttctcagcacacggaggcagagaaatagcaattggggaggaagaagctactcagctagggtttagggtttattccgccttagtgtaaacccttcgtctcacagagaggatttcaaatttctattttggacaggccctttaacctctttctgatgggcttcttaaacggccctttaatatgtttagaaagaagctcaacttttttgtcaacaatctaagaaacaagatgttgtattggaagcaacacagacgaaattgaggtatcaagtggattgttcttggaacactaacatctagacgaagttggatttattgttcaacgttaaagaaagagttgcgctatgtccgataaaaaatttcttgtaaggatattgttcaaagattagactagaaagaaattggatcaaattccaatttagcattgaatcccttttgtcttttgtagaagttaagacgaattctctaatacacatttccacttcaatattttaccacactagattactaaagaagacagatttggtctccctcttcttgttcttaaaaaggcaaacctaattccatgacagatagagtaagaaacatgaattttgacactaatcctgaaactacaggatttgttcgtttaaaccaaggtgaaggtaatagatagattatagattccagatttgcattacacaaacagaactagaacaaaaaacaaaactgtccttccatcgtcgcaatatgacaacaaatttttcaagggaaccctgaaccagatggtgctgctgcactgtaaccgcctgcaccacggccaaaaccaggcctaccaccacctccctgccaacatacaacacgctgttagacaatctcttcatcaactagctaaaagactttaaacgaagcatattggcacagttaactaggagtgattagtaagtggaaggcatataggctcagtaaactaggagtgattagtaagtcgaagatttacttggaaagacggctggaaatcagctggagctccacccttctcatcaccaccacgtgggcctccacggtatccatcacggtcaccaaatctgggacggtctccatcagagcgaggtggtcctctgaaaacaaaagccaaaacaatatcagaaattagccaatccctcagaccggacaggtcaagggatttaaagatgaaactacctttggcgatcaccaggtgggccaccaaagggacgaccaccgggcttagcagacttcttcaaagtagcagggacaacatcggaaggaaggttaagataagttctcaagaactcaattccttcattagtcagaaaccaataataatgcatccacgcaaatgtctccctaacgtactccttggacttgaaactctgcatgagcttaatcacttgcaggtttggtacatcaatcaacggatgctttgggagattgaaatccttcttagcaaagcatactccctctacgaaacccagtaagatatgatcatttagtatccacacaaattctttctctagacaactgagtacagtactagataataaatccctcaacagttatataccaatctatcatactcttcaagaattataacttatgaacaaacattgttagatccagcattccaattactctgaaccttacaatactactttataaacaagttcatatctaaaatcgtaggcctaaaaggagctgaaagcaagcataaatcttttcacatttcaatgcaattgtttctcactacaagcttagattcgaagatccctagagaaatgtaactagcttaaacctggttccactagctgaaaatagaaggaaatgaaagagagcatgactcacaaacctttgaaaaggtatttgcagatctctctgcgattgttctctgagataatctgataaaaggacgaacaagatcacaattaatactcggataattccttccattacattcagtaaatatgtaaatttagagaaacagagtagaagcagagtatgtgtataccatcgtcttgttggttgagctttcgctgcaaagaggcactgagcttgagcaaaggggagcaatagggttttctgcggataaaagacgattagattatatattacggatttgggcttttattgggctgataatctaataattatttgctacaaagctggcctttacatggtccggttagatggttaaccggttccatattagatttcggagtcccatagtgaattttcttctgttaacgggagaatcataggctgacctagaaaaaaaattcacataataatgaccaacaatgaattaaatcatagtaggatgattcaaattcttgttcttggactaacagattaatttgcaaccactaaaacaccatagttggaaattatgaatttgagaattgagattttatttaaaatcttgtagtttggtaagtgaatcattcaattacagtcacattctaggatttgtgtatctatatgatcttcactcattaaggtttcggcgctagatttcatgctaggcttaaatttttactcaatccaatcttactccttcactcgccacctagtgaagtcaacggacaagtttgtcataaaataatgtagacgtcaatgttttttggagacacaagtatttggtcccaacaactcatgttgctttctccagccgtacatcacggtcagaaccaattttgtagtgggcgaacaaagctgcttgcatattgattcagtgactcaagctgaggaacacaatcttaaagacatgctgatggagtatgttaagtagattaggtggtaatgtaaaccttgcttctcaagaaacgtattccttgtttctcaagtttgaaaccggataccaatgacggacgtcccaacacatatatcctattcaagttcccaaactccaagattaaaacgtgatatacatatgaattttaaatttttgagtaaacctttgaagttagtaataaaaaatgaatttggattataactgagtcaggaagccagcttggtcgagacaaaaattacttgctaaacaaaaatgttcacgggcgaccaatgaagttgcatgtccgtgaacccatgaatacaaaagagatgtggcattttgtatgtcaacttgagcacaactatttattgatttctactttattgtttgtcaacatcgtgaatgcctacttcttaaccaaaacaatttttttttacattgttattgaccaaaaaaaaaaagtagctcgctgtttgtttttggataagcagacgtataaattgatgtacccaaagtaaagtctaggatctgcaacaataatagatgaaatcatgaatattaacatcgctttaagacacggccactaacataaatgataaaacaatcaagatcatgaatccaaatcacaactgaacttttaaataaacctttaattttatatttgtacatacatttagaacaataatgtataaactgatatggttttccagaggaggtgaagaccatgtagacccgtgacgatctcttttttttggccaagttagaagatacacgaacatggctcaaatatctcttaatccagtagattctctatattccctgcacacgtaacccaatcatagaaggctagatagtacatcaaatagttctcttggttttctagtgacattatgaatgtatgtgaagctcatggatatacacactaaatacatgatagaacaatgtataaaacgaaaaaaataaaggaatttatactttcattaactcatccatcaataaattgcttctttgtgttcatccatcaattaatttgcttctttgtgtatataccacgaagtctacagaaacaagaaaatcccttatatataaaattaagcttaagaaattgaaaagcatttatcttttggaacccgaaacccttttaagcaaaacaagaaaacacaaaacacgatatagtacgaagaaccctaacaacatataaacattaaaccacctctgtctctcatgaagcccattcttgtctaacacgtcacctccagtaactaagcagctattcacagaagcttcctcaaaccagaccaggcacttgttgtgcagacacgagtactcatttatcagaagtgcgtccaacgcatacttgtacattgagaagaagtacatgaagagccagtacttgggaagactctctttagagatgaagtaaccagagaacaagaagaaagccgcaagaagaatggtcactgaagatgttccagcaatgtagttaggtgcgagagagctcaagaaaagtacaaaagagttagccattaggacaatgatccagattacgagcacaaagtaggcgagagcttgccatgaaaagcagagtcctacaaggaaatagagtgagacagagtagatgattgcgatgagtagcaagtatggcaagaaaaccaaagtgtttgcaagaatgtgagaggagagtctgtagagtccgcttgaggtttctcggagaagaataggtcgttcatcaatgaatattggaagggtttgggtagtggaggagaggaggaatgtgagggtgaatgcgaaaaggccaaatcgtttcctgattccttctttgccagttccgatattaaggtagatagtgcctaagacaagaccgactacaagagattctaagatgtttgttagaagcaactgccttgtacggtatatgatcttccaaaacctgctagagagaaggcttatttcggtgattctcgagcttttatatcgaacaatgctctgtttttggttctgttttttactttcagggcagtggtctggaagagcaatgttggcgttttcgtagggatcacggatgttctgaagtatctccatagcgtactcaagagaattcagctgagaaggaaccgtgaatcccttggagagcaagaatgcttcaagtaagtcaagccttccatgatatacaatggttcctttagaaaggagtaacacgcgat

SEQ ID NO: 628 - DNA, 91228 bp, Arabidopsis thaliana
gaattcttttttagaaaactttttttaaatcgatcgttcaatattggaagcttattaaactactgttctcaatccagatgtgaatattaggaacttccatggtacaagaacattgtcgattacggtaaatttgataaacaagatagatagatccactaagttttaacttaggacaccacgaacacagattatcagagtaaacaagtaaatccagaagtcaagaattgccaaaacttaaattaaaatacgtaacaaaacttcctgttcgcctcattcgacattgaggtcttacccgggtttccttccccgaggtttcccagcaggcctttttcctttctggcctgctttaccagtgcccttctgcccgttcctaccgggctttcctcccccacgtttcctatcatcactcttcatcctcctatccactctcttctgtcccttaccaactttaaccccaactcctttcttagacacaaccagttctttccttggctttcttggctctgctgctttcttgtatagcttgtctatcatcttgtcctttgaacggtctgatatatctgctgtgtcagatattgtgtttgccttcttcctcactttctccaatcttttctgggcagctcgcttcttccgtgccttggcctctgccaccttcttggctggacgagcattgatctctttgaactgtgctttcattgcattaacttcatctttcgtaacaggtttcattggttgtctgtgctgcttctcgtcatccacaaaccattttggtaaaccttcatctacaaacatgtgtttgttatatgcatcatcaagcatctgttctctctgcttcttcctcagcatttttttggcacatgccagtatctcggccttggtatgaacatcatcttcagaggatgaatctgagtcagaatctgtggctggtgcagggactacctcaaactcatcttccttcttggagctattgggcaagctctgatcagacaacacacttgcttttgaagccttctgctttgacttgtctggtttagacagatttttgctctttttcttatttgctatttcgtcttcactgtcatcttttcccaagtctccttcttccacggcttctgcaaatatattctgactgaaccactggttggatatttcctcctttgtttggaccactccatcatcaagtggtacaacaagagggtttgcctcatccttttcttcattcatatctgaatcgtaatcgatcttcatttcttcatctccatcaccttcctgcaaagccaaaaagaaaaaagtgtttagttccaaaaatctgttctatcctaagaaattggggtaagaaaatgatagtacctccagcttttcagcatgggcctgcctagcccgcttcctttgctttgcgcttccttctttcttcaccatataccgctcatatgcctgctcaaaaatctcttccatttgttcagtgtatctgtaatgttaaaaagactattaagatgaagtaactccacaaacttcagaaatatacgacgttcttgtaacagcactctataatctacaaaaaggtataggtttagcggtcgtacttctgacgttcttcatcagaatctctgtcactgtctttggagtcatctgaagctccttcgccatggtcttcgttctcactgtcaacggcattgccattatcatcttcatcattgtcaactgccattagatctttctttccctgtaaagaaaataaatgaaaatctttacaatctcattcagaatataatgatatgttcaaacaattgaattgtaagaactgatagcagggtgaaaggagaatgctcttcaaccaatgaaagagtaataaacacttcttcgaatgccatcataataaacaaaattccgcagagatggtatcaaaaatgaagtaccttgatagcattaagagagaacaattcattgtcgacgaaaccatcttcaagtacatccatctgtggaccagtcgccttccgcgccttgtcctggcaaaagatattgaatttagtgaaggaagtataaagtctaagggatccatcactaaggccactgactaagacataaagacttgataggttattatcataaggttaaaaataaccttagcccttcgttttgcaagaatcttctttgcctgtttcttcttgcggtcaactgtgtttgtcagctcttccaattcattgagtagtttatcatcttcattttcctcatcttcctttcccacatcaggctcaggtttagcaacttcctttttctcaggagtcagagctttcctgatttgcattcgccatctacaaaatagagagttcaatgaccattaagcaactaatataatttctagacgcatagatggatgacgacaaatgctaaagtcttaacaaaaccagtagtttcccacacgccaattcctaacacccatggacacccgtttacccatttcacacagtgctttatcgggttgagcactcaaaacagcataggtaaaaacttgaagtgctaaggaaaccgttctttaccgaaccaatttacagctaactaattctacaatagctgaattcattttagtcaaagctctaccacatccttggaaaagcttagaaattaacaagtgagacataaagattaaaaagatccatgaaggagtcaataatactgttcttactttaggatatgcttgaagtcattcttccccaagacaggaagatcatcgcatagaattttaatctaccaacagaaaaataaaacgttaccatggcgtagagaaggacataaatacttgattagcaaaggtatggaaaattagaaacagtacctcctctgtcgtcaaatcatgttcctttaaaggtagagaggcttgatcatcaaatgatatggaagtagtcgtgccaagaacgtcaagaggattttcagaccaaatgaaatcagcagcagatgcaactcttctcaaaatggactccccatcttcatacctgtaaattacactcggttataaaaagttcatctataacgaagaaaaaacagatggcggattttgcctacccatcacggtttctcttttgttttgatcctccaagcacatccaccacctgcaaacacaagtagtattacacacaaaactttagggacaatgggagagttgtaaaaacaactccaaacaccaaataagccatagtgattacctttctcgtgggttctgctgactccttaaagagatgtctataatcaagaagacggggatcaatcttggcaggggctaagtatttcaaacccacaagatatgtttctgcagatgctgaacgactagccggcggcttaaacacttcaactttttcaaacagctgaaccaataaaaatgccaataagaaaaaaggctcgggaacacacatctaaatgaaaaagaaaaaagaaaaaatcagagttataaacaaacagtaccctcccaagacagtagagcacagagttgtagtctcgagacctgaaaacctaagagcagaaacacacataaaccaaaatttcagaaaagtcacatcactgatggcacaagatcaaagacagaacaaattcaaaataaaacaatcggaaagtaagtttatttcagaagcagaccttggtgactaaattcccgttgcgagctaagaactcagtggctaatctaacagaatcaataaccaaagcgttctggctcatagcctcttgtgcccacgcaccaccaacatttggagacccatcgtgcagaaccaaattaaaagcactaacaccatgctgctccatcacttgcttgatcttcgatttacactcagtccttgtgatatcttgcgtcatagtaacacagccacgaacagggagaatcgggacaagatcgataccgagaacgaggctgccgacgggaactttctcgacggcgacttgcatccaaccaccaggggcggcgcagagatcgagaacggcatgagctgagtggagaagagagtacttggcgtcgagctgaagaagcttgtaggaagctcgagaacggaatccacgttccttagcgagacgatagtacttatccaaacgatgctttcctttgaccttacccatggcgatattttgctagggtttcgttctggttctcagcacacggaggcagagaaatagcaattggggaggaagaagctactcagctagggtttagggtttattccgccttagtgtaaacccttcgtctcacagagaggatttcaaatttctattttggacaggccctttaacctctttctgatgggcttcttaaacggccctttaatatgtttagaaagaagctcaacttttttgtcaacaatctaagaaacaagatgttgtattggaagcaacacagacgaaattgaggtatcaagtggattgttcttggaacactaacatctagacgaagttggatttattgttcaacgttaaagaaagagttgcgctatgtccgataaaaaatttcttgtaaggatattgttcaaagattagactagaaagaaattggatcaaattccaatttagcattgaatcccttttgtcttttgtagaagttaagacgaattctctaatacacatttccacttcaatattttaccacactagattactaaagaagacagatttggtctccctcttcttgttcttaaaaaggcaaacctaattccatgacagatagagtaagaaacatgaattttgacactaatcctgaaactacaggatttgttcgtttaaaccaaggtgaaggtaatagatagattatagattccagatttgcattacacaaacagaactagaacaaaaaacaaaactgtccttccatcgtcgcaatatgacaacaaatttttcaagggaaccctgaaccagatggtgctgctgcactgtaaccgcctgcaccacggccaaaaccaggcctaccaccacctccctgccaacatacaacacgctgttagacaatctcttcatcaactagctaaaagactttaaacgaagcatattggcacagttaactaggagtgattagtaagtggaaggcatataggctcagtaaactaggagtgattagtaagtcgaagatttacttggaaagacggctggaaatcagctggagctccacccttctcatcaccaccacgtgggcctccacggtatccatcacggtcaccaaatctgggacggtctccatcagagcgaggtggtcctctgaaaacaaaagccaaaacaatatcagaaattagccaatccctcagaccggacaggtcaagggatttaaagatgaaactacctttggcgatcaccaggtgggccaccaaagggacgaccaccgggcttagcagacttcttcaaagtagcagggacaacatcggaaggaaggttaagataagttctcaagaactcaattccttcattagtcagaaaccaataataatgcatccacgcaaatgtctccctaacgtactccttggacttgaaactctgcatgagcttaatcacttgcaggtttggtacatcaatcaacggatgctttgggagattgaaatccttcttagcaaagcatactccctctacgaaacccagtaagatatgatcatttagtatccacacaaattctttctctagacaactgagtacagtactagataataaatccctcaacagttatataccaatctatcatactcttcaagaattataacttatgaacaaacattgttagatccagcattccaattactctgaaccttacaatactactttataaacaagttcatatctaaaatcgtaggcctaaaaggagctgaaagcaagcataaatcttttcacatttcaatgcaattgtttctcactacaagcttagattcgaagatccctagagaaatgtaactagcttaaacctggttccactagctgaaaatagaaggaaatgaaagagagcatgactcacaaacctttgaaaaggtatttgcagatctctctgcgattgttctctgagataatctgataaaaggacgaacaagatcacaattaatactcggataattccttccattacattcagtaaatatgtaaatttagagaaacagagtagaagcagagtatgtgtataccatcgtcttgttggttgagctttcgctgcaaagaggcactgagcttgagcaaaggggagcaatagggttttctgcggataaaagacgattagattatatattacggatttgggcttttattgggctgataatctaataattatttgctacaaagctggcctttacatggtccggttagatggttaaccggttccatattagatttcggagtcccatagtgaattttcttctgttaacgggagaatcataggctgacctagaaaaaaaattcacataataatgaccaacaatgaattaaatcatagtaggatgattcaaattcttgttcttggactaacagattaatttgcaaccactaaaacaccatagttggaaattatgaatttgagaattgagattttatttaaaatcttgtagtttggtaagtgaatcattcaattacagtcacattctaggatttgtgtatctatatgatcttcactcattaaggtttcggcgctagatttcatgctaggcttaaatttttactcaatccaatcttactccttcactcgccacctagtgaagtcaacggacaagtttgtcataaaataatgtagacgtcaatgttttttggagacacaagtatttggtcccaacaactcatgttgctttctccagccgtacatcacggtcagaaccaattttgtagtgggcgaacaaagctgcttgcatattgattcagtgactcaagctgaggaacacaatcttaaagacatgctgatggagtatgttaagtagattaggtggtaatgtaaaccttgcttctcaagaaacgtattccttgtttctcaagtttgaaaccggataccaatgacggacgtcccaacacatatatcctattcaagttcccaaactccaagattaaaacgtgatatacatatgaattttaaatttttgagtaaacctttgaagttagtaataaaaaatgaatttggattataactgagtcaggaagccagcttggtcgagacaaaaattacttgctaaacaaaaatgttcacgggcgaccaatgaagttgcatgtccgtgaacccatgaatacaaaagagatgtggcattttgtatgtcaacttgagcacaactatttattgatttctactttattgtttgtcaacatcgtgaatgcctacttcttaaccaaaacaatttttttttacattgttattgaccaaaaaaaaaaagtagctcgctgtttgtttttggataagcagacgtataaattgatgtacccaaagtaaagtctaggatctgcaacaataatagatgaaatcatgaatattaacatcgctttaagacacggccactaacataaatgataaaacaatcaagatcatgaatccaaatcacaactgaacttttaaataaacctttaattttatatttgtacatacatttagaacaataatgtataaactgatatggttttccagaggaggtgaagaccatgtagacccgtgacgatctcttttttttggccaagttagaagatacacgaacatggctcaaatatctcttaatccagtagattctctatattccctgcacacgtaacccaatcatagaaggctagatagtacatcaaatagttctcttggttttctagtgacattatgaatgtatgtgaagctcatggatatacacactaaatacatgatagaacaatgtataaaacgaaaaaaataaaggaatttatactttcattaactcatccatcaataaattgcttctttgtgttcatccatcaattaatttgcttctttgtgtatataccacgaagtctacagaaacaagaaaatcccttatatataaaattaagcttaagaaattgaaaagcatttatcttttggaacccgaaacccttttaagcaaaacaagaaaacacaaaacacgatatagtacgaagaaccctaacaacatataaacattaaaccacctctgtctctcatgaagcccattcttgtctaacacgtcacctccagtaactaagcagctattcacagaagcttcctcaaaccagaccaggcacttgttgtgcagacacgagtactcatttatcagaagtgcgtccaacgcatacttgtacattgagaagaagtacatgaagagccagtacttgggaagactctctttagagatgaagtaaccagagaacaagaagaaagccgcaagaagaatggtcactgaagatgttccagcaatgtagttaggtgcgagagagctcaagaaaagtacaaaagagttagccattaggacaatgatccagattacgagcacaaagtaggcgagagcttgccatgaaaagcagagtcctacaaggaaatagagtgagacagagtagatgattgcgatgagtagcaagtatggcaagaaaaccaaagtgtttgcaagaatgtgagaggagagtctgtagagtccgcttgaggtttctcggagaagaataggtcgttcatcaatgaatattggaagggtttgggtagtggaggagaggaggaatgtgagggtgaatgcgaaaaggccaaatcgtttcctgattccttctttgccagttccgatattaaggtagatagtgcctaagacaagaccgactacaagagattctaagatgtttgttagaagcaactgccttgtacggtatatgatcttccaaaacctgctagagagaaggcttatttcggtgattctcgagcttttatatcgaacaatgctctgtttttggttctgttttttactttcagggcagtggtctggaagagcaatgttggcgttttcgtagggatcacggatgttctgaagtatctccatagcgtactcaagagaattcagctgagaaggaaccgtgaatcccttggagagcaagaatgcttcaagtaagtcaagccttccatgatatacaatggttcctttagaaaggagtaacacgcgatcgatgagagacaggatcttgaagctaggttggtgtatggacaagatcacgatcctttctctggacgtcgcaatagatttgagaatttgaacgacatcgaaagcggatttactgtctaaacccgaggtgggttcgtcgaggagtagtacttccggatcatgaagaagacttagaccaattgaaaccctcctgcgttcaccaccggacaagccttgacctagtcttgtatgtgcaagatgtgttaggtttagttctttgaggagagaagcaacgacactggagacttttgataggttttttgggagcaagagagaggcggagaaagtgaaggtctcggagacggtgaggagagggaagaaggtgtcgtgttgaggaacgtaggaggagattttacggtaagaagaagggttaataaggacggagtttagaagtattgagcctgaggtcggggaggttcttgcggcaaggatatcaaggagagttgattttccggcgccgctagggccaataatggcgaggatttgggaaggatgagaggtgagagtgatgttgcggaggatgaaggaaggttgctccgccgtgaggaggagcggtgaaagaggtttggcgtaggagatggaagaggtggataaagtgtacgactccattttgagagaaatgtttaaaggttggagaagggaagtgagtgttgtaaagagaatttattgatgcttgagtttggaatgttttgtattttccaatgaaattgacaatttttcagtctttttttctttcttatttgttttttgaccttttggttaattattttgtcttttctgtcattttgaattttgcgttacatagaactcatcgaatataattgtggtcaaacggtgatgtaaccaggatgcgacagtaagacaagagagagtcagatattgaagagatcattagagattcaagtccaaattaagatggagttattagtgagaaggtggatccagaagaaacgaaaattcttagatatattctcataaagaaagcttgctaacagttacgtatacacacatttattgaaaacatgtaaagatggatcaaatgaatatgcatgtgtgtcatagtgaatatatattgttgagaaactgagaagaagaaagccaaaggggaatgcagataaaggtcacgggcctgctgacaattattacacagaaaattgcaaatcacgtacaagtctatttcccaatctctgcatcttcctttgtttgtttggcacacaatttgccaaaccatttttacaattacatattaatgacgtgaccagtcctggatttgaaggagtttctataaaaacaatctggcttaaacgttagttagttatagttacttgtggttgcttttactttaggtatatcaccgtacatgcaaatgaataaactttaggagttaataggtgaaataattgtaaatggtacaatttctttatctatgaaagaaaatattctaaacagaatttgaatcatattatagtaacttgttatacatatcacatatgtgatatgtttatatagtttgttatactaataaagcattctcttcactttctttggccatcaatatatccgtatctcatgttgtgtttttcctaaatttctacacataataaaaagtagcatgttgtttcaaagccccttaacgggtacaaaaacaagaacagagtgcagggctaaacagaagaaaattgacattaggaaatcagaaataagcccatttgaatgtggatcaatattgaaaaaaatgtgtgaaaagcaacttgcaatgtcacaagataaatataccatgccgtatatatcataactgcaagaacagacccaaaactgaaaagtgaaaagaatgtgtgtgggtaagttaaagagtaatgaaggccgacaggcgacagtggaggaggatggaccagaccagggtgctgggcgatgaggacgtctcggctaaaagctgaaccaccctccactcttaggtcccacaaaggctggtcctcgttcacaaatgtactctctcaaagaaacacccctttctgctttattactattccctctcgttcctccacttttttgtagcagcttccacatgaatcatgtcataactgttacaacatattccaaaaaaaaaactatagaatatatgtaggaaatgttaatcactctgttttttttgtatctttactctttgtttcttctcactagataccgtcctatacttctattagtgcataacacttccttagacacttgcttttacactttccaaaattattttaaacatgtatgtatatgatcatgtcgccatggttgacgatatatacaattattgtactttcatctccttttctcatcttttctttcaataaaccttatttttattaccatatcttctctttttcttgctagcaaatgttgattattttattgtaattaaactgttgtttatgacttaatgttcaaacttcaaataacatgtgtgaactgtgaggcatgcaataatgatatttgttgcatatctatcagtttttaaaagtgtcatcatagctctataaagctgtctatttaaattagatatacctatctcaagttcactaatccgtatctaaagagaaagaaaaatatcttgataactaaaaatgagttttagaatgtacggagataagttctgaaaaaaactgaacgagccacctttaaaagtaattagatgaagaaataaacacaatttgaaaaactacatgaaagctaatctctgacttgagaagttgagatatttggaacctttgttaattctttcaacaccgaaaacgatttcttaggaaatttcaaaagaaataaaagtaaagagggcaagtattctgattgttaaccaagcacaaaatgaagcacccatcaatcaatcttttcaacaatcaacataccgattctaattggtctggcagaataattaccggaaaggaagaagaatagaactccaatatttaattatcgtacttaatctgtttgttcgagaaactaaataatgggttcctaggtatatgtatttattttatacattatcttcacatgtaacgtgcctatttaacgagaatatgattccctatgattcatgcacaaacacaaatcaaatccggaatttaagtcggatcagggaataaattatacagcccacacacataataatttaaaactaatatatacacagtgaggggatttaaaagtaaaacttatctccaaagattaatgtaagcgactagtgattgtgttggcatattaaccgcacataacattgtttgggggtttggatgctttaaaaaaggttctgccttagaaattccttttagttgacgtaatgatatattattgcttactgtaatactagtggacacattaaacaatgatcttaaagtacgaatgaagaaattaaagaaaatggaagaggaagaatgtggaaatggagaacgtaagtgaaagtgattggaaactaatggaatatccgtttttcctttagtcatggtggaagctgacgctgagaacctacccctccaattgcactactcgctctattactttatctaaccagaagttttttaaataccctttactgtatatagttcttacagttttatacatattgttaagaactccatatatagtgtataaatggcattgaaaatagttttgagttgaaactcctaaatgatattaaatcttgagtttaacctaattaagcaaagtaataaaaactgattagccaaaacaaagaggttagttagttcaacagttaggttaatgtgcaaattgccgtaacaagattattaaataattcttaactttaattaacctctatccattattgcatttaaaagatactattaattaaaagccaccaataaaaatttaaactttattaaagtactaaagacggatatattaaacaaaacaattatgaaaaaaataagaaaaccaacttaatacaagttcaaattaacatccaaaagaaggaaatatacatgattttacaaatgtcttcattgagccaccacgttaaactaatatcatttttgaggttgattaaaaaattattcatgtaagtataaatgcaaaaaaaaactacatctctatatcaaaaaccaatcaattgtttactccattatggaagatgattccctaaaaaataatttcgttaatactcactctacaaagtacaaataatgaatactgacttttttcatacattccaaaaaaatactgaaaactgaaccatacacaaatccattgcattaagaaacaatccatcccatacgttcctctataaaacgcctctcacaacacaatctcatctcccaccaataaattaattacttttttaacaaagaaaactttcatttcattcactcttcccaaacagtaaaacacacatgcagacaatggaaggacgacaatataattaccaagacagcataaacgcgagctcctccatggtggtgcctcactcgccttggcactctccggttccttatctcttcggtggtttggccgccatgttggctctcatctgcgtcgctcttctcatcctcgcatgttcctactggagactctccggctccgctgagagagatcttgaggccggagatgatgccaaacccgacaatgacaccaacaaaactaagcacacagaaatgccggagaagtttctcgtcataatggccggtgatgtcagacctacttacttggctacgccagcgactcggtctgagcaaagctgtacttgcggcgatcataacgaagaagaaggaagaagagggtagtgatcaggtggtatagcagagcaccggaggttacggtgagccctccctcatattttgaaaacagagcattcgttacggagtactccggaatcgatccgtccggtctttttgtgtcggttcataattacgccaaccttacgtgagctgatgggatataaattagagttttatttatttcgtatggttttagtttttttttggttgtctcagttttcttcaaatttttcccgtttatggttcatgaaggaatatccggtacatgtaaattttaagagtttgaatagatgattgttttggactagcgattaaagatagaactgaagcttgacagacaaaataaataaaagatacaactaaaatcgtgcgtccttaattcagttttcgtgtatagagagacaaaaatgttttcccagtgagagatgtacagacatgatgcttacgaaagagggaaagagatgtgttgtgaaaacttctagtgatgtgccaacaatgacgcatgccgaatattaagctaattcgttgtggcgaaccgaagttgagaattattctctttgtacctttattcctaaatttctagatatattactaaatatcatcaagttttatcaaagaacaaatagcctctcaactatacatttctctctttttttcttttccaggcatatccatttatcattgtttaccattcactgaaattgaaagcattatcgtttatcgttggacaataaattgtcgtcttttggatgatcagtacaatgtgaacagtgacacatataatggatggagactactgcaactaactgaataattgtttttctagtatgggcaattggtcactggttgtgtcatgtgtttacgtcctttcgttttcttgtccaattcctactatgtttattatgtgaacgtgtcaaaacaaacgagctcgcaaatgatgccaataaaactggaaaaccaacaataattgtggaaaaatcgacattcaactggcgccaagtcttatgatcaaaacaaaaacttatagaatcgatagtgacaagagaagtatgaaccttttttttttacaaagaacgggtagatctgtacagattcattgttcgacagaactataaaacattttaaataaccatcaaggaaaaagtgccaagaactttaccacgatttgtatcgcatcaagcatcatactaaatacgatataaataaccaacaaaaaagagaagaagtttgtgatgcttatcgccttcttacagtgctgactaattgcagcggttgaaaatgtttagggctagagaccgaaatgatccatcatgtggaagacaacatctttgccatcagaatgtaaccaatatgttttcacctacacattacagggaaaattatgtcaaatgctcttaacaaaatcgcttttgagttttgagttcttatcattaaacttgcctggatggtactatgcgcgacgtatcgttgcttgctattgtgaaagctgacatctactctttcccaagatagttgactgagtccatgtatcatttcctctacatttcacaaaaaccataacaggacgaagttagtgattctacttgttataaagaagaccaatgggtaatagatagcgaggcaaggatctaccacattccataaatctgatagagatatcattttttctagcaaattttgaaaaacaaatagtcaagtgagaaataaagcaaaaccttcaagatcagtatcttgctctgttactactgtagaagttgactggcaactaccattgtccacatttccacgttctacgtatacaatgtgtggatagtttggatccgttgctagaagatttggctggaagatgagcagggataatagttattgataaatcccacaacgtcattaaagatgtgcacaaaatataataagtaaagacatacctttgggagttcatttggacggcgaattgaagatgtcctccatccaaccatagctttctcattagttaaggcaaactcttgtaaatgatagaaataatcaaaaaccattgacagtctctttaaaaacatgtttttttcagggaaggatacaatcaaaattcacgtttgcatatgccacacgacgcttgaaagcatttaaagctgatctgttgaggtcataagaagagatgatgagcatatcaatctgcaagtcaccaatgaaaacacccagaagctagagcatttacatgaatttcaagtcatcagaatctgtagccatccggataagaagtggagcatttccatcatcgttgtccaccagaaacaaatgctttccggtcctcccagcagccaaatgtgcagtttgggatgctgttctttcaagaaacggaaggccacaaagaatcgggaactgagggaatgaagacaagagtaagcatgtcatacagattacagaaagagattatctatatatatatatgcaaaccttacataaacatttgacctaggcatgcagtctaaaacatcaattcacctgtctatgtcctcttgaaccaagatgaggcgttgcgaaagttataaagttcataggttctaacccagcaatttcgcctcctcttgcgctcttctccttcgaaggagagtccagagagtcgacttcccctggctgttcatagagcttccctatggcatatcttgcaacaagacctcctaatgaatgagccacaaaagatatcttcttcagcccacttctatgcttaacaacacccaaaaccttcacaaattttcaaacatagaaatcaaattttaagttgcaagttacagaggaaacaacaatgcatccaaatactacctcattagctagcctttcacccattttatcaacaccatcaaatgtcaacgttgcactattactctcgctacctgcttcatccaatttcatcatcaaaatcaaacaaatcataaaattacagagtaatcaaaaccacaatatctataggtcaagaaacacgcacggtgcactagtactttatccgggaacttcttcacgaactgctccgccgcatatttccaatccgccgcactaaatcatcatccaacacagaattagcacagtctttaacccaaactatagtaatctgtaattctaattgaagctctttgatttagtctacctgccaacgattccgttaaccatgaccaccaaatgatcaggcttctccgcagactccataacatccgcatcgaaaaagtcttctccgccgttgtcgatctccgtcgtcagctctcttttgcttcgattcgccgcaaagcaaccgattccaagacgattcatccactccatttgacagagattcttaggttgagctggaaattgaaggtataatctgaaacggaactggttttgactaggcggaagaaatcgcggtgaagacggaatcaaatcggggattgagatttggaatctggagaaggacgcgatcatgtggaagtaaaaggaacacaataagaaggaagttatcttcctgactagcaaactgatgatgacaagtcgcttaacttttccggcgaagaagtgttacaatttgcgggttttgcggaggcgctaagcaacagtagcggtaacatagaaacacttggtcaaaataagtttttaaaaaaaatattaatagtggattgataataaattaaaaactataagaggttaatggtgttgttattaacaaacaaaaaaactttaattttggaagacttgcaaaaatctacactaaaatgtagagatttatcaactactattagtataggataaatagtaaataaaaattatttcattgcaagtacatctaatctcaatataaaatgtaaagatttatttcattaaaatgtctggatttgttttcttttctttcttaaaagtaaagcacatttaaatcaattatttcaagttactcatttgattattcatattgcacatgtgacatgtatgacaaaaaaaaaaatctctttcacattaaaacgtgtaagtactaattaagtaccaatagaatctctttcacattcttttgatttccaatttcgatttggcttaatcgattgctaaattcattcgtttttttcgtccttcttctttcttaatttcatccctaactatttgatttatcttccatagtattttatatcattgcatggattaaattgatggccataatgttgtgagttgtgagtgccaatatgggttggcaagcatgctgacttattggcgttttccgtgacgacccaccattatcaaatatccgcctatctaatacgtccaacattagggtttcacgggacaacacataacacaatcatatcatatctctccaataaaataatacaatccataattatcatcaatctccttttctttttctttctaaaatttacaatctgccagagccgctacataattagacagagccgctaaaaaacccctcaaatttgtatccatacatttccaattacacagtttatcgtttccttctttttctctgtatatttaaataacacacttgaacctccgaatccattagcacctacaaaacaatataatctcagaaaagagagaggatgagctcatcctatttacgagtaatattactcttaggtgcccttaatgtcgtcgtttctttatcaataaccaattctttaataaccaaatcagcaacactcggtcaggtgttccgaatctgtaagaatttgtgtccgggatgtgaccacgactccttgcagttcttgttccgacacaacctggtccgtgccgcaagattcgaacctcctttgatatgggaccgcagactccagaactacgcccaagggtgggctaatcaaagaaggggagattgtgctttgagacactctgtctcaaacggagagtttaatctcggcgagaacatctactggggatacggcgccaactggtctccggccgacgcggtggttgcatgggccagcgagaagaggttttatcattacggctccaacacgtgcgacgctggtcagatgtgtggtcattacacacagattgtgtggaagagcactaggagggtcggatgtgcacgtgtggtgtgcgacaatggtgggatcttcatgacttgtaactatgatcctcccggtaactacatcggccagaaaccctattaatttatcatcatttatctattaaaaattctccaaaataaagtcatcttactaattttttagaaattatgatgactttttaaaggagattaggtgggtgtatttgtgtattttactagaaaatagatctatttgtgggggttgtgatactaattatgtatcttgattattttaattgatggttgtaattgcatcaacggttatttatatatccgtaagaatgcccagtgtacaagaatatataaaatataaaaagatgatatgatttttgtaaagaaatgccaagtacaaacggaaaattatattgtttgtgcatattcatatctaagtagtatttagttatataaaatttaagggaactaaggaaggtcttttgtataccgattaaaattttattttggggacatgaccatcacaaaatgaaaagtagaaacaacaaaatgttcataacaccatcaacttaaaatccataggatgataagttttaaaagaaacaaaagtcaagaagaataaaaacatagattaagaaatcaccaacgttaatttaaaacaactaacgtgttagacaaagttagtaaggcttctccccaacgtagttacccggagggtcgtagttgcaagtgatgaaaactcctgcgccgttctcgcagacaactctagcgcaacctaggcgcctggtttcacgccacacgatctgagtgtagtgaccacacataccatctccttcacacgtgttggtcatgtggttgtaggacttagcctccacagtccatgactccactgcgaaagtcgatgtaaagtctgagccacttccccagaacaagttctcaccgtatgggccggtcgagtgggttaaggagcagtcgtatctcctctggttagcccaccatgttgcatagcttgcgatctttacgtcccacaccagtggaggcaaacctgttgggaatgaaaattttcatatcaatatacaacattactaataatttaatttgatatcacaattatgttaacaaatgttatttaattgttcgtttctttagtgtagtccatttccttagaacatgtatgtaatatataaggtctcaaacaaaacaaaatatatctggtttaatttctttgtatctagaaaacatcaaaatacggatatatttttgttaatattctatatatatcctaatcgtttttatcttgtagtttcttatgaataggactacatatgagtatgacaacaaaaattacaaagatatatcataagtgaccgtttatgttgtttatggtcatgcatagtcttataactatgaccacatcgggtcttaattctatttatagttaatatatgaaagtacctagaccgcctcggacagtattatgtggatcaagaaattgttgttcgaacgagcccgtgggtggttggtatgtgggaggaggctgataaaggataggtttggggctgggagttgggagcggctggggctttgcaacgtagggaggagggctcggggttataggtcgctgtgggcggtgccggtaatagtctgcatgaacggcttggatggcgaccaagaaaagggcgattgcgaaaactatggcttgggttgatgttgtggtcgccatctgttttcttcgtggagtggctccaaagattttgttttggatggtggtagaaaatgatttgatgagggtgattatttatatgtttaagttagtgcttaattaattatgacaatgcaatttgggagtcaactagaagtggcttacatgttcgattatggttaccacttaccactttgtttcgctttagtaaaagcgagagagttgtagtcttgtagatattttaaccatgcaagtaggtattttatatacattttttccttagactaaagatcaataacagagattaaattttctaacggcaatattataagaattagtaataaaaagaaatattatcattaaaatataaaatgtgaggtttatgatacattagttggtctttagaaaaaaatgtttgtcgactaaaaaaaaaaaaaatagattgaatgtagaaatttcaacagagagaaaaagggaaaaaatgtctatttttcaataccacttttcaaaaaggcccctccctaaacttctaattattagttgttttttttacttaagtattactgtaataggtttcctggaacaaaaattgttataaaactagattttaacctgcggtataccgcagggacaatttattttttaaattagtatatataaaagtttgcaaattaaatttatttataaaatatttttattttctagtttacaattgttattaagtaacgtcctctcaaacccgtcccacaaaaaaaaacccgcggtacaccgctaatttaaatatataattaaaataaatattttacgggattgcaattgtattttggtttgtcaaacaaatatttgttttaaatagttgccaaaatctagttcaaattttggagaaataagatttattggatagataaagaatgtatttaggtgtgttttgctctttttaagggattgcaattgtattttggtttgtcaagcattttttgttttaaatagttgttgaaatctagtttaaattttggagaaatctgcctgacatatgagattagaatatatttgaaatattttttgtttgttaatcaatttattactaaaaaaaaacaataattaaaagttagtgacagccattgtaaataagtgccaactacagaatttatttcacaaaatgcctacaaaaatgtatatgtagattttatacaaaaataattgacaaaaggcaataaaatagaattgatcagctgtaaaagaaaataatcagaaaacaaaaaacacacaaaaatcaaacctaaaatatgacttataaagtttcatttttaatcaactataaaaccaagtatgttctgacaactccttagtaaaaacttataatttcgtaaaaacaataaaaccgtaccgaaatctggcttaaatattttaaaattttattcaaccaaatcaacatattgtaaatatagtaaaagaaacaaggagaaatggatataaatttattaaaataaaaagcagcactacgtggaacgtacggctgttattttatataccatcggaaaaagtcacatttgagaatgtcgtaagtcccgacacgtgactagcacggcaggtctaccgtagataagcgtagacctcagcacaccgtaccacataataaaccacactcaaactcagtccgaggttgacccatttaccaaacaaaacagagaatcgcagagcaaactatagactacacaaaacacttccgtcaccggcgaatttactcaggcggtaatctcaccggacatgtaattctctctttccctttctcgcaatttattattctgtttgtcaccgagagagtctacgcaaagtcttctgcggaggatttgcttacgggatttagagtttttctgtagtctgattcatgtacttgtgttgttcgcagatctcagaaaagagggtttttttattttctggaggtaataatattatgaagaggaatttcgagaggaacgatgacgacaagcctgagcgaaagcgtcctgctcttgctaggtgagtttctctgattttaaccagattgtttttgaaagtttcttagtattaaagactttttctggtcctattgctttttgtctgcgcagtgtgattgttgaggctctgaaagttgacagtttgcagaagctttgctcgtctttggaacctatcctccgccgagttgtaagatttgcttactctgtttttgttgtatttgttctcgtctctttgaaaagctagttatgtttaggtatgaatcagttttgtttattagtacggtattggtgctgagcaggttagtgaggaggtggaacgggctttagcaaaattagtccctactaggcttactacaaggtaacacctttgttcaatgggatacattaatgaccatgaaactagatagtgtatatcctgagacttgcaactgtttttttcagttctgtattttctccgaaacgaattggaggtccagatggccggaacttgcagctgcatttcaagtctagattatctctccctttattcactggaggaagagtggaaggagagcaaggtgctactatccatgttgtattgattgatgcaaacacgggtcgtcctgtaacagttggaccagaagcttccctgaagcttgaggttgttgttcttgggggtgactttaacaatgaagatgatgaagattggacccaggaagagtttgaaagtcatgttgtaaaagagcgtgaaggaaagagacctttgcttactggagacttgtttgttgttctcaaggaaggggtaggcactttgggtgagattgttttcacggataattcgagttggattagaagtcgcaagttcaggcttggtttgagggtaccctctgggtactgtgatggcatacgtatacgtgaagcaaaaacagaagctttctctgttaaagatcacaggggcgaatgtatgtgttttcttttcttgttctctttttgccttgtgcttgccacttgttttcttctaaatcaacatgttgttggattggttatgtgtagtgtacaagaagcattatccacctgctttgaatgatgaggtgtggaggttagagaagattggtaaagatggggcgtttcataagaggctaaccgctgcaggaatagtcactgtggaaggctttctgagacaattggtcagagattctacaaaattacgggctgtgagtgcctcctattacgtcaagctcattgttgttggatgagaacattcattcaatgctcatgagtaattatgattatttgatatttgtctagattcttggaagtggcatgtcaaataagatgtgggatttgctagtggagcatgcaaaaacatgtgtcctaagcggtaagctttatatctactatactgaagattcaaggtctgttggcgttgtattcaataacatctacgagttaagtggcctcataactgaagaccaatacttatctgctgattcactctctgaaagccaaaaggtctatttcattctccttattttcttacacttatttgcctcatgatgtttggtatattgttctggaaaactctgatttacagatttttgttttggtgatgtgtgattatatagttcagttctgttatatatatgcggtagtgtaaattttttggtgtttaaatctgaaaggtatatgtggatggactggtgaagaaagcgtatgaaaattggaaccaggtcgtggagtatgaaggcgaatctcttttaaacttaaaccagcctgagaggttggatatttctcagactgatcctgtaacagctctggcaagttactctacggtgcctcttagtcagtttcctgaattcgctatagaaggttggcaaatcagtcccttgtaatattactaaatctcaaatcttatgttctttgttctgtatcataagtttatattctacttctatctttactgcagggtataatcaaacgctgacaacagccctacctcataacccacaagcacaatttgattttgttccccagcaagatcagtttatcggaatacagcaacctcaaactcaaaccaacatagagaatgaaaatgtaactaggttggttcttggtcctccacaatcatccacaggtgggtaccaagacatcaaatcttctgctgaccaggaaaatcttaatcctttcgaagactggacaaacctaagtgagaatgactttttctcggaggaagagatccggcaaacaagccatgacttgttagcgaatgaggacatgcaacagttgctcttcagcatgggaggtggcaaaggagaagatggttttactttcccatcgtttatgcagaatacaccaatgatgcagggatatgatgaggagggccgtgggcgatcaggaaaagcggttgttggatggctgaaggtaaaagctgctatgagatggggattcttcataaggaggaaagctgctgagaggagagcacagattgtggagcttcatgataataacgatggtaaatgaatagtcaggttgcttgctagtgtatagaagccatgtacagtttagggatgtataacaacatcacttaccgatatggatttgcttgatttagcttattagacaagaatataatcgatgaaccatgagaaatttgaagactaaccttcagcagcaagacaagaagctgattttctgtctctttaagtttcaactttcaacttgcagatatattagaagactgactaagtatgggcctataagcccattaatgtctctactgaacgcccaacttgtgaaaaacatgtctctcatctcaattttgttttcttttcacatcaacttaaagctacgagaaccaaacaagtgatgtttttggtcaaacaggacgaaacatgtatacataaaaagaggtaattatgttcgataaacataggtataaataaactataagaatttgttacaacattctttagatttgatattaactgctgtttacatttgaagaactcagttagttatttaatattttattttatagggtctagaaattacttgcgtgtggggactgatcaccgattctaaagaaggctcatcctttggataatagtatgaaacttgtcaataaagataagtcatcacaagtagggagatcttagctgtgttccatacgcccatctagaaaaagcgacgatggtcaagattaaataactgtatttgaaaaaccaaaaccgcgtcaccaactccaaagccattaccattagccatcactttccatcttccagctgttcgaatcaggacgcccctttttcttcaccaaacccatcggccgataacgaaccttcctctctgactgcctctgctcttactataaatacaaccaatacgacctcatccaaaacccaacaaacctaagctcaaagcccaccaaaaagaaaacaatcacttagcaatggcgatgatcagttactccaccattgtggttgctctgcttgcttcttttatgatttgctctgtttccgccaattttcaacgagacgtagagataacttggggagacggacgtggacagatcacaaacaacggcgatcttcttacactctctctcgacaaagcttcaggctcaggattccaatccaagaacgaatatttgttcggtaaaatcgacatgcagatcaaactcgttgccggaaactccgctggaactgtcaccgcttactatgtaagtccatttcctttagtgttttcttaaagttcacatattaagagtgattaggctaaatgttttttttgtttggttctacagttgaaatcccctggatctacatgggacgagattgactttgagttcttgggaaacctaagtggtgatccttacacacttcatactaatgtctttacgcaaggaaaaggcgatagagaacaacaattcaaactctggttcgatcccactagtgatttccacacttactctatcctctggaacccacaacgcatcatgtaagtccaaaattataaaaaataaatcacacttactcttttgaatctaatcttgtttgttttttctatctattcagattctccgtggatggaactcccataagagaattcaagaacatggaatctcaaggaactctgtttcctaagaaccagccaatgagaatgtactctagtctatggaacgctgaagaatgggccacaaggggtggtctcgtcaaaaccgactggtctaaagctcccttcactgcttcctaccgcggcttcaacgaagaagcttgcgtcgtgatcaacggccagtcttcatgccctaacgtgtcaggacaagggagtactggttcgtggttgtctcaggagctagactcgacgggtcaagaacagatgagatgggtacagaataactacatgatttacaattactgtacggacgctaaaaggttccctcaaggtcttccacgcgagtgcttagctgcgtaaagcttttaaacaaatgatccaaagccatgaaaagtaatactattctttgattcatcttataaagtatctgatgtttggttacatctgttttttatttattctatgtaagtatatttgtattcgaatattgatcaatcactttaccaaaataaaacatttgaacgtacgatcagaaaagtttaagtcatagacctcaacgaaaagtaaaaacgaaaaagttactgtacattattttctgagattcttattattgattcctaagcataattaagctataaattatatgctattagactattaaataacccaatgttttatcaataagtagaatccttcaactcttctaatttataaatggccttttgatctaaactaatgtctagcacaaaaaaagaataataataataattgttttggtgacacagaaataatattccacgaacctgtctatgttgaaccgtgtaaggtcgaataactcgatttaaatattattacatacaaagtttaagactaccacgtcgataatgtgcctccacgaaactctctttatataaccacttatttccacttcatctaaatccatcgacaaagacttacctctcacggcgagaaacaacagagaatcggggaaaaatggcgtgtttcgcaaccaaacagcctctgttgttgtctctcctccttgccattggcttctttgtggtggctgcatctgccggaaacttctatgagagctttgatatcacttggggtaatggtcgtgccaacatattcgagaatggacagcttctcacttgtactcttgacaaggtctccggctcaggttttcaatccaagaaggagtacttgtttggtaagatcgacatgaagctcaagcttgtcgctggaaactctgctggcaccgtcaccgcctactacgtacagaatctacttgtgaaattaattgatttcgaatcttatatattagagtatcttttcatctcaaaaccaatcggtaataaatgtaatatttttaactcctaatgttatacatgttgtggcagctatcgtcaaaaggcacggcatgggatgagattgacttcgagtttttgggaaatcgcacaggacatccttacactatccacaccaatgtgttcaccggaggtaaaggcgaccgtgagatgcagttccgtctctggttcgatcccactgcggatttccacacctacaccgtccactggaaccctgttaacatcatgtgagtatatagtctatcaggaaaccctaaattgatagtaaattatacaatataatccagtatattaacaaacgttttattaattagttcatttattatcaattggtttttatataataagcttatgaacattgacagcgtctaatctcatatatttcctcttttgatgtgatcccttacattgagcactataaaaaaaaaaaacgagttctcttgacatctatagacatatttgatatatatttcttgacattcatgttggtttcttgtgtctgaagcttccttgtggatgggatcccaattcgggtgttcaagaacaacgagaaaaatggggtggcttaccctaagaaccagccgatgaggatatactcaagcctttgggaagccgatgactgggctacagaaggcggtcgcgtgaagatcgactggagcaacgcaccattcaaggcctcttacagaaacttcaacgaccaaagctcatgcagcaggacatcaagctcaaaatgggtgacttgcgagccaaacagcaactcgtggatgtggacgactctcaatcctgcccagtacggaaaaatgatgtgggtgcaacgagacttcatgatctacaactattgtaccgattttaagagattccctcaaggcctccccaaggagtgtaaactttgattctattatgggaattttcaagcatttttctttccgttttgtttcatcttgtgatgttactttgatttattttgttctttcttttggtgtttctgagatacgatattacatgtatacgtattcttcctgagaaaataagaagttgtattactcgataatacattttatctctcaatgtggtgtgattgtttattgggtttggcgtacaatgaaagctacatcaatgtgctttagaaaaatgcatacgaaaagaaaaacacaacaatcaaaaacccgtgaggtaactaaattatctccatttacaaatatactaacaatactactaatttattgctaagctgtcagctgtcacgaccatgataatgaaaaaaaaaatcatctctgttttcttctaaactttagagtttctcgaattttcacatataataaaaataaccaacagttatggtactctgttgggtgaagatttgctatgtggatatgtaaaatgcttagagtctttacattgtgattttagtggctggttagtggttattaggttattacaaacgcttttatctttgtacatgatcttcttaagtagttacagaaatctcaacttttcttaaactaaacgaatatctttgatttttattttctttacatcactcttattgggtctaactcactgtaaaattcctgcatgtttatattatgaaattgagaaaatagtaaatatatgttttaatttcaaagtttaatgaacgcgttggttggtccaactaactaatagggcccaacattaaagactttaagacccacatttaggaaatgaatttggacagtccaatttaaagcacagaacgtgtctcaatacttattcagtttatttcttcgacaatgatttttcaaactaaattgctatttttgatattcaggatatttcatttcatataattcagttgcattttcaggatttacaaactttgtaattgtctcctcataatgtcactttttccttcattccatccaatttgtcgtcaaagggcaataaaaataataatcacaatgctaaattctgataatcaaatctcaacaaaatatgactcaaatcaaaccctgttgattggaccaacgaattagacacttgagctttagctcctgtgattttaatgtggtatgcttgcagaaaatttcttaccaaaatgtcaactcatctccgagattaagcgtactatttgccaatacccgagtactcggagctaaataatagaaaaagaaaaaaagaatacatatctcatgtccaaacaatattttatatacttatttcatgacaaaaatcaggaacaaattaaaattttacagatataaaataggtccacgcaacaaacacacgttaagtttcattaggtttagattattgaataagatgcagaattgtcattttcaatattgattagtttctggtttaagtcaatatcacctggtttagagccactcgtgacaatgtataaaaaaattacgtaccatctctatatccaaaactagagacagagatgtgtcgaccatgaaactgtcttaagaactatgacaatttggtcataggcatagcctaggcaaaaaaacttcatttaaaaaaaaaagatcaaaatgtttcgattataaaagattcgtaaggttatataaaatacagaaagcatgagatataagttttctcaatattacaaggttattctcaaataattcaaacgaagattctcgtctaactatcacttttagaggataaggacagaaaattaaattagaaagtcctgacggaccaaattcattagacgcagttggctaatcatacattcaatgccaatggagaagtccaactgtatttcatttcaatcttactcatacaactatacaagtgatctgcaaattgccgcgtacatatatgaataagaaaaatacattaaaattttatatccacctgccaaatcctttcaacgccaaaccattcccctatataattatatatacaattacaaattttatgttacagtcttcatttattcgcgtaaagatttcaaaaagtagtgaatatattcttgtaggaagctgcaggggttaaggagagaaaagggatggtgaaactgagagaaacagaagtgatcctgagactctgcatcgtcttttttcttctcctcacttcttgtttgatcggtttggattctcagaccaaagagattgcttatatccacaagaacgtcagtttcagatatttgttagctctcgagtaagtccattttcctttattttttgtcaattgtatagatctatgtgtaatgtaactattaatctcatctctttatacagtattgatctcatgatgagatcattattgtgttaaaaaaaaacttgaaactggccatcaatgtctttaaaactcactgaaataataagtctgataaagattctatttaatgatttgagtttttatgagctctgaaaaagagggtaatgatttcacagttttttgaaggatcttgtttattattttagtaaaattttctgttttggttaagtctacatgaaaatgacattttgttcagtggggactgctactcttttttgtttttggtttaacaactcttcaaatatcctcccacaaaaaagttggatataagttttcattttataattatgtttttgtgttatgtatgattattaattaaaagatgtgtatatatgacagggctgagttatacatagatgttgtggttgctgcgtataatttggttcaactagggcttggttggtacaatgttgaacaaaagacctccaatcccaaatggttctcttacctcttggatcaggtatgcagaactctcttcatttatagattatcgttgatgacactatatgtgtgtgataatacatgttgttaaaatagacggcggcatacgtggttttcgccgggacatcagccgcggcgcaacactcattgctagtggtgacgggttcaagggagcttcagtggatgaaatggtgctacaagttcacaaggttctgttttcagatgggaagtgccatcatcttaaactacattgcggcagctctcatggtcctcctctcttccatctccgccttcaacctcttccgtctctattcccctaaacgtttttttcgctttaagtcatcctcctaattaactactgtgggagtcatttcttaatctgaaataatgttgatcaatgtgaagtaaatggctgaaaaattgatttgtgtgatcttccactatgaacaataaatatcatcagtctattgcttgagaaaaaaatataggtgtctcagtgtatgtacgtatgtaaacttatttttgtctaaaactaataacttttccttgtacttgatttttggtattcaataatattttggtggtagtgtatactagacaaaaatttaggatcggctctaaagtctggaaggcctaaacggagagaaaaagaagaccattaatcagttaggactcagtagccttgctagatgcctagatggatcatgcatgaggtttaaaacatgaaaaaaagagtttggatcttaccaaaaagagtgatagattatgatcggggtcgggatgatgaggtagttgtgatgagaagaagaggaagtgaggctcaggctaggaagattcagagagaaggattaaagatgaagaataaagaagatttaggattagtctttggtttttgctagtttaggattacacttaccggttaatgtgcacatgcactctttgacacctagcacaatcatgcacttagaccaacactgaccaacacatgtgtagatctcagccattatccaagattccatttcaatcttaaccatccaagtccaaactgttcaatctcttaatttctttaatcaattcgtaatttggtaaacttttgccaattagtttaacaggtcacaattcaaaactggcccaagactaaaacacgaagttgagaaaatttactactattttccaataccaccaaaatttgcaaaatggtatctaactacgtaaaactaataacttttccttgtacttattttaataacagtcaaaatataatttatttcctttatttcaaacatttatttcctctttatggttcaaaattattaggagtatcacaatatatttatgtatttaatttctctccttatgttttgtcaaacacaaaaaaaaaaatatcttgtataaactgatacaaacccgtttcttatttctctctcgttttctccaaaagacttatcaagccgcaccatcacaaagcttgagagaaaacgaaagactcgttaatcaagaaaactctcagccaaaaccttcaaagtcaatttgattaaactaaacacatcaatcaaatcccctcgtttctcaaaacccatatctccttttcttctctcaccttgttttagccgtaaagtaatcaccttttcaacttctcaaaagccctctgtttctctcatctccctctctctgacgatgaaagagtattggacatctttggcttctctactcggcgttttagccttttgccaaagcctaatgaattctgtattcccaccagagctccgtttcgccatctcgaaactcttcaacaaattctttaaactcttctccaccttctgttacttcgacataacagagattgacggcgtcaacaccaacgagctttacaatgccgtccagctttacctcagctcctctgtctccatcgcaggtaaccgtctcagcctcacacgcgccgtcaactcctcctccgtcacattcggtctctccaacaacgactccatcgtcgacacgtttaactccgtcaccgtcgtctgggaacacatcgttacacagagacaaactcaaaccttcgcttggagaccaatgccggaagagaaacgtggcttcacgctccggatcaagaagaaagacaagaacttgatccttgattcttacttggattacatcatggagaaagctaacgagattcgtcggttgaatcaagatcggcttctttacacgaattcacgaggtgggtctcttgattctagaggtcttccttgggaatctgttccctttaagcatccgagtactttcgatactctcgctatggatccggttaagaagcaacagatcatggaggatcttaaagatttcgctgagtgtcaatctttttacgagagaactggtcgggcttggaaaagaggttacttgctctatggacctcccggaacagggaagtcgagcatgatcgccgccatggctaactatctccggtacgacatctacgatcttgagctcacggaggtcaaaagcaattctgaactgaggaagcttctgatgaagactagctccaagtcgataattgttatcgaggatattgattgttctatcaatttaacgaatcgtaacaagaaacagagcacagggagctataacgaaccggagatgttaaccgggtccggtttaggtgatgatttgggtgatgggaacactataacgctttcaggtttgttgaatttcactgatggactttggtcttgttgtggtagcgagaggatttttgtgttcacgacgaatcacattgagaagcttgatcctgcattgcttagaagtggaagaatggatatgcatatacacatgagttactgtacgttttcttcggtcaagattttattgaggaattacttggggtttgaggaaggtgatcttaacgacgttgttttgaaggagttagcggaagtggttgatagggctgagattacaccggctgacgtaagtgaggctttgattaagaatcggagggataaagagagagctgtgagggagcttttggttgatttgagaagtagagtggagagaaatgagaagaatgggaaatcgagggttcaaaatgtgagcttggaagagcaagagaatagagctttcgacagtctttacgcagaagagaatggaggagaagaagaagagattgaggataacatttgcaaaagtagtgatgattgttcttaattaggttttctaacgtttctatgttctacacaatgtgaaagttgtgtgacctttcttatgtttctccttttttgggtagttaactttttgaagtaagccaaagtgaagaagaagaaggagagaaaatagaaaagaggtagagagttggttaaaataagcaagtggtggtgattaagatttttgtatgtggcgatcgggaaatgcaaagagattcattggttaccattggcatatgatttggtgttactataaatttataatagtttcgttacacttttgacatagaattccatattattttttaacaatagcatccaattctttttaaaaagaaaaacttgtgtgtttttagagggtacggttgtctttcatcttcaccaacattggataagatcaatgcattccttgtcaatttttaaagtacaaaaaacaggacaaattgtttagccttaagaccaaacactgaagttgacatgttttgtttgtttactggattttcttagcattgtggactttctagactcacccgtttgaaattgtcataatatggtgtcgtcgcactgtctcttatatatttcttactttattcgcaatataaacaacaaagtctatgcttatgtcaattggtcaatctgtccatcgactctattaattgagttatgagtgtattgtgcatagattaataaaaataatacagtgagtatgttatggatagatgtggatctctctctctagtcacattaccacaaagagaataaagagttgaagtttccgaaagagataaaacaacaaatgtataatgtcgtgaaataataattgtgtagaagaaaatatcaaaaaggaaagattttgatattaatacctttttatggattcggtgagaaattaaagaaagatttgattaagaagtgagttggaagtgatgcatgtacattattaggcttttgtcggaaaactataaaaaagacttcttaagcccattttaatattcacttttttactttctttcttttttgcattgcaattttccattgtagtttaagatctgaccctactttgtatatgattcgaattatccattgtttaagataaaactaatagaaatcaattcgattgtccggtgagtaaacggctcttcgctaacagaaaaacctaacttgaatagcttgagtcaaaacaatctaatttttaaatagttcccaaaattttatcttaaattactcgtaattacactagcaatccaaagtttatttgttttaataaaaactattttgggtcgtcaaaatggcccataaagcctaattaagaagacccaatcaatttaaaagcccaaatcagtgtgacgtataatatacacgtcacacgtcaattctcagcgtcgttaaagtatgttaacaactccgacaagattcgttgctctaagaatcccattccgatcttccaataagattccgatctccattgctccctctcccaaagtttttcctcggaaaccagttatcagagttccagcaagtctccgatttgtagcgacgatgtcgacccctgccgccgccgtcaacgccaccgtcacagtcaccgatgccggcagaggatcgatcactcacgtcatattcgacatggatggtctccttctcggtaacttccttgtcttctttgatctcttgcttttggttaatttgtgtaactgtcactgttgttattacaagttttttttttttttgttcttgttccatgagttctctgtttgttgattggaaaataaactgacaaaagtatagtatgataggagactgaaactgttctaaatttggaaactttaagcatatggtttcttattgaaagatctgtctcgttgatcctgaactctctcccagtgagcatagcgtatgctaaacttgtctactgtttgcagacacggagaagttttacacggaggtccaggaaaagatacttgctagatacaataaaacatttgattggtctttgaaagcaaagatgatggggagaaaagccatagaagctgcaaggcttttcgttgacgaaagtggaatcagtgactctctttctgctgaagatttcattgtagaaagagagtcaatgttgcaagacctcttccccacaagtgacctaatgccaggtacacaatccgcattgattaggccattctttcttttcatatatatatatatatatgtctttaaattctgtttgtttagtttcatttgaatcagcctctgatttattctctttgagtcactaatcactgaaagagacaagctcttagctcttctacttttcgctgtatccaatattcttcctctaatgcaggagctagccggcttcttagacatctccatgggaaaggaattccaatatgtatagccacagggtatctctttctgtattagcacatgctcttcttatagatcactgagagtgcaaatggctttttcagcttctttttataaatttatggtttatggcatatgttatctgatttagctactttttaatgcagtacacatacacgacattttgatcttaaaacacaaagacaccgtgagcttttttcgcttatgcatcacgtagtacggggggatgacccagaggtgaaggaagggaagcccgcgccagacggctttcttgctgcatccaggagatttgaggtacagatggtcactaaaactgtacttatcaaactaaagcaccagctattagcatgtgtttccacctttgagaagtttgtaaaccaatgttttccctcttctttgcggatttcataggacggtcctgtagatccacgcaaggttctcgtgtttgaagatgcgccttctggagtccaggcagctaaaaacgccggaatgtaagtggatttcgtgtaacattttccaagttctcttagctgatgagctattagtggttcagttctgactggtgtgtgtgcaggaatgtaataatggtaccggattcaaggttagataagtcctactgcaatgttgcagaccaagttctggcctctctgctagatttcaaaccagaggaatggggcttaccttccttccaggattcacacaactaaaacaacaaagctttcagggcaacgttatcctcaagctaacgatacttgactcgttaactttgattctttaagcctcttacgctatacgagaaagattattgcaaattatagattcttattggggtaatttaaaacaatatatttatgttcgtgatttgttttcttgattcatgaatttgtaattgttatccagaccgttaagtgtgactttggtgagaatgatattagaatgattgttgtgagtgtgggttacattcgaaggtcataggcttagattttgcgggatgtcgttaacagaacttgaggtcaactttatagtcggtagccaagttcataagcaagtctttgctactattattgtagaaaccgacatgattggtacatgacattgaatgttaaaatcaaaaccaatcacatatctctattctctaccaaaccaaattgcaacttatctcttgtaagaaacttcaatgattgcaacgggcgaaaatattgtctcacttttttattttatttgtgtcgtccgcaattaacttactcacataatcggaatccaagttagcactaatacaaagtatgtctttatgtagcaatgttgcatcgttttcaaagaagtgttattcattgcttactttcgtaatgatgattttttcccactcgtttgtcgttactatttactatcaatgatttataaatcatcgttaatgaaaatttagatctattttagtaatagatttgtttggtttagtacaagggattgtgaaaaagataaatttgatgattaaagaggacgcaaagtttggcgagtctttactctatatagagatagggtctaagcattcacatgcacttatgaaccgtccaacatcaacgttaataacgtgtgattcgtatcaaagtttacatatatttggcaaactttaatttattatcttgaaaactatatgtttcatttttgccgttttgagtaaagaatcgtacacccatcaattttcagatatatatgagccaatccataattaatctgattgattagagagaacgttataaacatctttaagatcaacagtatattattggttgaccaaaaaaaaattattttgatggtgaaagtcacataaatcaagtataagttcttgtcaaatttaaagtaatctctacgaataataatattggatacatgaatcataatttgtgatggtataatatatggtacctttcccgtgcaaaagaaattgagtcattgaagtgttaagcaatagtttgaagtttttatattgaatattacaaagtcaaaagcccttaattacatcatacacatcaagtcatgaaatacatataatatcacacatcaacttgatcattcataaagtcttacgttccatcttctctacaggacaagagtctcccaagatatatatacccactaatacccaaatccatagacacaatctccctctatatatccatttctccaaacgaaaacaaaaaaaacattaagccaagaaccgcatatacgaaccaagaacacatcatcgttagttctaattatgaagaaggatacatgcaaggaaggatcatcaatctcgagaaactcatcggtgggatactatgatgaacggatgccagagggtgttccgttcgagtgggagatgcagccagggactcccattaatactcaaccacgggaggttgttcctccattaagtcctcctccagctatgctcagcctcggcctccccaagccatccatctccatcgaagagccaaagaactttgtgtttccaacgaagctgaagctgcggaattggaaacatcttcattgcaagagatatttttctagattgactaacaaaatggttttgtcttcaatttgtttgtaccctgataaacgctacatgtggaaaaaatgaatcaaacgtatggaaatgggccggggtcgggcaagattttttttataataataacaattttttaaaaaagttgaggacttataggcctattgacaaagattttctagtaaaattttctatcataggttttaccatctaaacagctagcgtttgcttttatgttgttctaaatctgttaacagtgtttttaaaaagtaaaaaaaaaatagtttatcagttaaacaaagtgaaccaatttcaagttagctgcgaatactacttagtagtactacgattattgttaatatcagaaataattgtttatcaaataaagaatgaaagttgttaaaatctctgatcgtgtattttttgtcaacgaaatgttcgtattaactgaaacagaaatgtcaagttatacgtcgtcttcattaactctgtctctgaccaatatgtgtcgaaataatcatgttctgatttgtttgtcagaaaatcagcggatcggaacctctgtccgggggagaggctgcttggtttatttgatacttttatcatttccttaatcatacccccttcattttctgaaactattttcttacatttcttttgtttcataattgactgcaactctccaagtattagtatcaaatgtaaactttcataaaattaattttattaatcgctccagtacacaaaaacctacttttaacgtgaaacaaacatcttacttagttaccactacaatcatctaactaaccctatttactagtatttgtttttgttttattctacaagattttgaaagtttctagacatgaccaaaccggattctaacaaaaccgactaaactaaactcttaactcttaagtgaactaaaccgactaaactaaagtcttggaccattcccctaagtgcaacacaaatcggccacgatctaagcgaacgatgagatattaaatgacgaaaagatggacctaacgaccaacgcctcctccgaatcaatagttaatgcttacccaactcttttccttattttaccatctctctctgtttgcattgtttatatataatatgatcggagccaaaaggtagagaactatcacttcggctaattgtgatgaagagtgttttaaatcattagtttttgaggttttcagattcgtttcatacattgaactcactggttctttgtcaaaagaaactatcataaaaaagattcagaaatagcgtttccttcaacagcttctcaaatggtaagtggattattctctatcaaacttgtaattacaaaaaaaaacttttaacaacgtttaataactttcaaaaacttcacaaattaatgttttaattttttaaaaaacttctcaaatgtaagggtgaggcatagatagtttatacttgtaatcataatttagtttttaacaattctaagttctaactgttagagattgtacactctaattctgatttatcgtaattttgataaatcctgaattctaactgtaaaaccctaatatagcggattttagacgtgagaaatggtgattataaattgagttaggtttcaacaagaaattagatgcttagttttgacttatatattcaattatttttgttgtgtataggcagaagaagaaatgagaaagcaccttgtgctggccaaacctttttcgttggaagatgaaaaagattctgaacacactgcttcgaatgtcatccgcaagatcctcagcctctttaagaccgtacgcccaggatctgatctcaccaattttcaggtgacttttgttgaaataaatctactgttgtgttagaacgactatttgcgtgttttgtttttcctaaccaaacatattgatttgagtttttttttttaaaagacagaaaaaacaaacattaatttcttttgttattttattttatttgtgaagaacaaaagatgaagttcgtcttaggatttatgatatcaagtgttcttaatattttttagtatgtaaaattatcagtgaattgtgaatattttgcatgaaatagaaactgatacgatacatataattaagaagaatcttactatatatgatttattagtaaaaattccaacagtttataaagttatgctagcatgttgcataggtttcaaaattcatgttaactacccataagatatcagttacatgtattatagtattgatgttttgtattaatgctaaaaatatttggctcttgtgtttgttagtagcttagtattaattagtagtgttatctccgtaggtaggtacactatactatgcatgaaagtgaactgtgaaccctccaactattacttctctagatagagtattaaataactcgaaaaaaccttttttcattttatacaaacacccatttatttatatttttgaaatctatgagaggtattaactacgtactgtttaagtagtaaaattaatcataccatgtgcaactaagttttttgggtaaattatacaccacttgtaacttatacagatggtataatcaaactctataaaacagttgaacatttatatttcgtacaaatcaagtcattttccaattaatttatttagattatgatgtttagcttaattatttttcttcgatcgtaaagctgccacctcagctgaacctaccaagatcacaactccaatgttacggcgagatggtctacagcttcgtcggtcaggatctgcttggggaatgcagccgccgtgatcttcccattgaacggctcaaatcagtggtgacgtggaacatctccacactccgtccggtggtctttggcatgtctccgtacaactccgttctcggcgagactcaccacgtatcgaacggtcacatcaacgtcatcgccgaacaagtataatcatttgtaatataatcattatttagtcattacaactataaacgaaacatagactgatatatatacatcgttaactcttaggtagtgcatcatcctccggtttccgctcttcatgcgactcacgaacaagaaaatatcgacgtgacatggtgtcaatatttcactcctaaatttcgtggtatgtttttttttatcattttagttttgtagttaaattgttctgctacatcccaaattatctcaaaaccaagtctttttgttgttgttgtcaaacctcaaaaccaagtctagttttgagtaatccgtccaagaacgaacaccaattcgaatatgcatccggtttacactttcaaaccgaagcatctcgtctttgttcaaagttcaaacatatctaatttctgcatgtactcatttaatggtccataaggtactcacgtggacgttgaggtaaagggtaaaagggtaatgaagcttctgaatcatatagagacttatgagatggaccaaccgagactaataatgagattcttaccggcgccgggagcttactgggccggaaaagtgaaaataaagtgtccggagactgatctcgaagctgagttacatttgatctccgattcattcattgaaagattcagaggcaacaacaacagatcaataaaaggaaagatctttgaatcttcctctggtaatcagctctacaacatttttggccattgggacaggtaaaaaacatagtcgttattacagctcttaaaaaccatcattagctttgaatgatgtgatacgcctcccataaatatgtttcagaacggtaatggcgaaaaatataaagactggtgagctcgaggtcatttacaatgccaaggagaatatcacaggactcaaacctccaacagtcaagaacctggaggaggtaacggagagcgagtcgacaatggtgtggagtgaagtaagtgaaggaatactgaagaaagattgggaaagagcaagagaagctaagatagttgtggaggagaagcagagagcgtctttaaaacagagagaggcttctggtgagtcatgggttcccaaacatttcttagtggtcaaagacggtaaagactgggattgttcaccgctacagcctacggttcctccggcgccactcgtcatcacataggagcaaggacgaatcattcaccggtttcaagattccaaaactctatgttgataattataggttttgaaattataaataaatagaaaaataggttgatacttgataatgacatatccgtcaataagtattaaagatgaatgatgttttttgtcaattcatttgaggttgaatgtgtgagtgatacgtcaggcttttgagaaaaagagttcttaaatactatatgtctatatgagatttttcacctatgtaataacagaaaatattttgtttttcctctacaaaattatttataatccattaaatttgaaaatgaagattcaatctacttctctgttattcgatggtgaatttgcatgtattaaaataatctgtgttaaaataataaatcaatttcatctccataataatttaataatagttaagcattagggcaaccttatttaaaagcattaagcgagccttaaatgacgaaaacatggatctaacgagtaacgactaacgcccctccgatcgaatcaatagttaatgctaacccaactctctattttgatatcctatctatctttctagctagctatatagatggagcaaaaagattgatactactagtaattgtcactatatgtactacttagtacgtaagtcatagctccttggctcttttcttaaaaataatttcttttccaaaagtaacaacctcaaatggtaattacttagtgtgagtcattgactttttggtaaagaagtgaatcatacacgtagattaaatttacagatctaatatttttggttgtgtataggcagaagaagagaaaatgagaaggcaacttgtgctggccaaacctttttctctggaagatgagaaagattctgagctcacagcttcaagtgtcatccgcaagatcctcagtctcattaagaccgtacgtccaggatctgatctcaccaattttcaggtgtaatttcttaaaatccttgtctaatttttgttatatattacagaacggacaaccattgtgtatattttttctatacaatcattgaatttttttggtgaagaaaagtttttttttaaggataattgccctcttttttttttagtgttttctttacatatcaaataatactgtgcatgaaatacaaaaagataaaatctatatggatcaaacagtttagtaattcctaactatgttatatatattttccgtacaaatcacgtcattgtccataaattcataatatgtattctgttattaactattctttaacaaaaaaaagagttattaattattataactattgaatgtaaagctgccacctcagctgatcctaccaagatcacgactccaatgttatggggagatgatctacagcttcggcggtcaggatctactgggcgaatgcagccgccgtaacattcccatcgaacggctcaaatcggtggtgacgtggaacatctccacactccgtcccgtggtcgttggcatgtctccgtacaaccccattctcggcgagactcatcacgtctccaacggctacatcaacgtcctcaccgaacaagtaaaataatttcattttataaaaagaaacaaaaaaaaatttataggaaaagctcaactgaaattcacaatctatgtagatattttattaatacacatgagtttttttttttaaaaaaaacaatacgaaaatataaaatttagctcagtttacacattttttttaactcatgaaagtattaagtattcactagtgttgtgggttgtagatagtgatccgtcaaacaatttaggtattatatacaattttcaggtaatgcatcatcctccggtgtccgcacttcatgcgactcacgaacaagaaaatatcgacgtcacatggtgtcaatatttcactcccaaatttcgtggtatgtctttttttttttcattttaatgtagcagtcaaattgtttttgctacatccaaatgatctcaaaagtcaaaactgaagtctaatttttgaataattcgtccaataacgaacagaaccatccattactttgaccatgcgtccggtttactctaaaaccgaaccatctcgtcttgtttccaacatctaatttgtcctcatttaatggctcataaggtgcgtacgtggatgttgaggtaaatggtaaaaggataatgaagcttctgcatcataaagagacttatgagatggaccaaccgagactaattatgaaattcttaccggcgccgggagctcattgggccggaaaagtcaagataaagtgtcctgagactgatctcgaagctgagttacatttgatctccgactcattcattgaaagattcagaggcaacaacaacagatcaatcaaaggaaagatctttgaatcttcctctggtaatcagctctacaacatctttggccattgggacaggtaaagaaacttggaaccataacgtcattacagctcttgaaaacatgaaaagctttgaatgatgtcattaacatatccatgatgtttcagaacggtaatggcaaaaaatctgaagactggtgggctcgaggttatctacaatgccaatgagaatatcacaggactcaaacctccaactgtcaagaatctgcaggaggtaatggagagcgagtcgacaatagtgtggagtgaagtaagtgaaggaatactgaagaaagattgggaaagagcaagagaagctaagatacttgtggaggagaagcagagagaggctctgaaacagagagaggcttctggtgagtcatgggttcccaaacatttctcagtagtcaaagacggtaaagactggcactgctcaccgctacagcccacggttcctcgggctccactcgtcatcacagagaaataaaccactttcaagatttcaacactctttgttgatgatagcttaagttattacaattccatgtaacataaaccaattaataacgaccaaaccaacagggaaatcacaaaaatgaaactcttataaccaaaaatttctgctctaattgcatataaccaggcttttagtttcatcaagaaacatcaaaatccaagaataatttcagtttcttcagaaaatttacagtatctaaaatatccatctctgagacatatttggaacacaattaggtccaagaatgtgtgtgtttggttcaagaatcctctctcagacagctgtgtttgtgtagtttgggaagaggttgaccaatgtgtcgagagtatcaggatggaactttcttgcaaatagatagcaaggccgtttaatcccgttccatgtacaaggccaatgcagctcatctccatgcttcaaaagcacaagtaaaaatattaaagtgagagaaaaagaatagaggctgcaagggagagtcacaagagcataccttccccacactggtgacatgtacactcatgtcctcggactgcacaagcgagaaaagagaaaagtataataagatgtagattgtgacatttttcgaaaagactgcgttttgaaacatactgtgacatttttcataaattctaatgaaatctcgtttcctccgtatgtctttggatgccaccttcgttcagaccaatcaacaaacgtcactgaccaatttgagatccccatgggatcaatcatctgaaagaagagccgacaaataaacacttttcagcatcaagaggcttaaaagattgtaaaagatggggtgtgaagaaatagactcacattgaagaatgttggcaagtaatgttcatcggcaatgcagttcttgtcggcctctattccaggctgaaatttatagaaacttaatgtcagaatcagaactcaaaaggaagagaacttaaaactgatccgagataaaaagatatgaaaaccaaaaatgttcagctgcaggataaacttactccacaatactcgcggaattttgagtagtaaagaccatcggccatcactataatcgcgtgttgtcgcttcattgtgaaccactggcaagaagaacagagaacaattacacaacaaaaggtgccaagaactcaagtttgttttattttatggcagtagcagcatactgattaaaagatgctcttagagattaaagcttgtctttacctgagcaccctttctaaaatcttccttggcgatttctggtaacatgtgttccatatgtctaccggttccatgtggacccggatccacaaaacttgagaaacagagagatagttgagcttgggtcagtgagtattactggagaagtcaaatttttgtttttgttttgagagagtaatgtacctctcaatgaagctaacgttggagtacaacaaatatctataagtgtagtcaaaagtatgcaacggaatacaactgcacacaaaataatgatgtgatttggttagtgcagaaaaccttaagtaggacatttaagcaacatttaaatcattagtcattacctctctgaaacaagaacaaagtgttggttgtcaggatcttcaagagcgctaaccagtaaccgcttctcagcatcaaccatagaaatccttccccaagtaacctcatcactgtgaatctctcgatcagaaaagtgacggctgatgtgaactggtcgttcctttgacgggtggatatatatcgagaatttcccttcatgacccttcacaaaatcaaaaaccctcaataaatcaattaaatgtatagctaaaacttgtacatcgcatcaatgtgtgtcttaccttgaaaaattcatcccagagcttctcaaatggcaaagtaccgggagtcaagaacaagaaagcgattttggagttattggttatgaagggaggcgttcttagtatgtctctaaccactgctcgagctgctatctcctcatcagtgaatttcctgacatgaacaggtagccacttagagagagcatcctcacagcctctggtgctatagaggccgtgacacgaggagctcttgccatgttttggatacatgtgagtacagattagaagcatgctggtcactgagactgtcaaaacaacccataagggcttcttcagagatgtgtggtgacgtggcccttgcaaaatcttctgcgtctcacccattgaaaccaatctaaccacctcccctcttctcctttctaattgataggcatacaaaaattgaatcttttttcacctactccttttagattggcattgcctgatgaagaacaaagactctctccgagattagagattccggaaaacacggagagattaagtaatgtttcaaactaatcttaagaagaaaactgcttcagacagaagcaataagcaaaatgcacgttgttcccgtgatacgggcagtgcaggacattcctcagaaaacactctttagcacacggacaagcttaacaagtctaataagtctcgtgatttattctccgaccaaacaaaaatcaaaagctacaaatcccagattcaaccctccagcaacaaaaagacactgtaatgactaacgagcattctcagtcaaaaagagtcaaataaaagtttacctcgagctgaatcgaaacggtagagaatgcagaaagacagaatctttgtccgaacccagatctcaaaaaagtataatttgatcctccttgtctttaagatctagggcaaagaaaaaaaaaaaaaaaaaaaacccagaagagtgattcagcgaatgtgaggtcaaaagagagagacgcgagagggaaagttttcctttttttgctttaagagaaaaaaaaaagctttaatcttttaaaagaacaagtggaagaagattccgatcgttttggtttcttttatatctgagtgtactactactgcctctgaattaaaaaaattgaagaagagactttttggtgaaaccaacaagtcttccttctccagtgattgaattcgaaaacaagagagtacttaattaattccagcagtctattttctccaataatttcttgttagtattaaactagtgatataaaagttcccaaagaatctaaattttgttttggattggagttggcttcacgaccttttttttttttttaagttttagtattcattttatatgaatggaatggggcaatggaaagaaaaatagtccaagtgggtctcaaaaataaacgaatttagctctgtcaatcgcacttgtctcttcatgtcattcgccggtttgctccttccacgacggcggacgatctgcttttcgacattactgtcttttaattttcttttagttgcctatttttcgttgttgttgtccattacgccattattacttttactaaacaaataatattcaaaaatataacaactaaaaaggccaattgtttttaatgacccctaaatttgagaaattaggaaactggccatttgaactttgaagcgcctagaaataatgagctgcctgggaggcagagctacattacacagtgcggctgggcatctttttctgaggttaatgggccaagtggtccggcccgtataggcccttaaccaaaaaaaagaagaaagaaagaatcgtacatggaagtttgaggtgtctcttagcatcatgagccatagtgtacaaatgcatcaaaagattagactaaaaaagagttgtacgaatagtgtgatataagcagaatattcgtctttgaaacatcttatcattgcccaatttggatatgattcggctagtgaaatatgggtttatgtttcatcgaatagtagacatttatcttatgaaaagtgcattagcataaacgaatatatggcttccttaagaattcgttgtatttgtatctgactaatggagatttctttgtgcaagtagagtattgtttcttttttgtgtgtgcgggcatgtacttgtaaatgacttgtggaaatttcattattcaagtacaaatacaaagaaatttccattgattaagatgttggatagtagtagctagttcttttttcccttcgaaaaaattaaattaaatggaagatagatacatagcatctgctcggatattagtatgttgaagcctcaaaagggcctaatccaaacatcgcaattcatagtaatttagagtatgaccaaagtcaaccaatataactatctaaagttatttcagtttttctaattttcacatctataaagtaggaaaatgatttggattagtataaaactagcaaaaaagaaaatttaaattgtagagtttgtacctataagtgtagaccattaaattttgttctgcatctgatcaaatctatacaagatcaatattaatcctatacgaactataaatcatgagaaaatcctcccggaaaaagtaatccaaaagaaagattatgaaaataggcacactgagcagtaatcaaaatctgttttatcagatgagaaattgttctaatataatggatcaagattaaactccacacgtctcaggttttagtcgacaccatttttctttctgattttggacaagagcaaatcagcaaaatgtgagtgagtttctatggttttgtcacaaaacttttgtgtgtgggctcgttggatacacaaacaaagtcaaaggttagaaatttattgagttttgggtatttccggttttagttatgagtcacatattctttcacaaaattcagacccacgtttttagcaattgaattcaactttttgagttttcgtctgttttactttctcaatataaatttttaactttgatactatatataaatttttaatataatatgtaaacttgttgtacatgtttcagttatacttagtgttttaacaaataaaatacactcagtcaatcaaaaatcaactgagtttctaatgttaaaggagtatttatttttgtaattcagttaacacttctaatcattttcatgaaaagctttaaacatatgcttttagttttcaacaaacatattacaaaagctattaagttaatcttcaaagttattaagctaataacttataaacgatattttacacataataatgttagttgtagttagactaaccatgacttaatcacccaaagagaaaacaattctagaagactagaaggaacatagaaaattaaaaaatgatatttaaagaaagaaagtaataaaaatttggtaaaccgataatgaataaaaagtcaaactccataaacttcgcggaaaaagaaaagcaccgtaatggtggaaatatttttgccattaccggaaaaaaatccaaacattttaaaaatcccactgacttagccaaagatggtcactttttctctctcccccttgtctctctgagcaccagaatctagggtttcttcacagtgaatctttttttttttttttgcttcctcctcaataatcgccttctcgtaagtcaatcactctccctctcgtcacttctgctccctatgttaaaaagttcattcatttctgcttttctagggtttttttttgggatttcaaagtctagatttttcttctctgttctacttacactctgtttcttctctctttatctctctgcctctcttttgggtttctctgtttttttcttttaatggaggaccatttacatggtcatgtatttctatctgcgtggagatatttcgtaggctttaaagttttgtgcttgtttgtttatatgttctttactttaaagttctactctgttagtactctgtctgcggaattagattactggtagggatgtaaaaaaccttgaggaaaatggtagagattctgattagaagctatatatcatttgcttattccatagtggattgatttagcttgtttaaattccagttctttttgtgatagtccctttcttatttcattggtgataaatttgtctttaggtacttgtgtgaaagctcccttctttgtggagaaatggcaactgagaatcctattaggatatctggaagcaatgaaagatggtctaattctaggaaggtttctgttcctaatcgaagtggcagtgcgccaccgaacatggaggggtcttttctagctgtggataatctattgtcacgacagggcggctcagtttacaataacttgatgctaccgcgttacgggtttgaggagcccgtgaccactcatccttcttctaaacatagccttaaccgcataccttctccaccgatttattaccctactgagtatcagttcatagacaatcgtgtaggtagatttagaagtaaccagggattgaataaagttaattctcccattcatttgtcccaaggcaaactttctactcataaggaagtttctgaggatgaaagctcccaacagttatctgttaatagtgtttcagataggacagatggattggacattcgtctttcacctggttctcaaagtttggccgatttcaggcaggttaggctttgctttctttcccctctctggttgtgagtagtgaaatgtcattgtttagccctataagaattgattttttttttttttttggtggcaggatgatacttcttctgggcagacccctcaacatagtcggtctaactcttcaaatggtgaagtgaacacagcagatgagagtggtaacttctcagagttgtcagatgatgtcgtggttaaagataatgctgcttcaacggcaagagcttccattggcaatgagaagagtcctgatgaatcgactatcatctccaaaatgaagagtactaacatatccggacctggaacggctaaataccctcgagaaccaaggtatggacagccagaaaggcagccgcatcaacagcaaaataatgcaacttggattcaaggtggcagcaatatgggttctcatggtgtaaacgatgcagttatcggggccggacagtttcattatggacaaccttacaagttctcgggtgatggtcagcccgtacttcagtcttccggttttacaccgcctctgctttacactgctacccaaacggcttatatgacttcaccagctcatgtctataacatgcagtctcctgctgtttattctcctcagtatggttatggaccatacaccaacatgatccctcagtttatgcctggatacccttcccatggttctgttcctgttgttgtcagtccagatttcattcctcagttatctgggccaagtgcaggaagtgtggtccatggaggtgaaatgcagtatgcggagaagctctatgttccaccaggacaaccttcttttccagatcctatgtatatgcagtactgtcaacagtcatttgggcagatggaaccactggctcctaggaaccacaccaatgctcccgagtctcagaaagatgatccaaagttccttcgacaaattagagggccaagtaactctaatatggcaagaccgggaatgggtgttaattactatggaatccagccaaatatgggcattatggtgcagtatctgcctacacatctcggccctcctctttcaccaggtcatgttccttatgtcgaggcatatcctggatggcagccacaagggagcttagaaggtgccaatggccctcgattgtgcaattttcttgaagagctgaaatctgggaaaggtaggaggtttgatctatctgacatcacaggacacattgttgaattcaggcaagtttttatcttttctttcagaagtctcgtctcgtcttaggtttcttcccaattatatgataacaaacttgagtaaaatcttgtttcctttcagtgcggatcaacatgggagccgatttattcagcaaaagcttgagaattgtaaaccagaagaaaaagcagctgtctttagggaaattcttcctcatgcttgcaaactcatgacagatgtgtttggaaattatgtcattcagaaggtctgttcctacttgatcctgtttcttaccgtgtcttgtccatcacagtctatcccttttattgattatttgtgttgtctgtttcagttttttgaatatggaaactcaacacagagaaaggaactcgctgatcaactcatgggacaaatagtaccacttagtctgcagatgtatggttgtcgcgtgatacaaaaggtacaaaggtcaatacattttgtttggacttgaacttttaaaacaattgactcatgagtgaaacgttgttgtgtaggctcttgatgtcatagaacctgatcagagagttcgtttagcacgtgaactagacgggcaggtcatgagatgtgttcgggaccaaaatggaaaccatgtgatccagaaatgcatcgagaacatcccggcagacaaagttggtttcatgttatatgcattccgtggtcaagtttcctcgctctctatgcatccttatggctgccgtgtcatacaggtactgagaagttagtgctttttttttggcaacacatagaacttaatcaaaccattgttttttccttctcaatttcttggtttctttcattgttactcaatgcggcctcacattttcctttcctttctgtagaggcttttggagcgttgttcacatgaccatcaatgtaggttcattaccgaggagatactggaatcagtctgcgtcctttccaaggaccaatatggtaattatgtcacacaggtatgtcatgccatttaaaacttacaaatcatttacaactgaagtcaaaataaacggactaaccagtaataaccgatgttggtatttggcagcatgtcttggagaaagggacatctgaagaaagggagaggattgggagaaaactctcagggcacatcgtgcaacttagcctccacaaatttgcgtcaaatgtaatagagaagtgtctggagtatggtggtcgagttgagcgggatctcatcatcaaagagattgcagggcctgacgagagctataatagtctattggtgagaccttatggaccaaacctgatacattttctgcttgaactgattagattggatattaactgtaatccacctttaacagatgatgatgaaggaccagtatggaaactatgtggtgcagaagatattcgagacatgtacggctgatcagcgtttaacattgttcagccgagtgagaatgcatgcatctgcattgaagaaatacacatatgggaaacatattgttagtcgtttggaacagccctctattgaaggtatgaaattccccaatgtaagtcaagttcaaaagtgaggtgaataatcacaatctttaggaacaaaagggctttgctgttataccatataagctgaaacagggcgaagtacacaatcaaatatattttctatgctaaaaaatggtcggtgaatcgctcaagaatgacatgtcacatgtgcatatagaaatgtgtggtagcacaagactgaatagaataagatgggattggtagcacaagactgaatagaataagatgaggattggtatatggatcaggaagagttacacattgtgtttgttgtttctgcagaaaaccaagaattgaggagatgagtggctcttctgatttcaagacagtgggctgactcagattcactcaatacaattcgctttttcatgaaagctggatattcattgggaaggtcttagatgattgtgaaggacatcgatattgttgtttacttggaattttatcatagccgttgtgatgattgtgtggcatgttctgtaaatattcataactgtatcagtagtttacttcagatctgtaactggtttgtggaatttcacatggtattcgaaactttctagatactagagaatattattattgaagccaaacattacatgctaatcctgaaatagcctcctcttcctcaaatttcatgagctacagattcttatcacatttcaacactgttttgagactttctttcattcatctgacatgaggagccaaagtataggatcgaaagagaaacttgtcattactcacgaaatataattgaaagcagtgtagcatatcacacttgacaatggaagaaacaccccacacaaaaatggaaagctcaaaccaacacctccaaaatactatttcaatcttaaccaaagagatcgaatccgaagtctccttcttcctcttctgattcttctttcttcttctcatcttccttaggggcagctgcagcttcacccgcaccacctccacttgaggcagctcctccagcagagaatcctccaccaccaccaccaccaacaattacctacgccacaagaaattgattccaattgataaaaattacaatgcaaaacaggaattatacacaaatattgatttgtactagtttccggagccatgtaaactaaagtcacctactaaaacagagaaggcaaccaaaaacaaattgagtgatttagctattacaaagctgtaacctttaggtatcattgttaacctataaaacaagctacattgacgcaaaatcacatttgatgcaatgataagagaactatagtgagccatgacacttgtatcactgatcaacgaccataattactgtgaatgaatcattcatctgaaaatgcaagctctgattctcacacagtattgccaatttcaaagatgcacgatctcaaactgtaagcttgttcgagcaagagagacttatacctggaatacggcggaggtaggggagacaagagaaaacgaagactgaacgccaccggaggaatcagcggagagagatacctgaacgagcttacgctggagctcgtaggtagaagaagctgaagattcaagttctccttcgtgttgcttcgcgctccacgcgccgcctccattcttgcatacgaatgtgaatactcccatcttcttcaatgtctgctaaaatcgatggcgatagtgagagatttctggaaaaagtgacgatcgagagtggttttgtttttatatacgatgatgaacgaaagctcaaaaagaagttaagaaccctagttttttggaggtctctgagtaaaagactgttttacccatagtggacttataggtcttaaatgggccacttttgagagtaatgaatatatataggcctagagtgaatagcaacaacccaccaaggttctttcacttctttgaaaaaccaaaaaagcaaagatcaacaaaatttatcagattctacgagagtcatttcctaacacatgagatgatgagattattagagtatcacaactctcaactatgtttttccataaactatgcatcgcaccattcaccacatgatattgtaactcttaagtctaagccatgaaatcaacattgaagtaaaagaactcacatagtaaattggttttctattggtttatattttaacaaaattatactgtactcatgtcatctttatgtcaccaaatcacaaactaattttctacttttaaaacaaaacatctaccaattccaccacatatcctaaaaactgactcaaatctctcaaaatctaaaatttcctaaattccacaaaatcatccataatctttaatcctccttagttatgatatcaaaaaaccattttattttaagtatctaatttccttgccataaattttattctctagtttagctaaacttaattggaagtaaagtttattgttgctgatatataataaaatattttcatgtttaaaaatctaaatatagttgaatggactctttaacaagaaagtaaatattggcgtctataaggtcaagagatgtggcgtaatgactacttttgagcaaatcagtggacaaattaagactttccaatctttcattggtcaagtctaaatataaatgattggatttctaagtttcatttcctgtttttaggctcactcgtggactttttttaatttctttcctttgccatatttataaaataaaagagagagaaagaattttcaataattttcaacaagcaaagttcatgatggggaataagcgaaatctcggatttgtgatcttcttctgggctctggtggttgcagtagtagccacggccatcgagcatcgtcgcaatgagaggactaaaggcgtcaatggtcttgacaagatcatcatccgcgaccgtcgtggccgatctgctgaggtactcactcttacggtttggtttagatctattgattgtgtcatttacatcaaaaaacttggcttcaaaacatcttttggatattgcatgatgcagattttgtttctttgtttattcaggtttacttgtatggaggtcaagtcagttcttggaaaaatgagaatggagaggagttacttgttatgagtagcaaggtaacttcagtcagattcactctatctccttttaggatcatatgattgctacaaatattgttctctgattggctaaaaatattgttctctgattggctgtatctgcgataatgtttttttttttgttttgcttttgtatgtgcaatagttgactaagtaaattatgcaaagatgaatctttacatcttctttttttttgttttgaatctttacttcattagaggcttgtaaatgaatagataagtatagcttaataatctgctttgttctaaagtagtagtaattttatgtgtgtgtatgagttccaaagcagagtgatctaaaacatgtgttacgtattgtgcaggctatattccagcctccaacaccgattcgtggaggaattccagtattgtttccgcaagtatgtgtttatagaaaaaaaaacttttctttgttgttgaagggtatagttttgttaatgaaatgttttttatggaagtgcagtacagtaacaccggtccacttccctcacatggatttgtaagacagaggttctgggaggttgagactaaaccacctcctttgccatcactttctactgctcatgttgacctgatcgtaagatcatccaatgaggatttgaagatctggccgcataagtaagattcttgaaacatctctctctctctctcattttcaacattttttcagatatttgattaggaatattttacataaaatatggagactgttttttaatctatgtatccatttcaggtttgagtatagactgagagtagcattgggacatgatggagatttgacgttaacatctcgtgttaagaatactgatacaaaaccatttaacttcacatttgctcttcacccctacttcgctgtttccaatatcaggtaatccaaggagtcataacttcacgttgatatctttttttttggttgtgttggtgtaagtgtcattgaatcagctggttgttgtattcagtgaaatccatgtcgaaggattacacaacttggattaccttgaccaacaaaagaacagaacacgtttcactgatcatgagaaggttataactttcaatgctcaagtaagcctctttccatttgccaattcaaatttcaacccttttattattttagtccatcactaaaaaaaaacacaccttgcaaaaaaagcttgacaggttgtacctaagcactccagatcaactaagaatcgtggaccataagaaaaagaagactattgttgtacacaaggagggacaagttgatgccggtaattacaaatttagatttgtaaacatacatagacatagacacagtcacacagaaacagattgttttagtagtactaatgatggatcacttgtaattacaatgtgcagtggtgtggaatccatgggataagaaagtatccgatttgggagttgaagactataagcgttttgtaacggtggaaagcgcggctgtcgcgaaaccgatcacagtgaaccccggcaaagaatggaaaggaatactccatgtttctgtggttccatcaaatcggaaagcttgaccctataaaagtcttgcattcatcatcctcatcctttaaaaaaaaaaacttaaaactgtctttattaaagtatacttaatgttcccgagagacatcacatggtgaacacaaagttagttgggttccaaactggactcttgaccagttttattgttttgtaactttagcattcatgaataaaaaaagtgcgttaattacaataattgttaaatgtaattaaataaaagtgcgttaactacaataattggatattggttatttgcaaaattcatgttcttaaatcatcagtctaaacaaaaaaattagattagccgaagatttcttcttctacccttgatgatactatttgggatgggcttgcttagatgtgccgaatccaattctcgtttttgggtctatctatatttgggctgggctttataagaggcgaagcccatgtcgaacaatcaatttttttttaattttatatttcttttgggagtctgttctgtcgtattgattaataaagtaaaaaatcttagccacaaaattaaatcatctccaagacgtatcaatatcatcatcaatccaccaatgaaaagttctctctttttttttcccactcttactctgttctcgctacagaatctcctgggaaaaaaaaaaaagaaacttgatccacccgaattccccaaatcttcacaatttctggaaactctctcgatcgtgaagcagaaaagtgaggttccaaatgggttctgtttcgggtcaaacccgaattacaacgatgaacctctcgctctcaacagcagagaagaaccctaatttccgctcgtcgcttctcaattctaaggtaattgttatcacttcgtcgagcttcaccaaaaaaatgactccttttgcttgatttcttcttctcctctttcgcttgtgtttagaacgcaatttcagatactttaggggtctcttccaaatgcagtacattcctcaggggtcaatttcaaagaatacatttttcttggctacaacacactcgacctttgagaaaacgaacaggtacttgatttgcaaaccagaccaatctctttagaactttagttgtgatttagattcttgttatgtttggtttagtatttggtcacgtgagctgcgtcatgccgttaacggaagagaatgtggagagagtgttagacgaagtacgaccatctctaatggccgacggaggaaacgtggcgttgcacgaaatcgacggacttgtggtggttttaaagctacaaggagcttgtggttcgtgtcctagctcatcaatgacgttgaagatgggaatcgagagtcgtcttcgagacaagattccagagatcatgtccgttgagcagtttcttgaatccgagacaggaggtttagagctgaacgatgagaacattgagaaggtttggttttttaaaggtttagttatttttggtttattagccccttggttttgaaattgatctgaatggtccttttttggtttgttgtcaatttaggttctctctgagttaaggccgtacctatccggtactggaggtggggggcttgagttagttgagattgatggttacgtggtcaaggttcgactcactggaccagctgctggagtcatgactgttcgtgtcgcgttgactcaaaaactgagggaaacaattccttctataggtgcagtccagcttctagagtgacattaacctttttattttgtaacttatatacaaggcctatttttgattcaatatattttatttccaattatataattagtacaactaatacaataaccatttctgttgaagaaaaaggaaaagaaaaaaaaagtatcctatgtatgaaggacattttctctagtgatccttgtttttaggtaacagttataaaatattcatgacttgactacacaaagataatcgaacttaaagagttatttccttaaaccaattattctctaattaaatatgcatttatagcgagttcttggtgagcaaggatactagaatctctataataagtcggacataagaagatatgaggaaacacagacataacatagttaagagtttcaacaatgtcaaagcttataatcaaccgaatattcaaaccctctgtctgcaaaaatttcctcgtacgtaagcttctcttgctttttctttttaactttaattttgttcttgttgtctctgaatacttgaacataactatggcagagacacgcaaacgttcgtctgttctcatctgcaactcacacgagtactaaagtgaatcagcccttctcgtctaaaccagccttcccgtttctgttgattgactacatcctaaacaacccaaactcttcctccgatggtcgcgtaacaacaaacgtttacggtaatgaaaaggaagtcttgattaaggacaaggatcttaaggaggaggtctgtgatgcgatgactgtcgggttttctcgtgatgggttgcgagtcgagctttgtggcaaccacggcgatgtatgttctcccaccatcttttacaagcctactgaccccgaaatagaagacttgaccgttgatctacctcctctaccgacgggttcacaaatccaaagcctggtcatgtcctctttacctaaacgagacaaaaattgggtagttgttgtcaagttattgggatctcagttgagtatgtgcaggccttttggcagccgtaaatggatcaacatccaaaccaagcctcagaatataaacccttcatcgagcatcatgttttccaagaaagagaaaaagttctacgttccaactcccggaggcaacatcttgtgctatttggatcctcactcagaggacgacgacctaattgatttcgtggaattggagtttgacgatcttccaaaatcggtgtttcaagagttggccgacgtgagtacatgttctaggacagaccaccttgtggagtcacccaccggccaacttttcctagtcaagtggtatactatctaattaaagctatatatagcttttgtcttcataacatatataccaaaatctctaatcctttgcttgagtatcatattggcgcgctttatcatgtctttgcaggtatggagaggatttagaggacattgacaacaccacactgtataatgtaacaaaaaagttcatggtgtttaaagagggagagaaaccgagttgtgtctacactaagaagatgatctatacagaagacattggagatctttgcatttttgttggacatagtgaggctttctgcgtcccggctagctcgtcccctggcctcaagcctaactgcatctattttgtgggctataactttggtgtttatgatctcaccaccaaaacttgcactatgttcctcacaaaagatgataatccattaaggaaattggaattcccttactggcctcctccggcttcctttccagtactagctcctaattaattatctctcttgcacgtgtttatgtttcgctaatgttatcgctgtctttgctttcccatgatttcatttaaatccaatgttctcttttaatctatgttcaatgaaatttatattagtgccttaaaagaaggcgaatctatcctaccaaaaaaaaaagaaggcgaatctaaacgaattcggttaattcatcatatttctcaattaatatacgtaagacacactttggcacaaaacttatataattatttatttcctgaaacaagttatcctctaaatatgtatatttaatgtcctaaggtgtagtaccctcggtattcactagacagagacggggaagacgaaagagtcgcacgtcaaatcaaaatcacaacacatattttgagtgttgttacattattttgtggtggatcactatgtggagtcaccctccggtgaacaattcctcgtcaagtggtatatatactatagacattgcttttgaataaacaattatacaaactattaggttaattactcaacattttaatttgatttaatggctcctcaccaaacacaagaagagaggtgaaacatgttatcttatttgttcttccatgcatttgtttttaggtacggccacaacttaatgcgcaatcacaacaaagtggaaacactcgtgcacatggcatcacagtttatggtgtttagagcggaggaatcatgggaggaaaagtatgtgtattacacagaagatattggagatctttgcatctttcttggacatagtgaggctttctgtatccaggccagttcgggctcaagcctaactgcatctattttgtgggctataactttggtatttatgatctcaccaccaaaccttgcactactttctacacagaagaggatgttccattaaggaacttggaattcccttactggccacctccagtttctctctactcataaaatttaaaatattttttcattagtatttatggtgttttttttcttttctttctatgctactatataaaccctttctactctactttcaatggaaatttgtgtggtgtttttttttttttttttttctagacaacttctctttgttaagagtcttaaagacgatatataattagtcattccattataaatgaaatgggttattgtttatttccttagaaaaagagtccatctccaaaaagattcttctattaattgtgaacttggtgcccaaggccatctctctttattactctgaagattgaagaccagtcacaaacatagtttagggttttcgaccatgtctcagctcataaaccgacttttgaagccatctgtctgcaaaaatgtcatcgtaagtttcttatttgttatgtaataactagctagggtatcattttgggtcttacttattgtatgattacttgtatatggcatgcagagatctcacagcaagcaggttcggatgttctcctctaagccgacatacccgtacttgttgattgaccacctccttaagacgacggaacactgttccaatgatcaagtatactacgatgataaatattacgaaaagaatctcgtgattaaggaccagggactcgcagaggaggtccgagaggtgatgaccgttggattttcacataaagatgattggagagttcacttggagaaatctgaggatagttccacaagtctcatgatggtgagtaacacatcgtttgtcccagtgaaacatcagctccctcctctgtctagtaattgtcgaatccagaatgtggcaatatcaaactctgttgacataaagaaggaagacttggttgtggctgtcaagttctttggatctgatgtgagtctgtgcaagcccttcagcgactctagctctgaatggatcaacatcaatacctctggctctgtacaccctttctcgagtctaacgtattcgaagaagaataaaaaatttctcagtgttagtccttctgggacgtatctttggtacttggatcttcacttcgatgaggatgatgtcgagccctactcatcatatttatattttagggaggaccctctcctgaggttgtataagatggatttggaagattacatctggcgtttcagaacagaccacctggcggagttaccctccggtgaacatttcctcgtcaagtggtacgtatttgtttattaattataagcgcaagtttgctacttctatgttgaaacacatagatatcttcttttgcaggttctttaaggacgtgatgatgaacgtggggaaaatcacccagaaaacggatgggtttaaggtgtttagagtggatacaatttgcggtcacttgactaacacgcaagacattggagatctttgtatctttcttggacatggtgaagcatactgtgtcccggcaagctcgtctcctggactcagacctaactccatctattatgtgggctgtaactttggtgttcacgatattgcaaccgacactaccactaacttctacacacacagtaatgttcctttaaggtccactgagttcccttactggcctcttcctctctcttaggagtgacttttgatatcgtcggatgtctctaatattgggtggctcttgtggtctccaatattatgttattcttttgggtttggttcatgtactagttaatgtttttggttcgtagatctccgactatttgaaaataaaacatgagagaaacccgttttatctttcttaatcacaactcagactacttattttgaaaacctaaattaactcatttgcagggtaaaaagtaaaggcaatcaaaagtgctgaaagataaaaatggctaagaaatcatcagtgagtagagttgtctagtagaaagaatgaaagaataacactctgaatatatataatcaaactaaaccaaaaaaaaaaggtaaccaagagaaagagagattattatctgagatgttgtaactctagaggagcatatgatgatggttgttttgttgcggaccagctgatcctggcggaggtgggagggcaaggaaagcgtctccaaaaggattagaaggagaaggaccggctgagaactgatgatgatgatgattttgatgataatcatgaggatgagtgtaattgtagggactctgatgcatcatcgtcatctgttgttgctgttgttgttgcattgccatttgaacattagtgggaggagcaatgttgttggacattgcaaaaggatcttgttgcatttggaatgggtttggcggtgctgctgttgtgtctatgccaccatgtccatagcccgcattggttagctggatctgtctcctagctgaatcatcctcgtacagactgtcaagcaatagattgtcaaatcctcctgcctataaatacaacaagagagaacaagcccacgtgagttttgagagtagaaacagagagtttcatattcaaatatatgtggtgttagagttaattacaagtttggtgttaggcgcagggcgaggattattgttgttgttgttgttctgaggagtgaccagtgccaattcccagccggatccaccggtttctattaaacttaaaatgtttgatggtcctggagcttcatgacctgcagagaccaataacagcaaaaatttaccattagtgttagaaaatctctagttttggtcaagaatcaaatttttgttacctggtggatatattgcaagagccaatgcatttcggtcctctatctctgcggctttagggttgatctcatttagtccctgtgaaggagaagaaaaggttgagactttggccaaaagagatatttgtacacataagatgacgtgtagaagaagattcaccagcagatcatcagtgtctatcaggaaagaaggtttagcatcttcctcttctattttttcttggtcttcttcctcttcttcgataagcggctggtctccttcgctgttttccttttgattatcggcttctgcaggttcttcaggctggacagagtgttctgcttcttcttcttcttgttcttcttcctctttttcctgatactcctgtgaaaaacacaacaaaatgtcaatcataattcataagaagactgatattgatgaacaggacaacatcaaccaaatatgatgagagtaaaactttgtaccagctttttctgtacagaaccactttgaggcgcttctttaatgtagtcttccattgttgctaggaaagaaggaggaggctgaaacaagtttttaaaattaagtcttttgaggtgatcaatctcacattcatttatcacaagttaagaaggaacctgtcttaaggttgggaactgaaagtttctcgctagctctagacctttgcagtattcataaaagtcagccaaattttcagcctgtgcagtggaagaacatcaataaacaagtttagtgaagatggggatttagtctatagctttagagcttttacctgttggccagctcgtttatatatatttagagctttaactgcatcatgtcttgacatctcaaagaactgaatcaagagcatagatatatactttagcaacactcaatagaagcaaattgatactaaaacaagagaaggagatttttataaaaaccatgtctacaagattaatgattccatcattaatggcacagtagattttgaagctttctttaagcaccaatgcaagagcatactggattaggtagttgctatatgctgatccttcaggctgcaaaactgaaaacatattaagaaaccgttcgacgtaacaacaaaacaaaaattttggatatataacttttacctgacaaccaataagcctataaagcagctgttgcaaagcaggtaactgctctagcaattcttcatcggagagcatccttgttctatacgtttgagaagcattgaaatctacgttctgtaataatgatttatgatgataaaattagattcttgtgtttgtttaaaaggtgagaacgaatttgagaacaaacctttgaagatgcacctgaaccttttggtaaacgttctgcttctatgtcatacttcaaaacccgatagcattcaagccgctcctcgaggaaaagcgcgtatgtcctaatccacgcagagcaatcccaagctgcaacaaacaagtcaatacaagaaaatgttttaaaacaattttcattaacacataaaaagctatgtaacaaaggatatataataggctatttaccaagaggacttgtatcgtctttgaagtttgatattcgaagtatatgtcctctatgtgagtaattgagaagctcttctctaaatgttggatcaccttctcttagtgttctatgaatgactattaacaccttgatcgcaacctgcgtgttggaaacacaatctaagcaaccccaaaaacagagttttgtaaattgaaaaaaaaaagaatcttttaagttacatagaactcacaacccaattgcgagtttttgacaatcttttggctaatgcgtgaatgcagtaagcaacatctgctcgtggttgcactaccgatgtcgccgagaatattcctggatagaatgataaaaactctcataaagatcgtatccaaattcaagtgtttgggggaataagttaagaaacttactacgaatgtgacgttctttgggagcagattctacgtgatttgtggcctttacgatcgcaacatccaaatcctatatatctcgatttcatatacattttattagtcatttacagattttttttgttaccaaaaaatttgaaagtttcagaatgtaatcctgaccttgaattcgctgttgaccttggcgatacttacggtagtggaatctttgattgctccgacagctttacggaagctgttaaacgttgccatctagcgataaatcggaatctggataaatttcttgataattccggcgatcaccggaattgtgaaatgatttggttaggacggagagatggagaaaagagaagataaggatgaagaagacgaagaccaagtttttgatatgctctgttgttagtcgccttaacaacaaacagaacaccaataacagacttttcaacaatgctactctctatctctctcttgcctcaccattacgtgcgtaacggaatcttgattattatttttaaatagatttttgtaatttatcagagtaaatttatatcgaaatttgtacatctcatttactaatttcgtattattcctcctataatcggatgccagttattaaacttttcttttattttggtatagaatcatcatttgcctcaattatcgatttatacatagctaatgtcaaaatgaaatccagtaatttttgtaagatatgcaatgcaatctttgtccaaaaaaaaaaaaaaaaaagaaaggtaatgcaatctcaaattttccattactcaatctgatttaaaaaaaaaaaaaaactattttacctgattaaacatattttgaattttacatatgtagtgtcattttaaataaaggaatttattattatttatacgtttacaaaattgagcgcaatgtcaaagctacgccatatggacctaatgtgtcggactcggacggtagttcatacggtggttgccttgttttgttccaaatgctcatttatttatcttagtgaatgtcattaacaagttaacagtttgtttacgaatgtccacataatgctcaagagtacgaatatgatacaaatttaccaaacattgcatttatcatgcatgcatgttctcttttgtacttatgtttaaaattcatcacttgtgtacttagtttcgttttcgatcccctcctcttttttttacaatgatactttcatctaatgtttgttttagtttccatatatttatgagtttctctaccaatggactatgtatttggctctattagaaatcgcggaccaaaaaactagagctgaagaatcataacagttttattatcaggagaataagatacgatgggggcggtgtagtgagaatcatgctgcagtagtggtgacatacttgatgagcatcttgacaatatccttggagacctttgaactagattccttaaggttcgtaatcctgacatctgtctcatcatctaaacgttttgcatctgcttcttgatccgtctgaaacaaaaggtaaagaatatgagtacaaatcaagatatctcactagccggttttgtttcggtgttgcttaccccagaaacttgagtttgatactcttcttctaatcgggatctgtattcttccatctccttctcagcctcatctttcgcttgcttcattcttgctagttttgctgatcatcgatccgtccatacaaaaagaaaagaaaagcgctgaaaaggattcaaaaccaaaatcttactattagagccaacaagccataaaggagaaagagactataccggtcctcgcagctgaaacaatccgtccggcttcttgttcagcagttaaaagcatctgaatcccaccttggcctcttaaagaatccatggcttatgttctcttcaaagacaatgaaaagttgtgtttattcttctgcaaattttggtgccagaagtggaatttgtaaatataagcctatttggttatggtttggattagacggagagtgtttttctccttggttcatggagttagtttttgactcattatttctttcttcaaatttagatgcttttaaaaagacaatgtgcgatctccgggtgagtgtggaaggaaaaaataaaatatatctcaaacatactatttatagaaaatcccaaccgattacaaagcagctgatcggtgtgtatttacaagtaatgtgtgatttttttttttgaaaaatcgtgaattaaaaggaatcccaacgtgtgaggtgtgactctaaagtctgaataaagttgacgatccataattttcttatgtttgccgtcgattgtgagaattgagaagcatatgtggtttctcttctaagagttaaaaataccgtgaaataaaagctatattaattcatatgttttatcatatatcttcgaatatcagcattagaccttattagccagctcaagtacgtcattttcactgatataaatgcaaattaataaccagatcgtgcccaaaacgaataaattattccatgcatgcagttgcatcattattttttggtatagtataaagttgcatcattatacttcgcattaattttccaccacgcattccctcctaaataaaaagaattaaaattgtcacatccatctatatcaacataagcaagaggttcgagttggaagataaaggagatttttttttcttttccatatttcatctatttggaatggtgctgtcaaaatatctatcaagataatttacaaaatatgatggtgaacaataggatgtggttgttttcggttatccttatagcgtcttgtcttcttagattcaaagcggtgataatagtcgcggccggagcggtggccataattgcgtttgatgcggcgatagtttggttaaaggtctcgttgatgtttgaatgccatactttgatgttattctttccttttagtttgttattttatgttcttgtacaaaaaagttattgaattgccaaagaaatcttttctatatctataagttcaatatcgaacttcagaatataaaaaagaaacaattgatatcaataacattcaaaataattgaaattaataaacagtgattctaatttagccatttacaagcaaacttaaaagataaaggtgatctagatatattttaaatagaaaatggaatcatataatgaattttttgaaagtttcaccatagataagttgttgaaaacacatggtgagttttttactcatcaatgtcgtatatatgacttaaaaaatactttcttatatccaaatataaagaaaaagcaattaggtatgtaacgatgaagcaagattaaattgaaattaaattgcaacaaataaaatttgatagaaaaaaaaaatagtttttaccaaaacgaaaaagcaagattaaaatatgtggaaaaaacgtcgaatcaggagaatatatgagatgactctcagacatcataacacatacatacgtagtaatatattaacaactgcgtcgaatcgtaagacttggtcacttcagtacatgactaagcatcattcgggaccagccaaaaaacatgtatgcttcaaaaccagaccccaccacattataagctcatctcagtcatcaccacaaccaacgcaaagaattcttcttcttcttcttcttgacttggcgttttttcttctaataattttaattttaattttattttcaacatattcaagtaattaataggatcgacttgttggaaattgtttaagttctacttgttgaatattgtcaatttatttggatcatgttatttaagttctacttgttccaaaaagatatgaaagctaattggaacagaaatttgtctagtttcttaaaaaaaattggaaaatattattttaacgtatattttttcagatatatttcaaaacataataaagaaatattttgatgatataaatttatttaggagatgtatacagtcttaagtttttcttacatgaatttgagataaatcttttcttcttgaactgattaaagagggtatcaatgtcttattgaatctcaatccagcggacatagatcaaaagtccaaagcaacaacatgtgaacgcgttttgatataaatacaatcattatccattaacacgaacttccttttttacatcatttttaacttcattgtaggggcgacgtgttgaagtcttgaataggggtggacattttttggtttatttttagagagtttggatttggtttcattttcccaaactagagtttaatagagttctgaccgaagttatttatttggtgcagatcagtttattagatcattcatcaatttcttattcattatttcatatttctaattttttttatgaaaattatcgatggaattggtttcccaaaattttgtattaactcgtattttcataattttctctttaacaggttatacaaatagtagttgtcaactttacgtaaattacatcaaattttaagtaataaattttaaaattctagatgttgttaacaatgacaaacaaatttatttagtgacagcatttttattcagttagtgtatacacttttgtttttgtcaaagactataaacttaaaacatttaaatatagataggagtagttgaatcatctttgtaagtttgactattacaaaactgagtcttaaaagacattttatattaaaagatacctcagataagcaaactcttttacacgaaaatagacacttgttcctttcaccatttattatccctcccttaccgtgagcaagctaacgagccgagaaaactacgcacgtaccaaattaatacttcaagtaactactaccatttaccaacataattcggtaaaaaaactaaacaaaaatccaaaatttgggagtgatcaaactttattaagagagttactaactagggtcacacacacatacatacatagagcttcacaccaaacaattctcgctgaaaccaataaacttggtcttatgtcttctttcatttaatgtatatctctctcatcttcttcctctctaaccactttcctcccttaatttctatccctatatttattttcctttcattttcctctccaactaattacacacacttgaagctgaaaaaaatgcagccgtccggtgatccggcgccggaaaaggagaaagagatgacgcagccaaaagtgtcactgcttaagctcttctccttcgcagatttctatgattgtgttctaatgactcttggatccgtaggagcgtgcattcatggcgcctcggttccaatctttttcatcttctttggcaaactcatcaatattatcggtcttgcttatcttttcccaaaacaagcctctcacagagtcgccaaggtttttcaatattttagtttattcattttttccttatgatatagtattgatatagctcgaaatatcaaatttataaaagaaaatttgagattcttcgccagcttactcggaggttgaagtgaatttttacctgatatttagaaaatttactatattgaaattaattacatatttatgctaattatccgttgttctatattttttcaacatgtttgctcggcttaaattttatttattttggtgcagtactcgttggattttgtatacttgagtgtggctatactattttcatcatggttaggtaaataaaaatacattaaaatcaagtaatctctctgagatatataattcttttctaattagaaaacaaatttaaaaaatggaaacagaggttgcatgttggatgcatacgggagagaggcaagcggcgaagatgaggagagcttatctcaggtcaatgttaagccaagacataagcttattcgacaccgaagcttctacaggagaagtcatctccgccatcacctccgacatcctcgtcgtccaagatgctctctccgagaaggtacatctcttaacccaaacaaaccggtatactgatttctttttcttttttttggttaagattttgtggtagctcaattactagatttgttacgaaaccagatactttttgtggtacccattcgtaaataaatgcattaggctttttttttttttaactatctatatatatacacaaataattatttgtttttgtgcaaatacctactaaaatctgttaattaatgcatggcctcggttgatcaaatctatagacatttttttttcaaccctataaatgatatttaggtcgttacatttaaaaatctcttacatgggtcgttttttatgcacatggcttgattaacccgttcagttttaatgtgaataacactaatggcttaatccaataatgttaaagatgattttctttttcttttcaacatttttttttttttgcattatcatttttcaaatttaataaagagatttttggcatgcatcgatctcttctcattactttcttttctaactatattctagatctctagttatattcgtcatttttctgagacactaataaagtgtagacaagtgtagatgcctttattttctttttatcttcggtccttgatgcaaaaataataaatgcattgtctttaattcggttatagctgcattgcattttgcatttataaggcggtcgagtttgatacgatttaattcatattttaatttttgacctatatttggttctttaatttacagatagctagccacaaaacagttaatcgcctaaattcaaaatttaaaatgtgatcacgcaaatccggttggtttatgataatttgtctggattactggtaaattttgtcgcaggtagggaatttcttgcactacataagccggttcatagccggttttgcaattggattcactagtgtatggcaaataagtcttgtcactctatccatagtccccttaatcgctctagctggcggcatctatgcgttcgtcgccatcggacttattgctcgtgtccggaaatcatacatcaaggctggtgagattgcagaagaggttggttacttcttggacaaggaaacttataagtgtatagttttcagttatttttcatattagtgtctagtgctggtgtgtatcatatatctatgtgattattcaggtgatcgggaatgtgaggaccgtacaagcattcaccggtgaagaaagggcggtgagattataccgagaagcgctggagaatacgtataagtacgggagaaaagctggtttaaccaaaggattaggtcttggatcgatgcactgtgtcttgtttctatcttgggccttgctcgtatggttcacaagtgttgtggtccacaaggatatcgccgatggtggcaaatcattcactaccatgctcaacgttgtcatcgccggcctgtaaatataaatctccctaacttgttcgcttgctctccacgtttcctttgttttctctttttgtgggattatgaagtgtactctgtttttgggttttgtgtaggtctcttggacaagcggcgcccgatatttctgcgtttgtacgggcaaaagccgctgcttatccaattttcaagatgattgaacggaacacggtgacaaaaacaagcgcaaaatctggccgtaaactagggaaagtagacgggcacattcaattcaaagacgcgactttcagttacccatctcgccctgatgtggtgatcttcgacaggttaaacctagctatccctgccgggaaaattgtggcacttgttggaggaagcggatcagggaagagcacggtcatatctttgatagagcggttctacgagcctatttctggagcagtgttgctagacgggaacaatatcagtgagctggatattaagtggttaagaggacagattggtttggttaaccaagaaccagctctgtttgcaacaacgattcgtgagaacattctgtatggcaaagacgacgcaactgctgaggagatcacccgtgccgcaaagctctcggaagccatttctttcatcaacaacctccctgaaggatttgagactcaggtctgtcaataggataccttcgaatacaaaaaacaactgtagaccctagattccactttcgccttagggtaaaagaaacatcaatgtcaaaccctaaaactctgttttttcacttataggttggcgagagagggattcaactatctggcggacagaaacaaaggattgctatatcaagagcaattgtgaagaatccatcgatactcttactcgacgaagcaacaagtgctttagacgcagagtcggagaagagcgtgcaagaagcgctggatcgagtgatggttgggagaacaacggtggtggtggctcacagactctcaacggtaagaaatgctgacatcatagcagttgtacacgaaggtaaaatagttgagtttggaaaccacgagaatctcatatctaatcccgacggagcctactcttctcttcttcgtctccaagagactgcctcattgcagcgtaacccttccttgaatcgcacgctaagcagaccacataggtactatcgcttagcaccatcctctgtctctcaacattttcattcgaactaggtatagaaaccaaacccttaattctcatagctgttcttcgttcttttttcttttcacatctgcagtataaaatactcgcgggaactatcaagaacaagatccagcttctgttcagagagggaatcggtaactcgaccggatggggctgatccatccaaaaaagtgaaagtaacggtgggacgtctttactctatgatccgtccggactggatgtatggcgtgtgtggcacgatatgtgcctttatcgctggatctcaaatgccccttttcgcgcttggcgtctcgcaagccttagtttcctattacagtggttgggatgagactcaaaaagagatcaagaagatcgctatcctcttctgctgcgcgtccgttatcactctaattgtctacaccattgagcatatctgctttggcactatgggcgagcgtctcactctccgtgtccgcgaaaatatgttcagaggttcgtctcaaactctcaatgcaagctttaaataaatgataaatttaaaattcttcagaaattagagatcccaatttttattatcatgtgatacttattctgtttttggtttaatagcaatcttgaagaatgaaatcgggtggtttgatgaggtggacaacacaagctcaatgttggcatcgcggcttgagagcgatgcaactttgcttaaaaccatagtggtcgataggtcaacgattctactgcagaacttaggtctagttgtgacctcttttatcatagcatttatactcaactggcgtctcactcttgtcgtcttggccacatacccattggttataagcggacatatcagcgaggtaattaacgcaccgttttgccacttttaaaaattttcctttatgtttatgtttacgtttgtgtttttgttgtatttgtagaaacttttcatgcaaggatatggaggagacttgaacaaagcatacttaaaggccaacatgttggccggtgagtctgttagcaacatccgcacggtcgctgccttctgtgctgaggaaaagattctagaactttattcaagagagcttttagaaccttccaaaagttctttcaggcgtggacaaattgcaggacttttctacggtgtctctcagttcttcattttctcttcctatggcctcgccctctggtatgtctctatgtatatagaagattgtaaattaataggcctagggttcagaccaataaagaataggcatagggattcaccggttttaaatattgaattgtcaattgtttgatttgataggtacggatcaactttgatggacaaaggattagcgggcttcaaatcagtgatgaaaacattcatggttttgattgtgacggcgttagcgatgggtgagacattggctctagctccggatctgctgaaaggaaaccagatggttgcgtccgtgtttgagatcttggaccggaaaactcagatcgttggagaaaccagcgaggagctgaacaatgtggaaggcacgattgagctcaaaggcgtccactttagctacccttcgagaccagatgttgtaattttccgggactttgatctgatagttcgtgccggaaagagcatggcgctcgttggacagagtggatctgggaaaagttctgttatttcactcattctccggttctatgacccgactgctggaaaagtcatgatagagggtgagtgcacttgacttagacctatgaacacaaaattcttgcgtttcaagaaataactaaggtttcttggatcaaaagacagtagttgtttagttgaaataaatttgtttttttccctcttacccaaattgcaggaaaagacatcaagaaactagatttgaaagcattgaggaaacacattggtcttgttcaacaagaaccagcacttttcgccacaacaatctacgagaacattttgtatggaaacgaaggagcatctcaatctgaagtcgtcgaatcagctatgctcgcaaatgctcacagcttcattacctctctcccagaaggttactctaccaaagtcggtgaacgtggagttcaaatgtcaggcgggcagagacagaggatcgctatcgctagagccattctcaagaatccagcaattctattacttgacgaagccacaagcgctttggacgttgaatctgagcgtgtggtaggtttctttaccattagactttgtaaaatttaatcacaatggactaatgagtatacaacgaatgaatattgttaggtacaacaagcattggatcggttaatggctaaccggacgactgtggtagttgctcacaggctatcgacgatcaagaacgctgacacgataagtgtattacacggaggtaagatcgtagagcaaggcagccaccgtaagctcgttctaaacaagagtggtccatattttaaacttatcagtcttcagcagcagcaacaaccttaaattaagtactatactttatttattgaaaaactctttttatttttatttttgtggaaaatattgatcatatactcatttgatgtgattatcttaatcttcttgatttaccgttggtaaaaaaaaagttacgaaatccaaaataggaaaatgttctgaaacgttggctatgtattttcacccaaatttggatttagttatttttgagcactgtctttatcgtcagcacgtttcactgcgacattctccaaaggaaatgatcaacaaaaggacaacttgattggtttcaggaatctccagagttcatcatgtcctactaaatgacaaaaccctttacaaaaagggagccatcaccacaaataattaaataaaaccaagtcaaattaaaactgtattaactatttcaccaacaccaagttgaagttttctaattactattttttttttttgtcaaacatcatctttaatatgttataaatcgtttgcataattttgttataatttgtttgtattatttggttataaaatctcccacctttttggttatttcacacatcttttacttatacaaaaatctttcctgattttaattaaataaagctaaaacactttagtaatacaagtaaaattaaaaacaaaacaaaaaaattcgggaaaagtatttggtgtgataaattccctctccagcttctcggtgacacagatattttgcttccaaataaaacgagtccggtcactggcgctcactgacttcgtcttcctccatctccgatccattggtttaacaagcgcgtgagggccagatagaccgagaatcatgggaaacggaaactcaacggagacgaaagagtcgcgccgatcaaagatgcgtaagaagattcaaaactttcgcagccgccgccgtcttagtcgtccaggatccggaagcgtctctggattggctagtcagagatctgtgagcgcagatgatttcgccggcattgctcttctcactcttatcggcgtacggctttacttctctcctgattgtatattgtcctagtcaacttcgtatttcgattacgatagtcatgtgtcttttggcatctttctcttaggcggagatgaagttcaaggacaagtggctcgcctgtgtttccttcggggaacaaactttccgttcggaaatttcagattcgtatgttaccaacgatttttcaaactcttgcttgtaactttttggaatcttatacttaacaatgtcttgtttctgttgaattttgcagcacagagaagccgatttggaactcggtaagaaaactctcgattactatttctttgtagcgccttttgtgaatagttgggtattgtatcggttttgtgtgtttctgtatataggaaaagaagcttctcctggagaaaaatggaccaagtctggctagaatctctgtatttgaggtgtgaagtattcagagtttttttacgttctgctttctagatttggggtttagttattgatctgttgagatgattttccttttcttgatgcagaccaatagactcttgaagaacaatatcgttggttattgtgagcttgatctacttgatttcgtagtacaggtcagtaactaaagtttgttttttcatatgaaagctgtttaagttgtttatccgttattcctctagctcgactaataagtatcagctagttttttctatcacttatcttccattgtttgaggagattcagccacagtttagctgataatagtaggtgcatggattagatatcttgaatgattaatcgacgagaaacttgtttgtttacatgtttattttacttctcttttgtataatgtgatataggaacctgactctacttgcaagtcatttgacctgttagacccggcctcatctaacgttgttggcagcatgtttgtttcatgctccgttgaggtatgcagtatgttaaacgttaaaacagtggctaaacaacgcggtggtaatggtttctgatttgtggttgctcatatttgcaggatcctgttgaaaccgagacatgtttcgcgaagcgtattttgtccatagtggtatgctttacttaattttccactgtttgttcagttcttgtgatgctttgtgattttaacctcatttgcatggtacaatttttgttttctttaattttctaatgattgatgataaagacgtttttaatcagatttacaagctactttctcttttcgatggcttctttagcagttttttctcttgaactttatggcatcctgcagccgttatgattgattgttggagtctttcatctaaatgcaggattatgacgaagatggaaaactctcattctcagagttctctgatctgatgaatgcttttgggaatgtagtggctgctaacaaggtttgaccttcagcagctttgtcacctctttctgcttttcgtgcttgtgtatatgtatttgtttcctatagtgtagtagcaattagtctgagaaatgtcaaataccaaaagttgtctcctaggcatttttttataagatactgctagattgctgtttttttgttctgaaggcactcttgatgttttcacttaattgattaccagaaagaggagttgttcaaagccgctgacctgaatggggatggtgttgttacaattgatgagttggctgcacttcttgccgttcaacaggaacagtaataacattctatacagtgccaatgttgagaacttctgtatatacacaaatatttgtacatccttgaatcccagtaatttgcatgcattgattgcagggagccaattataaatagttgtccggtttgcggtgaggctcttcaacttgacaagctcaatgcaatgatccatatgactctctgttttgacgaaggaactggtaatcaaatgaccggagggttcttgactgataggcaggcttcatatgggttagatttcttgtttttaaaagatttgaatatgacattctatgtagcttatatgttctttgcttgataggcattcaactttttaacaattttcagatggatgttcaaactaagtgaatggactcatctatcaacttatgatgttggtttgaatactggttcaagtgcttcacatattgtggtatctttcctttcgactacttttgtttatgtcatgataaacatctaatttggaggcctattatcaagttgtttgattttctatattcattcaaagtagtgaatcctggcttgagcgatgcctgatatttgttgcattcctcctatcaatttttgtggatttcgtttgagtatctcctaatggtgagaaaatgcactaaaagtatacttacttcgatatttgctttaggtgattgataggaagactaagaggctcgtggaagagttgattgattcaaagattgttatgtctatgagagctatttaccagtcaaaaataggactccggcttatggaccaaggtaacaaactgggtccttaacctctaatatgcacctggccatagtgcctttgtgatgaagtgctacacattcttgccattgtatcaaagcaaacaagtcttcattatggattgatatccttgatgcaggagcaaaagagattttgcagaacctttctgagaaacaggggaaaaaaatgaactcagttgaatctgcccaaaatattcccagctttctcgagtttttcaaggtgtagattatttttttattagttattatgtgtcaaatggctgctgagtttaagccggacacaacttggcttgtggcttggtgatattgatataatatcttagaaaaacttctgtgattattaactgaaatccgatctcgatattactattgggaattgaaatactatgagaaatcttccgatagagataaggaaacactcctctcttatactttctagagataacaatgggtagattggagttgcttcactagatctccttgatttttataaaggatcgccctccttttgtaagtttagatgaactgaaaattgaattatgtacttgttgcaggatcaaataaacatggccgaagtcaagtatcctctggaccattttaaggtacgcaaaggcaactcatggtatgatttcaaccacgagattacaatagaagtgttagtagttataaaataaatatgtaagtgacactgaggtaaatctaagctaaactttttgccggttttatcaaagatgggaaaaaccctttataatttggtttaactataaagcttgtgtacttttcatggatttgaaaggtggtcattttacttgcagacgttcaatgaattcttcgtacgggagttaaagcctggtgcaagaccaattgcgtgcatggatcaggatgatgttgctgtatctgctgctgattgtcgattaatggcatttcaatcggttgatgatagcacacggttctggatcaaggtaaagcggcctctagagtattcacaatacactaggcaaggcatatgaaaagttgaataactcttaacacaattgatgctgctgataacctgcaacactgtacaactgttactcgctattctaaaattttcagactgttttcaatattgttagggccgtaagttttcaatcaaaggcctccttggaaatgatgtgcagtcggatgctttccttgatggatctttggtgatattccgattggcgccacaggtacaagaggactccatgcttcttgtcgtttgatcaaaagctaaaaattaacacttgtttcgctctctttttgcatttattgatctattacaggactatcatcgttttcattctcctgtctctggtgtcattgaaaagtttgtcaatgtttctggaagcttatatacggtattgcatctgccttttcacgttgaagagcattcttctcttccgttattttcttattggagttacttttgtatccttggttctcaggttaatccgattgctgtcaatagcaagtactgtaatgtgttcactgagaataaacggaccatcgtaattatatcaacagcagagtttggaaaggtatgtcatcttgtataagtcataaacatcttttttctcggtctgctgatgaaaatatttctcagttgcctcttgtgcttgatgctttgaactcaaattgaagcagtattttataaacgaaggtgtacaatgaaatctgatcttatcgcagaacttgatctcagcttaatatatgtaacaggtcgcatttgttgcgattggagcaacaatggttggtagtatcagctttgttaggcaagagggagaccatgtgaagaaaggggacgaggtaatcaattctgaaccttttttctaattgaaagatatgtcattctttcttatgcaattctaaactagcattctcctttttccagcttggttacttttcatttggtggaagcacagttatatgcgtctttgaaaaggttagcttttaactttgtttttcttacagtaccctagaaatgaattgtcttgatttgaaaatcttgtgacaaaatatcttacatttttgtaatactgtccctggatgagttattgcatttacatcaaccttacctttcacgtgacatgtattacaggactcgattaagattgatgaggatctcttagctaacagtgctaggtccttggagacattagttactgttggaatgcaacttggtgtctcctttccaaagctggaaaactgtgtacttgagccctgaactgcttcaaactatgtgagttagtacgaaacgacagatgattttctatggtttggtttgatttgatttagttttcacttttcatcaagaaagaactcaattcctctctgtttaatacacaatgactttgctctgtatatataaacaccagtatgtcccgggcagtgatacttgttaatgtttacggtatttcgctttttttgttgagtgtttttcctaggtgacaattttacatgcaaataaggttaaacacatgtctgtctctattccggtcttaatgaagagactttgtctgtataactctctctctctctttctttttcacctctttccctcaccctctctggctctctcattctctgttgagttgaacttactaaaagcacaaatggtttgggcaaatgctaagatgaggctagctttgtctcttgttacggttttcttcggcatctctcttgctaatcttgaagtcggattttactccaatacatgccctcaagccgagtcaatcgttaagagggttgtctcaggggctgctctttccgaccctaacctcccagccatacttctacggctccatttccatgattgctttgttgaggtacaatgcactttcctccccttcgtgctttctactattgcttgctattcttagagatttaaccacacgttcagggatgtgatggctcgatcctcgtgaacaacggagcaatctctgaaaagaatgcatttggacatgaaggcgttagaggatttgagatagtagaagccgtcaaagccgagcttgaagctgcatgccccggtgttgtctcctgctcagacattgttgccttggctgcacgtgatgccatatctttggtaaaaaataaaatagagaaagaaaaaaacctttccatctttatctatcttcttctccgttgtgagcaattcatgatacaggcgaatggaccggcgtatgaggtgccaactgggcggagagatggtcgggtttcgaacatgtcattggctaaggacatgccggaggtgagtgactcgattgagatactaaaggctaagttcatgcagaaaggactcaacgccaaagacctcgtgcttctcagtggtatgtatctcttcttcttcttcgtcttctctctcattcatgtttgtttggtggtttcgaatctctcaaagtttttggttcgaagttcaagttatatgattttcaattcccggatccatgatacgtttcgcatgtttcgtccgtttcctctcttcttcgtgtgttagtgtcacgtgcgttaggaaattctggtagaccaatacaagaaaacattattggaattttttccagctaagccagcagtgtttctttgtgcagaaaaataatttcgtgaaatttaaaattttaaacttgtgagaattttcttctaacgataacaaattatccaatatttacctatacgttgcgaaacttaaagaatcgttcgtaataaaaaaaaatcaggctttttgggtcaactttaggcatttatacaaatgttttgatgttctgtcatcttaaccactaaatctggtatagcacagaaatgttgattcaccccgaaaatgggcctgttacacgatcggcaattaatctgataaaacgtcataaatatctaacggccccattctatagagtattgatttttttttatttttattttcatcaaaaaccaatactgatctcgatacgatcgtgaaattatcaactttcacgtgtgactaaacaaagacgaaaccatcaacatgctgagtctaagccagtagtgatcatgcattttgaacctggtccggctcagtttgcgtcatttttttatttagtttacatttcaagtttcaatatgagaaaactttgacaaaaaaaattgtcactagttttaagaatttaagagatctaaacctgagtggtctactttccgtatcagctgctcacactatcggaacaacggcctgcttcttcatgtccaaacggctctatgatttcttacctggtggccaacctgacccgactatcaatccaacattcctacccgaattaaccactcagtgcccacaaaatggtgacataaacgtccgtttaccaattgaccggttcagcgaacggctattcgacaagcagattctgcaaaacataaaggatggttttgctgtgcttcagaccgacgcaggtctttacgaggatgtaacgaccagacaggtcgtggattcctatcttgggatgctaaatccattctttgggccaacattcgagtctgatttcgttaaggcgatcgtaaagatggggaagattggtgtgaagactggtttcaaaggggagattcgacgggtttgctcggccttcaattgagagagtatgtaatgaaattgaaactgtataatttcttttgctcaaacaatgttttgactccataatatgtgtaggcaaaaaagcctctcaaactctgaatgaatactaaaaaacaaagagagtattaatgcatggaattgaaaaagtacaaattctagagaggatgcaaaacaattataaagagagttgaatgtacgattttccactacatccttggcgttaatagtgtacatgtatgaattctgaagtctcaacatgtagtttttaccaaaagacaaaataaagttgtattcgttataattcttagctgtctcgaatcaactaatttcttcccccattcccttatgacaaaaaaaaaacctaggctattaaaagaacgaacaaaacaaaaagagaatcaaagagcttaagttctttcggctcttattcttataatcgtagaccacttaaattccttgcgttgggccttctcacaaatcgtccctgttgatgagagacaaccacaatattacaatgccaatctttcacctaaatcgtagctcaaataaaatgtatcagcgttaccttcattctacccttgttgacagtattatatatataagtttcaacttttacatttttcaagactatgagatttataccttcatacgcgggcgttggtcggcgttgagcttgcgaacttgatatcggattttcttggagaagagtctattcctccgcttctctttataccttaacacacttgcttctctcataccactttctccgaacaaatctatctcacccaaccttacctgtccccaaacatcattcatcttacgtcaaattcactcactaaattgtcaactaaattcacttgataatctacttctaacaaaacattgtaagtcagaaatgacaagaactacataagaaccattttcaattcttgtcaggttcagaaattcataatgaattgtttgttgccaacaattggtcatcaaaacgtttttatttcgattcaaattattaagataaggctaatataaatgagaaaatagagaattgaagtaacgtacatgaaaatcgactccgtcagcgtccgaaccaagaatctcgtcggagaacggtgactccttacctgaccaagcctctaaaaccccatcgtagtcgagcttcagcaacggactcactctctgctccagctttggattcgagtccgtaacttcagagctctttgattccgccgccgccggagccactttctttttcttcttcttctttttctttttcttgtctccctccgccgtcacaatcgttttaatcttgctactatccacgacattggattgaccatcatcagctgctgcggcggcggtggtctgaattctcggcgaaatctgatcaaactccacagtaggaaatttccaccagttctcgtcgttgttttgtcggagagaacttctcaaaccaagccctaaacgaaaccttccgttccaagcattcttcataatttcctctaatcgaccgactctgtaacaattttctctatctccgtcattagattcaatattccccataaaactatcaattccttcttcaatctcttcatctaaaatcgattccgcgtcgaaatcgtctaaaactccaaacccattcacctccaagtcatcaaaactgacttccttctgctccaagaagtgttctgttttcgttggaatcgttggattgaacagaaactcgttctcctcgatggatacgtacggaagaagcaactgagaagcttcgtcgtaatcactgagaggagatttattagtcccgaaaatctgagtttttgccttcttggaagagaagattttagggtaagcggtggagaggagagccgcagcttcgtcgtatgtttggttgggacgtttccgtggagttcgtggccttctcgtggagattgagaacggaggagagtttgtctcagagattgtagatgacggtgaaggagtgttgtttgacggcggcgatttcatcatttccaactcgaagctataggcacaagaggacattttcacctgtggacgtttgattagaatccgagaaaaatcttgatgactgttgaatttgaggttaaagttagtgtgtgttttttaagaaaaggaaaaatataaagtcagaaagttttcgtatgaagtctattgttaaaccctaaaccctatgacaaaatcttgtttactaaatatagcaaaaaggttaaaacttaaatggggaaaaggtaagattcagtatactaaaaaggaaactcctacagaaaaaagaagagaacatttaagattagagagaggcagagaggtcatggaagtaagaattc

SEQ ID NO: 629 - DNA, 104738 bp, Arabidopsis thaliana
gaattccagtattgtttccgcaagtatgtgtttatagaaaaaaaaacttttctttgttgttgaagggtatagttttgttaatgaaatgttttttatggaagtgcagtacagtaacaccggtccacttccctcacatggatttgtaagacagaggttctgggaggttgagactaaaccacctcctttgccatcactttctactgctcatgttgacctgatcgtaagatcatccaatgaggatttgaagatctggccgcataagtaagattcttgaaacatctctctctctctctcattttcaacattttttcagatatttgattaggaatattttacataaaatatggagactgttttttaatctatgtatccatttcaggtttgagtatagactgagagtagcattgggacatgatggagatttgacgttaacatctcgtgttaagaatactgatacaaaaccatttaacttcacatttgctcttcacccctacttcgctgtttccaatatcaggtaatccaaggagtcataacttcacgttgatatctttttttttggttgtgttggtgtaagtgtcattgaatcagctggttgttgtattcagtgaaatccatgtcgaaggattacacaacttggattaccttgaccaacaaaagaacagaacacgtttcactgatcatgagaaggttataactttcaatgctcaagtaagcctctttccatttgccaattcaaatttcaacccttttattattttagtccatcactaaaaaaaaacacaccttgcaaaaaaagcttgacaggttgtacctaagcactccagatcaactaagaatcgtggaccataagaaaaagaagactattgttgtacacaaggagggacaagttgatgccggtaattacaaatttagatttgtaaacatacatagacatagacacagtcacacagaaacagattgttttagtagtactaatgatggatcacttgtaattacaatgtgcagtggtgtggaatccatgggataagaaagtatccgatttgggagttgaagactataagcgttttgtaacggtggaaagcgcggctgtcgcgaaaccgatcacagtgaaccccggcaaagaatggaaaggaatactccatgtttctgtggttccatcaaatcggaaagcttgaccctataaaagtcttgcattcatcatcctcatcctttaaaaaaaaaaacttaaaactgtctttattaaagtatacttaatgttcccgagagacatcacatggtgaacacaaagttagttgggttccaaactggactcttgaccagttttattgttttgtaactttagcattcatgaataaaaaaagtgcgttaattacaataattgttaaatgtaattaaataaaagtgcgttaactacaataattggatattggttatttgcaaaattcatgttcttaaatcatcagtctaaacaaaaaaattagattagccgaagatttcttcttctacccttgatgatactatttgggatgggcttgcttagatgtgccgaatccaattctcgtttttgggtctatctatatttgggctgggctttataagaggcgaagcccatgtcgaacaatcaatttttttttaattttatatttcttttgggagtctgttctgtcgtattgattaataaagtaaaaaatcttagccacaaaattaaatcatctccaagacgtatcaatatcatcatcaatccaccaatgaaaagttctctctttttttttcccactcttactctgttctcgctacagaatctcctgggaaaaaaaaaaaagaaacttgatccacccgaattccccaaatcttcacaatttctggaaactctctcgatcgtgaagcagaaaagtgaggttccaaatgggttctgtttcgggtcaaacccgaattacaacgatgaacctctcgctctcaacagcagagaagaaccctaatttccgctcgtcgcttctcaattctaaggtaattgttatcacttcgtcgagcttcaccaaaaaaatgactccttttgcttgatttcttcttctcctctttcgcttgtgtttagaacgcaatttcagatactttaggggtctcttccaaatgcagtacattcctcaggggtcaatttcaaagaatacatttttcttggctacaacacactcgacctttgagaaaacgaacaggtacttgatttgcaaaccagaccaatctctttagaactttagttgtgatttagattcttgttatgtttggtttagtatttggtcacgtgagctgcgtcatgccgttaacggaagagaatgtggagagagtgttagacgaagtacgaccatctctaatggccgacggaggaaacgtggcgttgcacgaaatcgacggacttgtggtggttttaaagctacaaggagcttgtggttcgtgtcctagctcatcaatgacgttgaagatgggaatcgagagtcgtcttcgagacaagattccagagatcatgtccgttgagcagtttcttgaatccgagacaggaggtttagagctgaacgatgagaacattgagaaggtttggttttttaaaggtttagttatttttggtttattagccccttggttttgaaattgatctgaatggtccttttttggtttgttgtcaatttaggttctctctgagttaaggccgtacctatccggtactggaggtggggggcttgagttagttgagattgatggttacgtggtcaaggttcgactcactggaccagctgctggagtcatgactgttcgtgtcgcgttgactcaaaaactgagggaaacaattccttctataggtgcagtccagcttctagagtgacattaacctttttattttgtaacttatatacaaggcctatttttgattcaatatattttatttccaattatataattagtacaactaatacaataaccatttctgttgaagaaaaaggaaaagaaaaaaaaagtatcctatgtatgaaggacattttctctagtgatccttgtttttaggtaacagttataaaatattcatgacttgactacacaaagataatcgaacttaaagagttatttccttaaaccaattattctctaattaaatatgcatttatagcgagttcttggtgagcaaggatactagaatctctataataagtcggacataagaagatatgaggaaacacagacataacatagttaagagtttcaacaatgtcaaagcttataatcaaccgaatattcaaaccctctgtctgcaaaaatttcctcgtacgtaagcttctcttgctttttctttttaactttaattttgttcttgttgtctctgaatacttgaacataactatggcagagacacgcaaacgttcgtctgttctcatctgcaactcacacgagtactaaagtgaatcagcccttctcgtctaaaccagccttcccgtttctgttgattgactacatcctaaacaacccaaactcttcctccgatggtcgcgtaacaacaaacgtttacggtaatgaaaaggaagtcttgattaaggacaaggatcttaaggaggaggtctgtgatgcgatgactgtcgggttttctcgtgatgggttgcgagtcgagctttgtggcaaccacggcgatgtatgttctcccaccatcttttacaagcctactgaccccgaaatagaagacttgaccgttgatctacctcctctaccgacgggttcacaaatccaaagcctggtcatgtcctctttacctaaacgagacaaaaattgggtagttgttgtcaagttattgggatctcagttgagtatgtgcaggccttttggcagccgtaaatggatcaacatccaaaccaagcctcagaatataaacccttcatcgagcatcatgttttccaagaaagagaaaaagttctacgttccaactcccggaggcaacatcttgtgctatttggatcctcactcagaggacgacgacctaattgatttcgtggaattggagtttgacgatcttccaaaatcggtgtttcaagagttggccgacgtgagtacatgttctaggacagaccaccttgtggagtcacccaccggccaacttttcctagtcaagtggtatactatctaattaaagctatatatagcttttgtcttcataacatatataccaaaatctctaatcctttgcttgagtatcatattggcgcgctttatcatgtctttgcaggtatggagaggatttagaggacattgacaacaccacactgtataatgtaacaaaaaagttcatggtgtttaaagagggagagaaaccgagttgtgtctacactaagaagatgatctatacagaagacattggagatctttgcatttttgttggacatagtgaggctttctgcgtcccggctagctcgtcccctggcctcaagcctaactgcatctattttgtgggctataactttggtgtttatgatctcaccaccaaaacttgcactatgttcctcacaaaagatgataatccattaaggaaattggaattcccttactggcctcctccggcttcctttccagtactagctcctaattaattatctctcttgcacgtgtttatgtttcgctaatgttatcgctgtctttgctttcccatgatttcatttaaatccaatgttctcttttaatctatgttcaatgaaatttatattagtgccttaaaagaaggcgaatctatcctaccaaaaaaaaaagaaggcgaatctaaacgaattcggttaattcatcatatttctcaattaatatacgtaagacacactttggcacaaaacttatataattatttatttcctgaaacaagttatcctctaaatatgtatatttaatgtcctaaggtgtagtaccctcggtattcactagacagagacggggaagacgaaagagtcgcacgtcaaatcaaaatcacaacacatattttgagtgttgttacattattttgtggtggatcactatgtggagtcaccctccggtgaacaattcctcgtcaagtggtatatatactatagacattgcttttgaataaacaattatacaaactattaggttaattactcaacattttaatttgatttaatggctcctcaccaaacacaagaagagaggtgaaacatgttatcttatttgttcttccatgcatttgtttttaggtacggccacaacttaatgcgcaatcacaacaaagtggaaacactcgtgcacatggcatcacagtttatggtgtttagagcggaggaatcatgggaggaaaagtatgtgtattacacagaagatattggagatctttgcatctttcttggacatagtgaggctttctgtatccaggccagttcgggctcaagcctaactgcatctattttgtgggctataactttggtatttatgatctcaccaccaaaccttgcactactttctacacagaagaggatgttccattaaggaacttggaattcccttactggccacctccagtttctctctactcataaaatttaaaatattttttcattagtatttatggtgttttttttcttttctttctatgctactatataaaccctttctactctactttcaatggaaatttgtgtggtgtttttttttttttttttttctagacaacttctctttgttaagagtcttaaagacgatatataattagtcattccattataaatgaaatgggttattgtttatttccttagaaaaagagtccatctccaaaaagattcttctattaattgtgaacttggtgcccaaggccatctctctttattactctgaagattgaagaccagtcacaaacatagtttagggttttcgaccatgtctcagctcataaaccgacttttgaagccatctgtctgcaaaaatgtcatcgtaagtttcttatttgttatgtaataactagctagggtatcattttgggtcttacttattgtatgattacttgtatatggcatgcagagatctcacagcaagcaggttcggatgttctcctctaagccgacatacccgtacttgttgattgaccacctccttaagacgacggaacactgttccaatgatcaagtatactacgatgataaatattacgaaaagaatctcgtgattaaggaccagggactcgcagaggaggtccgagaggtgatgaccgttggattttcacataaagatgattggagagttcacttggagaaatctgaggatagttccacaagtctcatgatggtgagtaacacatcgtttgtcccagtgaaacatcagctccctcctctgtctagtaattgtcgaatccagaatgtggcaatatcaaactctgttgacataaagaaggaagacttggttgtggctgtcaagttctttggatctgatgtgagtctgtgcaagcccttcagcgactctagctctgaatggatcaacatcaatacctctggctctgtacaccctttctcgagtctaacgtattcgaagaagaataaaaaatttctcagtgttagtccttctgggacgtatctttggtacttggatcttcacttcgatgaggatgatgtcgagccctactcatcatatttatattttagggaggaccctctcctgaggttgtataagatggatttggaagattacatctggcgtttcagaacagaccacctggcggagttaccctccggtgaacatttcctcgtcaagtggtacgtatttgtttattaattataagcgcaagtttgctacttctatgttgaaacacatagatatcttcttttgcaggttctttaaggacgtgatgatgaacgtggggaaaatcacccagaaaacggatgggtttaaggtgtttagagtggatacaatttgcggtcacttgactaacacgcaagacattggagatctttgtatctttcttggacatggtgaagcatactgtgtcccggcaagctcgtctcctggactcagacctaactccatctattatgtgggctgtaactttggtgttcacgatattgcaaccgacactaccactaacttctacacacacagtaatgttcctttaaggtccactgagttcccttactggcctcttcctctctcttaggagtgacttttgatatcgtcggatgtctctaatattgggtggctcttgtggtctccaatattatgttattcttttgggtttggttcatgtactagttaatgtttttggttcgtagatctccgactatttgaaaataaaacatgagagaaacccgttttatctttcttaatcacaactcagactacttattttgaaaacctaaattaactcatttgcagggtaaaaagtaaaggcaatcaaaagtgctgaaagataaaaatggctaagaaatcatcagtgagtagagttgtctagtagaaagaatgaaagaataacactctgaatatatataatcaaactaaaccaaaaaaaaaaggtaaccaagagaaagagagattattatctgagatgttgtaactctagaggagcatatgatgatggttgttttgttgcggaccagctgatcctggcggaggtgggagggcaaggaaagcgtctccaaaaggattagaaggagaaggaccggctgagaactgatgatgatgatgattttgatgataatcatgaggatgagtgtaattgtagggactctgatgcatcatcgtcatctgttgttgctgttgttgttgcattgccatttgaacattagtgggaggagcaatgttgttggacattgcaaaaggatcttgttgcatttggaatgggtttggcggtgctgctgttgtgtctatgccaccatgtccatagcccgcattggttagctggatctgtctcctagctgaatcatcctcgtacagactgtcaagcaatagattgtcaaatcctcctgcctataaatacaacaagagagaacaagcccacgtgagttttgagagtagaaacagagagtttcatattcaaatatatgtggtgttagagttaattacaagtttggtgttaggcgcagggcgaggattattgttgttgttgttgttctgaggagtgaccagtgccaattcccagccggatccaccggtttctattaaacttaaaatgtttgatggtcctggagcttcatgacctgcagagaccaataacagcaaaaatttaccattagtgttagaaaatctctagttttggtcaagaatcaaatttttgttacctggtggatatattgcaagagccaatgcatttcggtcctctatctctgcggctttagggttgatctcatttagtccctgtgaaggagaagaaaaggttgagactttggccaaaagagatatttgtacacataagatgacgtgtagaagaagattcaccagcagatcatcagtgtctatcaggaaagaaggtttagcatcttcctcttctattttttcttggtcttcttcctcttcttcgataagcggctggtctccttcgctgttttccttttgattatcggcttctgcaggttcttcaggctggacagagtgttctgcttcttcttcttcttgttcttcttcctctttttcctgatactcctgtgaaaaacacaacaaaatgtcaatcataattcataagaagactgatattgatgaacaggacaacatcaaccaaatatgatgagagtaaaactttgtaccagctttttctgtacagaaccactttgaggcgcttctttaatgtagtcttccattgttgctaggaaagaaggaggaggctgaaacaagtttttaaaattaagtcttttgaggtgatcaatctcacattcatttatcacaagttaagaaggaacctgtcttaaggttgggaactgaaagtttctcgctagctctagacctttgcagtattcataaaagtcagccaaattttcagcctgtgcagtggaagaacatcaataaacaagtttagtgaagatggggatttagtctatagctttagagcttttacctgttggccagctcgtttatatatatttagagctttaactgcatcatgtcttgacatctcaaagaactgaatcaagagcatagatatatactttagcaacactcaatagaagcaaattgatactaaaacaagagaaggagatttttataaaaaccatgtctacaagattaatgattccatcattaatggcacagtagattttgaagctttctttaagcaccaatgcaagagcatactggattaggtagttgctatatgctgatccttcaggctgcaaaactgaaaacatattaagaaaccgttcgacgtaacaacaaaacaaaaattttggatatataacttttacctgacaaccaataagcctataaagcagctgttgcaaagcaggtaactgctctagcaattcttcatcggagagcatccttgttctatacgtttgagaagcattgaaatctacgttctgtaataatgatttatgatgataaaattagattcttgtgtttgtttaaaaggtgagaacgaatttgagaacaaacctttgaagatgcacctgaaccttttggtaaacgttctgcttctatgtcatacttcaaaacccgatagcattcaagccgctcctcgaggaaaagcgcgtatgtcctaatccacgcagagcaatcccaagctgcaacaaacaagtcaatacaagaaaatgttttaaaacaattttcattaacacataaaaagctatgtaacaaaggatatataataggctatttaccaagaggacttgtatcgtctttgaagtttgatattcgaagtatatgtcctctatgtgagtaattgagaagctcttctctaaatgttggatcaccttctcttagtgttctatgaatgactattaacaccttgatcgcaacctgcgtgttggaaacacaatctaagcaaccccaaaaacagagttttgtaaattgaaaaaaaaaagaatcttttaagttacatagaactcacaacccaattgcgagtttttgacaatcttttggctaatgcgtgaatgcagtaagcaacatctgctcgtggttgcactaccgatgtcgccgagaatattcctggatagaatgataaaaactctcataaagatcgtatccaaattcaagtgtttgggggaataagttaagaaacttactacgaatgtgacgttctttgggagcagattctacgtgatttgtggcctttacgatcgcaacatccaaatcctatatatctcgatttcatatacattttattagtcatttacagattttttttgttaccaaaaaatttgaaagtttcagaatgtaatcctgaccttgaattcgctgttgaccttggcgatacttacggtagtggaatctttgattgctccgacagctttacggaagctgttaaacgttgccatctagcgataaatcggaatctggataaatttcttgataattccggcgatcaccggaattgtgaaatgatttggttaggacggagagatggagaaaagagaagataaggatgaagaagacgaagaccaagtttttgatatgctctgttgttagtcgccttaacaacaaacagaacaccaataacagacttttcaacaatgctactctctatctctctcttgcctcaccattacgtgcgtaacggaatcttgattattatttttaaatagatttttgtaatttatcagagtaaatttatatcgaaatttgtacatctcatttactaatttcgtattattcctcctataatcggatgccagttattaaacttttcttttattttggtatagaatcatcatttgcctcaattatcgatttatacatagctaatgtcaaaatgaaatccagtaatttttgtaagatatgcaatgcaatctttgtccaaaaaaaaaaaaaaaaaagaaaggtaatgcaatctcaaattttccattactcaatctgatttaaaaaaaaaaaaaaactattttacctgattaaacatattttgaattttacatatgtagtgtcattttaaataaaggaatttattattatttatacgtttacaaaattgagcgcaatgtcaaagctacgccatatggacctaatgtgtcggactcggacggtagttcatacggtggttgccttgttttgttccaaatgctcatttatttatcttagtgaatgtcattaacaagttaacagtttgtttacgaatgtccacataatgctcaagagtacgaatatgatacaaatttaccaaacattgcatttatcatgcatgcatgttctcttttgtacttatgtttaaaattcatcacttgtgtacttagtttcgttttcgatcccctcctcttttttttacaatgatactttcatctaatgtttgttttagtttccatatatttatgagtttctctaccaatggactatgtatttggctctattagaaatcgcggaccaaaaaactagagctgaagaatcataacagttttattatcaggagaataagatacgatgggggcggtgtagtgagaatcatgctgcagtagtggtgacatacttgatgagcatcttgacaatatccttggagacctttgaactagattccttaaggttcgtaatcctgacatctgtctcatcatctaaacgttttgcatctgcttcttgatccgtctgaaacaaaaggtaaagaatatgagtacaaatcaagatatctcactagccggttttgtttcggtgttgcttaccccagaaacttgagtttgatactcttcttctaatcgggatctgtattcttccatctccttctcagcctcatctttcgcttgcttcattcttgctagttttgctgatcatcgatccgtccatacaaaaagaaaagaaaagcgctgaaaaggattcaaaaccaaaatcttactattagagccaacaagccataaaggagaaagagactataccggtcctcgcagctgaaacaatccgtccggcttcttgttcagcagttaaaagcatctgaatcccaccttggcctcttaaagaatccatggcttatgttctcttcaaagacaatgaaaagttgtgtttattcttctgcaaattttggtgccagaagtggaatttgtaaatataagcctatttggttatggtttggattagacggagagtgtttttctccttggttcatggagttagtttttgactcattatttctttcttcaaatttagatgcttttaaaaagacaatgtgcgatctccgggtgagtgtggaaggaaaaaataaaatatatctcaaacatactatttatagaaaatcccaaccgattacaaagcagctgatcggtgtgtatttacaagtaatgtgtgatttttttttttgaaaaatcgtgaattaaaaggaatcccaacgtgtgaggtgtgactctaaagtctgaataaagttgacgatccataattttcttatgtttgccgtcgattgtgagaattgagaagcatatgtggtttctcttctaagagttaaaaataccgtgaaataaaagctatattaattcatatgttttatcatatatcttcgaatatcagcattagaccttattagccagctcaagtacgtcattttcactgatataaatgcaaattaataaccagatcgtgcccaaaacgaataaattattccatgcatgcagttgcatcattattttttggtatagtataaagttgcatcattatacttcgcattaattttccaccacgcattccctcctaaataaaaagaattaaaattgtcacatccatctatatcaacataagcaagaggttcgagttggaagataaaggagatttttttttcttttccatatttcatctatttggaatggtgctgtcaaaatatctatcaagataatttacaaaatatgatggtgaacaataggatgtggttgttttcggttatccttatagcgtcttgtcttcttagattcaaagcggtgataatagtcgcggccggagcggtggccataattgcgtttgatgcggcgatagtttggttaaaggtctcgttgatgtttgaatgccatactttgatgttattctttccttttagtttgttattttatgttcttgtacaaaaaagttattgaattgccaaagaaatcttttctatatctataagttcaatatcgaacttcagaatataaaaaagaaacaattgatatcaataacattcaaaataattgaaattaataaacagtgattctaatttagccatttacaagcaaacttaaaagataaaggtgatctagatatattttaaatagaaaatggaatcatataatgaattttttgaaagtttcaccatagataagttgttgaaaacacatggtgagttttttactcatcaatgtcgtatatatgacttaaaaaatactttcttatatccaaatataaagaaaaagcaattaggtatgtaacgatgaagcaagattaaattgaaattaaattgcaacaaataaaatttgatagaaaaaaaaaatagtttttaccaaaacgaaaaagcaagattaaaatatgtggaaaaaacgtcgaatcaggagaatatatgagatgactctcagacatcataacacatacatacgtagtaatatattaacaactgcgtcgaatcgtaagacttggtcacttcagtacatgactaagcatcattcgggaccagccaaaaaacatgtatgcttcaaaaccagaccccaccacattataagctcatctcagtcatcaccacaaccaacgcaaagaattcttcttcttcttcttcttgacttggcgttttttcttctaataattttaattttaattttattttcaacatattcaagtaattaataggatcgacttgttggaaattgtttaagttctacttgttgaatattgtcaatttatttggatcatgttatttaagttctacttgttccaaaaagatatgaaagctaattggaacagaaatttgtctagtttcttaaaaaaaattggaaaatattattttaacgtatattttttcagatatatttcaaaacataataaagaaatattttgatgatataaatttatttaggagatgtatacagtcttaagtttttcttacatgaatttgagataaatcttttcttcttgaactgattaaagagggtatcaatgtcttattgaatctcaatccagcggacatagatcaaaagtccaaagcaacaacatgtgaacgcgttttgatataaatacaatcattatccattaacacgaacttccttttttacatcatttttaacttcattgtaggggcgacgtgttgaagtcttgaataggggtggacattttttggtttatttttagagagtttggatttggtttcattttcccaaactagagtttaatagagttctgaccgaagttatttatttggtgcagatcagtttattagatcattcatcaatttcttattcattatttcatatttctaattttttttatgaaaattatcgatggaattggtttcccaaaattttgtattaactcgtattttcataattttctctttaacaggttatacaaatagtagttgtcaactttacgtaaattacatcaaattttaagtaataaattttaaaattctagatgttgttaacaatgacaaacaaatttatttagtgacagcatttttattcagttagtgtatacacttttgtttttgtcaaagactataaacttaaaacatttaaatatagataggagtagttgaatcatctttgtaagtttgactattacaaaactgagtcttaaaagacattttatattaaaagatacctcagataagcaaactcttttacacgaaaatagacacttgttcctttcaccatttattatccctcccttaccgtgagcaagctaacgagccgagaaaactacgcacgtaccaaattaatacttcaagtaactactaccatttaccaacataattcggtaaaaaaactaaacaaaaatccaaaatttgggagtgatcaaactttattaagagagttactaactagggtcacacacacatacatacatagagcttcacaccaaacaattctcgctgaaaccaataaacttggtcttatgtcttctttcatttaatgtatatctctctcatcttcttcctctctaaccactttcctcccttaatttctatccctatatttattttcctttcattttcctctccaactaattacacacacttgaagctgaaaaaaatgcagccgtccggtgatccggcgccggaaaaggagaaagagatgacgcagccaaaagtgtcactgcttaagctcttctccttcgcagatttctatgattgtgttctaatgactcttggatccgtaggagcgtgcattcatggcgcctcggttccaatctttttcatcttctttggcaaactcatcaatattatcggtcttgcttatcttttcccaaaacaagcctctcacagagtcgccaaggtttttcaatattttagtttattcattttttccttatgatatagtattgatatagctcgaaatatcaaatttataaaagaaaatttgagattcttcgccagcttactcggaggttgaagtgaatttttacctgatatttagaaaatttactatattgaaattaattacatatttatgctaattatccgttgttctatattttttcaacatgtttgctcggcttaaattttatttattttggtgcagtactcgttggattttgtatacttgagtgtggctatactattttcatcatggttaggtaaataaaaatacattaaaatcaagtaatctctctgagatatataattcttttctaattagaaaacaaatttaaaaaatggaaacagaggttgcatgttggatgcatacgggagagaggcaagcggcgaagatgaggagagcttatctcaggtcaatgttaagccaagacataagcttattcgacaccgaagcttctacaggagaagtcatctccgccatcacctccgacatcctcgtcgtccaagatgctctctccgagaaggtacatctcttaacccaaacaaaccggtatactgatttctttttcttttttttggttaagattttgtggtagctcaattactagatttgttacgaaaccagatactttttgtggtacccattcgtaaataaatgcattaggctttttttttttttaactatctatatatatacacaaataattatttgtttttgtgcaaatacctactaaaatctgttaattaatgcatggcctcggttgatcaaatctatagacatttttttttcaaccctataaatgatatttaggtcgttacatttaaaaatctcttacatgggtcgttttttatgcacatggcttgattaacccgttcagttttaatgtgaataacactaatggcttaatccaataatgttaaagatgattttctttttcttttcaacatttttttttttttgcattatcatttttcaaatttaataaagagatttttggcatgcatcgatctcttctcattactttcttttctaactatattctagatctctagttatattcgtcatttttctgagacactaataaagtgtagacaagtgtagatgcctttattttctttttatcttcggtccttgatgcaaaaataataaatgcattgtctttaattcggttatagctgcattgcattttgcatttataaggcggtcgagtttgatacgatttaattcatattttaatttttgacctatatttggttctttaatttacagatagctagccacaaaacagttaatcgcctaaattcaaaatttaaaatgtgatcacgcaaatccggttggtttatgataatttgtctggattactggtaaattttgtcgcaggtagggaatttcttgcactacataagccggttcatagccggttttgcaattggattcactagtgtatggcaaataagtcttgtcactctatccatagtccccttaatcgctctagctggcggcatctatgcgttcgtcgccatcggacttattgctcgtgtccggaaatcatacatcaaggctggtgagattgcagaagaggttggttacttcttggacaaggaaacttataagtgtatagttttcagttatttttcatattagtgtctagtgctggtgtgtatcatatatctatgtgattattcaggtgatcgggaatgtgaggaccgtacaagcattcaccggtgaagaaagggcggtgagattataccgagaagcgctggagaatacgtataagtacgggagaaaagctggtttaaccaaaggattaggtcttggatcgatgcactgtgtcttgtttctatcttgggccttgctcgtatggttcacaagtgttgtggtccacaaggatatcgccgatggtggcaaatcattcactaccatgctcaacgttgtcatcgccggcctgtaaatataaatctccctaacttgttcgcttgctctccacgtttcctttgttttctctttttgtgggattatgaagtgtactctgtttttgggttttgtgtaggtctcttggacaagcggcgcccgatatttctgcgtttgtacgggcaaaagccgctgcttatccaattttcaagatgattgaacggaacacggtgacaaaaacaagcgcaaaatctggccgtaaactagggaaagtagacgggcacattcaattcaaagacgcgactttcagttacccatctcgccctgatgtggtgatcttcgacaggttaaacctagctatccctgccgggaaaattgtggcacttgttggaggaagcggatcagggaagagcacggtcatatctttgatagagcggttctacgagcctatttctggagcagtgttgctagacgggaacaatatcagtgagctggatattaagtggttaagaggacagattggtttggttaaccaagaaccagctctgtttgcaacaacgattcgtgagaacattctgtatggcaaagacgacgcaactgctgaggagatcacccgtgccgcaaagctctcggaagccatttctttcatcaacaacctccctgaaggatttgagactcaggtctgtcaataggataccttcgaatacaaaaaacaactgtagaccctagattccactttcgccttagggtaaaagaaacatcaatgtcaaaccctaaaactctgttttttcacttataggttggcgagagagggattcaactatctggcggacagaaacaaaggattgctatatcaagagcaattgtgaagaatccatcgatactcttactcgacgaagcaacaagtgctttagacgcagagtcggagaagagcgtgcaagaagcgctggatcgagtgatggttgggagaacaacggtggtggtggctcacagactctcaacggtaagaaatgctgacatcatagcagttgtacacgaaggtaaaatagttgagtttggaaaccacgagaatctcatatctaatcccgacggagcctactcttctcttcttcgtctccaagagactgcctcattgcagcgtaacccttccttgaatcgcacgctaagcagaccacataggtactatcgcttagcaccatcctctgtctctcaacattttcattcgaactaggtatagaaaccaaacccttaattctcatagctgttcttcgttcttttttcttttcacatctgcagtataaaatactcgcgggaactatcaagaacaagatccagcttctgttcagagagggaatcggtaactcgaccggatggggctgatccatccaaaaaagtgaaagtaacggtgggacgtctttactctatgatccgtccggactggatgtatggcgtgtgtggcacgatatgtgcctttatcgctggatctcaaatgccccttttcgcgcttggcgtctcgcaagccttagtttcctattacagtggttgggatgagactcaaaaagagatcaagaagatcgctatcctcttctgctgcgcgtccgttatcactctaattgtctacaccattgagcatatctgctttggcactatgggcgagcgtctcactctccgtgtccgcgaaaatatgttcagaggttcgtctcaaactctcaatgcaagctttaaataaatgataaatttaaaattcttcagaaattagagatcccaatttttattatcatgtgatacttattctgtttttggtttaatagcaatcttgaagaatgaaatcgggtggtttgatgaggtggacaacacaagctcaatgttggcatcgcggcttgagagcgatgcaactttgcttaaaaccatagtggtcgataggtcaacgattctactgcagaacttaggtctagttgtgacctcttttatcatagcatttatactcaactggcgtctcactcttgtcgtcttggccacatacccattggttataagcggacatatcagcgaggtaattaacgcaccgttttgccacttttaaaaattttcctttatgtttatgtttacgtttgtgtttttgttgtatttgtagaaacttttcatgcaaggatatggaggagacttgaacaaagcatacttaaaggccaacatgttggccggtgagtctgttagcaacatccgcacggtcgctgccttctgtgctgaggaaaagattctagaactttattcaagagagcttttagaaccttccaaaagttctttcaggcgtggacaaattgcaggacttttctacggtgtctctcagttcttcattttctcttcctatggcctcgccctctggtatgtctctatgtatatagaagattgtaaattaataggcctagggttcagaccaataaagaataggcatagggattcaccggttttaaatattgaattgtcaattgtttgatttgataggtacggatcaactttgatggacaaaggattagcgggcttcaaatcagtgatgaaaacattcatggttttgattgtgacggcgttagcgatgggtgagacattggctctagctccggatctgctgaaaggaaaccagatggttgcgtccgtgtttgagatcttggaccggaaaactcagatcgttggagaaaccagcgaggagctgaacaatgtggaaggcacgattgagctcaaaggcgtccactttagctacccttcgagaccagatgttgtaattttccgggactttgatctgatagttcgtgccggaaagagcatggcgctcgttggacagagtggatctgggaaaagttctgttatttcactcattctccggttctatgacccgactgctggaaaagtcatgatagagggtgagtgcacttgacttagacctatgaacacaaaattcttgcgtttcaagaaataactaaggtttcttggatcaaaagacagtagttgtttagttgaaataaatttgtttttttccctcttacccaaattgcaggaaaagacatcaagaaactagatttgaaagcattgaggaaacacattggtcttgttcaacaagaaccagcacttttcgccacaacaatctacgagaacattttgtatggaaacgaaggagcatctcaatctgaagtcgtcgaatcagctatgctcgcaaatgctcacagcttcattacctctctcccagaaggttactctaccaaagtcggtgaacgtggagttcaaatgtcaggcgggcagagacagaggatcgctatcgctagagccattctcaagaatccagcaattctattacttgacgaagccacaagcgctttggacgttgaatctgagcgtgtggtaggtttctttaccattagactttgtaaaatttaatcacaatggactaatgagtatacaacgaatgaatattgttaggtacaacaagcattggatcggttaatggctaaccggacgactgtggtagttgctcacaggctatcgacgatcaagaacgctgacacgataagtgtattacacggaggtaagatcgtagagcaaggcagccaccgtaagctcgttctaaacaagagtggtccatattttaaacttatcagtcttcagcagcagcaacaaccttaaattaagtactatactttatttattgaaaaactctttttatttttatttttgtggaaaatattgatcatatactcatttgatgtgattatcttaatcttcttgatttaccgttggtaaaaaaaaagttacgaaatccaaaataggaaaatgttctgaaacgttggctatgtattttcacccaaatttggatttagttatttttgagcactgtctttatcgtcagcacgtttcactgcgacattctccaaaggaaatgatcaacaaaaggacaacttgattggtttcaggaatctccagagttcatcatgtcctactaaatgacaaaaccctttacaaaaagggagccatcaccacaaataattaaataaaaccaagtcaaattaaaactgtattaactatttcaccaacaccaagttgaagttttctaattactattttttttttttgtcaaacatcatctttaatatgttataaatcgtttgcataattttgttataatttgtttgtattatttggttataaaatctcccacctttttggttatttcacacatcttttacttatacaaaaatctttcctgattttaattaaataaagctaaaacactttagtaatacaagtaaaattaaaaacaaaacaaaaaaattcgggaaaagtatttggtgtgataaattccctctccagcttctcggtgacacagatattttgcttccaaataaaacgagtccggtcactggcgctcactgacttcgtcttcctccatctccgatccattggtttaacaagcgcgtgagggccagatagaccgagaatcatgggaaacggaaactcaacggagacgaaagagtcgcgccgatcaaagatgcgtaagaagattcaaaactttcgcagccgccgccgtcttagtcgtccaggatccggaagcgtctctggattggctagtcagagatctgtgagcgcagatgatttcgccggcattgctcttctcactcttatcggcgtacggctttacttctctcctgattgtatattgtcctagtcaacttcgtatttcgattacgatagtcatgtgtcttttggcatctttctcttaggcggagatgaagttcaaggacaagtggctcgcctgtgtttccttcggggaacaaactttccgttcggaaatttcagattcgtatgttaccaacgatttttcaaactcttgcttgtaactttttggaatcttatacttaacaatgtcttgtttctgttgaattttgcagcacagagaagccgatttggaactcggtaagaaaactctcgattactatttctttgtagcgccttttgtgaatagttgggtattgtatcggttttgtgtgtttctgtatataggaaaagaagcttctcctggagaaaaatggaccaagtctggctagaatctctgtatttgaggtgtgaagtattcagagtttttttacgttctgctttctagatttggggtttagttattgatctgttgagatgattttccttttcttgatgcagaccaatagactcttgaagaacaatatcgttggttattgtgagcttgatctacttgatttcgtagtacaggtcagtaactaaagtttgttttttcatatgaaagctgtttaagttgtttatccgttattcctctagctcgactaataagtatcagctagttttttctatcacttatcttccattgtttgaggagattcagccacagtttagctgataatagtaggtgcatggattagatatcttgaatgattaatcgacgagaaacttgtttgtttacatgtttattttacttctcttttgtataatgtgatataggaacctgactctacttgcaagtcatttgacctgttagacccggcctcatctaacgttgttggcagcatgtttgtttcatgctccgttgaggtatgcagtatgttaaacgttaaaacagtggctaaacaacgcggtggtaatggtttctgatttgtggttgctcatatttgcaggatcctgttgaaaccgagacatgtttcgcgaagcgtattttgtccatagtggtatgctttacttaattttccactgtttgttcagttcttgtgatgctttgtgattttaacctcatttgcatggtacaatttttgttttctttaattttctaatgattgatgataaagacgtttttaatcagatttacaagctactttctcttttcgatggcttctttagcagttttttctcttgaactttatggcatcctgcagccgttatgattgattgttggagtctttcatctaaatgcaggattatgacgaagatggaaaactctcattctcagagttctctgatctgatgaatgcttttgggaatgtagtggctgctaacaaggtttgaccttcagcagctttgtcacctctttctgcttttcgtgcttgtgtatatgtatttgtttcctatagtgtagtagcaattagtctgagaaatgtcaaataccaaaagttgtctcctaggcatttttttataagatactgctagattgctgtttttttgttctgaaggcactcttgatgttttcacttaattgattaccagaaagaggagttgttcaaagccgctgacctgaatggggatggtgttgttacaattgatgagttggctgcacttcttgccgttcaacaggaacagtaataacattctatacagtgccaatgttgagaacttctgtatatacacaaatatttgtacatccttgaatcccagtaatttgcatgcattgattgcagggagccaattataaatagttgtccggtttgcggtgaggctcttcaacttgacaagctcaatgcaatgatccatatgactctctgttttgacgaaggaactggtaatcaaatgaccggagggttcttgactgataggcaggcttcatatgggttagatttcttgtttttaaaagatttgaatatgacattctatgtagcttatatgttctttgcttgataggcattcaactttttaacaattttcagatggatgttcaaactaagtgaatggactcatctatcaacttatgatgttggtttgaatactggttcaagtgcttcacatattgtggtatctttcctttcgactacttttgtttatgtcatgataaacatctaatttggaggcctattatcaagttgtttgattttctatattcattcaaagtagtgaatcctggcttgagcgatgcctgatatttgttgcattcctcctatcaatttttgtggatttcgtttgagtatctcctaatggtgagaaaatgcactaaaagtatacttacttcgatatttgctttaggtgattgataggaagactaagaggctcgtggaagagttgattgattcaaagattgttatgtctatgagagctatttaccagtcaaaaataggactccggcttatggaccaaggtaacaaactgggtccttaacctctaatatgcacctggccatagtgcctttgtgatgaagtgctacacattcttgccattgtatcaaagcaaacaagtcttcattatggattgatatccttgatgcaggagcaaaagagattttgcagaacctttctgagaaacaggggaaaaaaatgaactcagttgaatctgcccaaaatattcccagctttctcgagtttttcaaggtgtagattatttttttattagttattatgtgtcaaatggctgctgagtttaagccggacacaacttggcttgtggcttggtgatattgatataatatcttagaaaaacttctgtgattattaactgaaatccgatctcgatattactattgggaattgaaatactatgagaaatcttccgatagagataaggaaacactcctctcttatactttctagagataacaatgggtagattggagttgcttcactagatctccttgatttttataaaggatcgccctccttttgtaagtttagatgaactgaaaattgaattatgtacttgttgcaggatcaaataaacatggccgaagtcaagtatcctctggaccattttaaggtacgcaaaggcaactcatggtatgatttcaaccacgagattacaatagaagtgttagtagttataaaataaatatgtaagtgacactgaggtaaatctaagctaaactttttgccggttttatcaaagatgggaaaaaccctttataatttggtttaactataaagcttgtgtacttttcatggatttgaaaggtggtcattttacttgcagacgttcaatgaattcttcgtacgggagttaaagcctggtgcaagaccaattgcgtgcatggatcaggatgatgttgctgtatctgctgctgattgtcgattaatggcatttcaatcggttgatgatagcacacggttctggatcaaggtaaagcggcctctagagtattcacaatacactaggcaaggcatatgaaaagttgaataactcttaacacaattgatgctgctgataacctgcaacactgtacaactgttactcgctattctaaaattttcagactgttttcaatattgttagggccgtaagttttcaatcaaaggcctccttggaaatgatgtgcagtcggatgctttccttgatggatctttggtgatattccgattggcgccacaggtacaagaggactccatgcttcttgtcgtttgatcaaaagctaaaaattaacacttgtttcgctctctttttgcatttattgatctattacaggactatcatcgttttcattctcctgtctctggtgtcattgaaaagtttgtcaatgtttctggaagcttatatacggtattgcatctgccttttcacgttgaagagcattcttctcttccgttattttcttattggagttacttttgtatccttggttctcaggttaatccgattgctgtcaatagcaagtactgtaatgtgttcactgagaataaacggaccatcgtaattatatcaacagcagagtttggaaaggtatgtcatcttgtataagtcataaacatcttttttctcggtctgctgatgaaaatatttctcagttgcctcttgtgcttgatgctttgaactcaaattgaagcagtattttataaacgaaggtgtacaatgaaatctgatcttatcgcagaacttgatctcagcttaatatatgtaacaggtcgcatttgttgcgattggagcaacaatggttggtagtatcagctttgttaggcaagagggagaccatgtgaagaaaggggacgaggtaatcaattctgaaccttttttctaattgaaagatatgtcattctttcttatgcaattctaaactagcattctcctttttccagcttggttacttttcatttggtggaagcacagttatatgcgtctttgaaaaggttagcttttaactttgtttttcttacagtaccctagaaatgaattgtcttgatttgaaaatcttgtgacaaaatatcttacatttttgtaatactgtccctggatgagttattgcatttacatcaaccttacctttcacgtgacatgtattacaggactcgattaagattgatgaggatctcttagctaacagtgctaggtccttggagacattagttactgttggaatgcaacttggtgtctcctttccaaagctggaaaactgtgtacttgagccctgaactgcttcaaactatgtgagttagtacgaaacgacagatgattttctatggtttggtttgatttgatttagttttcacttttcatcaagaaagaactcaattcctctctgtttaatacacaatgactttgctctgtatatataaacaccagtatgtcccgggcagtgatacttgttaatgtttacggtatttcgctttttttgttgagtgtttttcctaggtgacaattttacatgcaaataaggttaaacacatgtctgtctctattccggtcttaatgaagagactttgtctgtataactctctctctctctttctttttcacctctttccctcaccctctctggctctctcattctctgttgagttgaacttactaaaagcacaaatggtttgggcaaatgctaagatgaggctagctttgtctcttgttacggttttcttcggcatctctcttgctaatcttgaagtcggattttactccaatacatgccctcaagccgagtcaatcgttaagagggttgtctcaggggctgctctttccgaccctaacctcccagccatacttctacggctccatttccatgattgctttgttgaggtacaatgcactttcctccccttcgtgctttctactattgcttgctattcttagagatttaaccacacgttcagggatgtgatggctcgatcctcgtgaacaacggagcaatctctgaaaagaatgcatttggacatgaaggcgttagaggatttgagatagtagaagccgtcaaagccgagcttgaagctgcatgccccggtgttgtctcctgctcagacattgttgccttggctgcacgtgatgccatatctttggtaaaaaataaaatagagaaagaaaaaaacctttccatctttatctatcttcttctccgttgtgagcaattcatgatacaggcgaatggaccggcgtatgaggtgccaactgggcggagagatggtcgggtttcgaacatgtcattggctaaggacatgccggaggtgagtgactcgattgagatactaaaggctaagttcatgcagaaaggactcaacgccaaagacctcgtgcttctcagtggtatgtatctcttcttcttcttcgtcttctctctcattcatgtttgtttggtggtttcgaatctctcaaagtttttggttcgaagttcaagttatatgattttcaattcccggatccatgatacgtttcgcatgtttcgtccgtttcctctcttcttcgtgtgttagtgtcacgtgcgttaggaaattctggtagaccaatacaagaaaacattattggaattttttccagctaagccagcagtgtttctttgtgcagaaaaataatttcgtgaaatttaaaattttaaacttgtgagaattttcttctaacgataacaaattatccaatatttacctatacgttgcgaaacttaaagaatcgttcgtaataaaaaaaaatcaggctttttgggtcaactttaggcatttatacaaatgttttgatgttctgtcatcttaaccactaaatctggtatagcacagaaatgttgattcaccccgaaaatgggcctgttacacgatcggcaattaatctgataaaacgtcataaatatctaacggccccattctatagagtattgatttttttttatttttattttcatcaaaaaccaatactgatctcgatacgatcgtgaaattatcaactttcacgtgtgactaaacaaagacgaaaccatcaacatgctgagtctaagccagtagtgatcatgcattttgaacctggtccggctcagtttgcgtcatttttttatttagtttacatttcaagtttcaatatgagaaaactttgacaaaaaaaattgtcactagttttaagaatttaagagatctaaacctgagtggtctactttccgtatcagctgctcacactatcggaacaacggcctgcttcttcatgtccaaacggctctatgatttcttacctggtggccaacctgacccgactatcaatccaacattcctacccgaattaaccactcagtgcccacaaaatggtgacataaacgtccgtttaccaattgaccggttcagcgaacggctattcgacaagcagattctgcaaaacataaaggatggttttgctgtgcttcagaccgacgcaggtctttacgaggatgtaacgaccagacaggtcgtggattcctatcttgggatgctaaatccattctttgggccaacattcgagtctgatttcgttaaggcgatcgtaaagatggggaagattggtgtgaagactggtttcaaaggggagattcgacgggtttgctcggccttcaattgagagagtatgtaatgaaattgaaactgtataatttcttttgctcaaacaatgttttgactccataatatgtgtaggcaaaaaagcctctcaaactctgaatgaatactaaaaaacaaagagagtattaatgcatggaattgaaaaagtacaaattctagagaggatgcaaaacaattataaagagagttgaatgtacgattttccactacatccttggcgttaatagtgtacatgtatgaattctgaagtctcaacatgtagtttttaccaaaagacaaaataaagttgtattcgttataattcttagctgtctcgaatcaactaatttcttcccccattcccttatgacaaaaaaaaaacctaggctattaaaagaacgaacaaaacaaaaagagaatcaaagagcttaagttctttcggctcttattcttataatcgtagaccacttaaattccttgcgttgggccttctcacaaatcgtccctgttgatgagagacaaccacaatattacaatgccaatctttcacctaaatcgtagctcaaataaaatgtatcagcgttaccttcattctacccttgttgacagtattatatatataagtttcaacttttacatttttcaagactatgagatttataccttcatacgcgggcgttggtcggcgttgagcttgcgaacttgatatcggattttcttggagaagagtctattcctccgcttctctttataccttaacacacttgcttctctcataccactttctccgaacaaatctatctcacccaaccttacctgtccccaaacatcattcatcttacgtcaaattcactcactaaattgtcaactaaattcacttgataatctacttctaacaaaacattgtaagtcagaaatgacaagaactacataagaaccattttcaattcttgtcaggttcagaaattcataatgaattgtttgttgccaacaattggtcatcaaaacgtttttatttcgattcaaattattaagataaggctaatataaatgagaaaatagagaattgaagtaacgtacatgaaaatcgactccgtcagcgtccgaaccaagaatctcgtcggagaacggtgactccttacctgaccaagcctctaaaaccccatcgtagtcgagcttcagcaacggactcactctctgctccagctttggattcgagtccgtaacttcagagctctttgattccgccgccgccggagccactttctttttcttcttcttctttttctttttcttgtctccctccgccgtcacaatcgttttaatcttgctactatccacgacattggattgaccatcatcagctgctgcggcggcggtggtctgaattctcggcgaaatctgatcaaactccacagtaggaaatttccaccagttctcgtcgttgttttgtcggagagaacttctcaaaccaagccctaaacgaaaccttccgttccaagcattcttcataatttcctctaatcgaccgactctgtaacaattttctctatctccgtcattagattcaatattccccataaaactatcaattccttcttcaatctcttcatctaaaatcgattccgcgtcgaaatcgtctaaaactccaaacccattcacctccaagtcatcaaaactgacttccttctgctccaagaagtgttctgttttcgttggaatcgttggattgaacagaaactcgttctcctcgatggatacgtacggaagaagcaactgagaagcttcgtcgtaatcactgagaggagatttattagtcccgaaaatctgagtttttgccttcttggaagagaagattttagggtaagcggtggagaggagagccgcagcttcgtcgtatgtttggttgggacgtttccgtggagttcgtggccttctcgtggagattgagaacggaggagagtttgtctcagagattgtagatgacggtgaaggagtgttgtttgacggcggcgatttcatcatttccaactcgaagctataggcacaagaggacattttcacctgtggacgtttgattagaatccgagaaaaatcttgatgactgttgaatttgaggttaaagttagtgtgtgttttttaagaaaaggaaaaatataaagtcagaaagttttcgtatgaagtctattgttaaaccctaaaccctatgacaaaatcttgtttactaaatatagcaaaaaggttaaaacttaaatggggaaaaggtaagattcagtatactaaaaaggaaactcctacagaaaaaagaagagaacatttaagattagagagaggcagagaggtcatggaagtaagaattccccaaagagagagagagagagggggcagtgattggattgggagaagcacgagatggtgtaagaaagaaaagagaaaagatccgttagggtttgtcaaacattatatagtcaaataagttgagtctctctgtttgattgattagtgaaatatcatcactttgttgatgcgaaaacagagaggtcaaaaagtgaaaaagtgagagggagtagcggctctagggggaagagagacctaatgtagttttcttctgagattatgaattttgaaagaaagcaaactcaacgcagatcaagttttgcaatatgaaaaaaaaattataatgtttgtgtaaatgttttttgttatattaatgaaatttcactatttctaacatattaatactaatgtatactgaatcatcttttcaagatgtaaaaaaacatataaatttaacaactgttttgaataatattgacaatcatttttgtagaatgctgagtggaagattagtatgtcattcatttaattacacttaaatatacatggataattaattaggataagttttcttatcaggcgttttcgtgggacaagtacataattaggttaatttcttatgggattctactctctttttttaaaaaaaaaatctagacatttccaaatgtcgatcgaaaacattataaccgaccacctgtataactttccgtcgatgtcccccgtatgtacaaaacttaacaggtcaccttatccgtgtacgtggccggatctcattgcgtttgttagatttctgtgatgacgtggtgttttcctttacactaggaaacttcaatttggcattggaatgtaacatatggctaaagtaactttatctgcttaacatatttttcaaatatctaaaactatttctagaccgaattttagatatgtgactaagaagatttcttgatttacatcaaccaaaacaagagcaccatgtgctgtttcttatatggatataacagttcgaaataagttatcgtcttcatacatccctagaaccccaacgactggactaaaaccctcaacttctaaaataagacttattgtagaataataccaaattgtgaaaaaaaaaacaaatataaattattgactatagtttgaagtaagtcgtaattttttccgcaaggtaaattcattcaaagttaaaatgtggagagtgagagaaagagagtcgcgtggctattgggtaatgagaaacgattggacccatttggtatcattcggaagtgatatgtggcagagggcaatcatacgttttcgtcatagcgttagattttcttacagtttcttagagattatttcgattgtttgtgtcaaacgagtttagtatgttactgctattgaacagtagtattttctcatgtatcgatatgaatacgtttactctttttctttttttcacacaatcagatgaatatagggatgaatatacgtagttttgtctttgtcatatactagattatattcccaccagtcattttcctatgtatttaacaagacaagacgtagaaaaatgagaattttagtacttgagttaacatatttaaagattatattcccatcagtcattgaacatatgtgtacatatatatacgaggagaatctataacttagtaaggagggaaatatgagattttatttctatagagaaaagaaaggataaaacctctctctgccaacactggccaccgtctccaaagtccatcccagttaatttttattttttggaatcttcttatgttattactctttcttttcttatgacaacatgtcaacatgtgacctgtcgtcttctactttcttttcttcagcttttctccttttaagcagaatattcaatctatcttcaaattcatatctgagttttgtactataaaagaaaagcagacattaaaaaagatttgaatataaaacaaatgtattggagtggtaaagcacatcttcatcaaacatttttaaggagcatcaatctaattggtcgatggaaatggaagtaaaggaatagaagattgtttgtgttccatgatgatgtatatatatgcctaattaatgttactgttagttacctttggataacaaagatatttaaagcggtttaatgcttattaacggttgatggatgttaccttttctttttgacatcacggtagatgttacctttcataggtgttgaatagacagattggggacgttaattagtaatgatgtaattagttagagctaaatagtgctaataaatatatgtaagaaattgttcggaaagtaactaaaaaaagttcaattcatgcaagtagacacttcaaatgtgataaatgtataagtatgatgttaagcatgtgacccttgagagtcgattagggcactgtacaagattgacccaaatagttacaaactacaagtgaactctcttccattacatatctacgtgtattgaggggaccattatcgtacgtatacacgtatatatgttttgccctaaattcccaattttaattcagcatgggggacggactcattcaatagcatcgtctttcactttccttcttcggtttaaaatctcattttagtttctgatccaaaaaaaaatgtttgatcaaagatcaaaaacttagatagaaacaaactgtttttttttcttaaatcaagaaagtctaaaaaactaagatacaaaaagggactcgcagcggcagagagataagtatcttacgggccagcagataatttctatgttacgtccctttcatccccattgcatattgcatatgaagacaacggatattaactaaaatcttccaaaattacggtataatgaataataatacacttctgtctcatatagtattctattatattgttcgaaaatgttcttatttacatatctatttatattgttaattgattgcggctattactgtggatattcatcgtaactattttaatcaatacaaatcatgcaaaatagtgaatgacttagaaaagttgaaaccacatatgattgagtttagggggaaaagtataaaagaaagcatgactagtatgttactatgtagtaagcttcaaacatatatttaagaaaatactatatatagatacatatgatataacataacattaaaatatatggtgaaacattttttcttaatatcctaagcttcaaacatatacccaagtagagaagagttggagtattcattctttggttaaacatagacctaatacatagctcatatggacaatttttcgacaaaacaaaaatgatagcaaatgggctaaaatggtttcatatcgaaaagcccaaaccattaagccaaaacgacgtcgtacgatatgacagcggcgattcctataaccaccaccagaggttaaaaagtctctctctttagctatcttttttgtgttaccggttcaaatggccgccgtcgcagattccgttgagaacaacggttccataaacctccctgagaatgaaaaccttataccggcgggattcagtgccgccgcattgcttgacgaaaactctggcgctttccctgaattgaatcagcccgatagcttagctgctgctgagactaccttccccgatacgaacgattccgcggaggagaggtggccaggttggcctggtgattgcgtgtttcgtatgatcgttccggtgactaaagtcggagctattattggacgcaaaggtgactttataaagaagatgtgtgaggagactcgtgctcgtatcaaagtccttgatggtcctgttaatactcccgatcgcatcgttagtatctctatctccttctacgtgatttactgtgttcaaagctaattcgaatttggggatttttaatttctatttctagggtttcttaatcataagtaggaagattcttgagttgtgatcattaaagttgtgaacttttatcccctagttgtgcaatttgattactttatggttccaattatagtttgaagtgttcactaagttaattacttgctcaatgttatgttttaggtgttaatatctggtaaggaagaaccagaggcctacatgtcaccggcaatggacgcagtgttgagggtgtttagacgtgtttcagggttgcctgataatgatgatgatgatgttcaaaacgctggaagtgtcttctcttcagtgcgtttattagttgcttcaacgcaggcgattaatttgattggaaaacaaggatctttgattaagtctatagtagagaactctggtgcatcagttcgtattttatcagaaggtattatctatcatctgcagttttctgtttttacctaattgatctctttgtttgtgattgttaaagtttagtttttgctatttcaattcatgtctgtttttttttctaaaattggtgtctttgttgccagtttcttatttctctacttttttctgccagaggaaacaccgttttatgctgcacaggatgagaggatagtggatttgcaaggggaagctttaaagattcttaaagcattagaagccattgttggacaccttaggagatttttagttgaccatactgttgtccctctcttcgagaagcaagtaagcttgcttgtttcaatcgagattattcctttcccttttttttcttttctgaattattgttatcttttcttatcttcagtatctagctagggtctctcaaactcgccaggaagaaccgttagctgaaagcaagtcatctctgcatactatttcgtcaaatctaatggagcctgatttctccctcttagcacggagggaacctttgtttctggagcgcgattctcgggtggactcacgtgttcagccttcgggagtttctatctacagtcaggatcctgtactgtctgccagacactccccaggtcttgctcgggtttcttctgcttttgtgacacaggtagattcccttaaatacaacatcagctcctgaaaacgagtttagcgatatcatcttacttgttatgattagtcttccagcagtgattttgatcttaacacatctaacttgtttctctgaactagtagtgacgtttctataatggattctcttactaggtatctcaaacgatgcaaataccattctcctatgcagaggatattattggtgtagaaggagctaatatagcctatatccgtcgaagaagcggagctaccataaccattaaagagagtccgcatcctgatcaaatcacagtggaaatcaaaggcacaacttctcaagtacaaactgctgagcaactaattcaagtaagaacacattcgatctgtatatatatatatatactttctgcgacgtggcattgtataaacactaagattatgcttgctttgcatcctaccccgcctgcttcatcataaccgtattcttttgtttacgtgtgtgtaggagttcatcatcaatcacaaggaaccagtttcggtatcagggggatatgccagaatcgactctggatatgtacctgcatatcctcctcagctaagtaaccgtcaagagccgctcccgagcacctacatgggcacagagccggtgcagtacagaccaacagcatactctcagctggggggtccttctacctacacaccgaccctgactgggcaaacttatggttcggaatatagaccagcttctgatgttggtggctacagcagttataatctttgaattggttgctgtgtttaagtttatttgcagattaatttctctttagagaaaggctcatttataatataatagagagggaaaaggaacaagttctagagagccaatgtagttgttggaatgtgtaatgtaaatctaggtgccctttttttttttttttttcatacctcgatatatgtcacactacgtttctggtcaaataagaacatgttttttctttcttttttgtatgaatttgtttatcagaagtcagaatgattcagttttaagaaatttttagttaacgttttacaacaataacctgtaggagctttttcttaattgaataagtttaagctttctattttgatctgatgatgctaatatgaaagcattctccgaagaaccaaaccacatgagactttttgatttcaatgtccattcgtaactagtaacggaaaagatcagacagaaaaaatgtaccaatcattccatatttgtagttttacatgatatagtaatattctctaggtgtttaagttgtatatttcatgatttttacacattttaaaacctgattaaggcctgtttttaactttttatttcttcaaaccgtaagaaacaatccttgcaagaaacaatccttgcttcttcttctttttttcgtcaagaaacaatccttgctatattttcatttttacagcttcttgtttttaagagagcaaatataataaataaggacggctgaaaagaggtatatgtatcacaaaattaaacaaaagagaatccacctatcgacatagacgtggtatcctttcgatatcgacagaattatgttgaacgcagcaagttggccattaatcaaatctttgacgcgtggaatcattctattgtcaatgaaaacaaatattaaagaacaggtactacctatatacctaatagattcctctaacccgtcaaatgtcaatgtatcgaccgttacaattatgcacgtcttctaattgaaacattctctactttgccaatgtcttatccccaaaactacatataaatatgcatttacgggggcttagaatttcatcacaaaacttgcaagtatcattcacaggagagggaagggagagctcatcatacgaaatgaggtcaatcacagctttgtttttccttttctgtttccttgctccttctgctttggcgcagctccgaactgggttctacagccgctcatgcccccgtgccgaatctatcgtggctagtgttgttgccaaccgtttcagaagtgacaagtccattactgcagcatttcttcgtatgcagtttcatgattgctttgtcagggtccgtaagcttctcctgtgtgtacatgtgtatatatattaacataagctagctaatatttagacaacacattgatcaagcaatgttttgaatggttgtgtagggttgtgatgcttccctcttgatcgacccaagacctggaaggccatcagagaaaagcactggaccaaatgcaagcgtgagaggctacgagatcattgatgaggctaagagacagctcgaggctgcatgtccccgaactgtctcatgcgcagacattgtaactcttgccacaagagactcggtcgcattagctggtggtccaaggttctcagtaccaacaggaagacgtgatggattaaggtcaaaccccaatgatgtgaacttacccggaccaacaattccggttagcgcatctatccaattgtttgcagctcaaggtatgaataccaacgatatggttacacttattggtggtggccacagcgtcggtgttgcacattgcagtctcttccaggacaggctttccgaccgtgcaatggaaccctcattgaagtctagcttgaggaggaaatgcagttcccctaacgacccaacaacgtttttggaccaaaagacttcatttactgtggataacgcaatctatggagagatccgaagacaaagaggaattctaagaattgatcaaaacttgggtcttgatagatcaaccagtgggattgtgtctggttatgcatcaagcaatacactcttcagaaagagatttgccgaagcattggtgaaaatgggtaccattaaggttcttaccggacgttctggagagatcaggagaaactgcagagtcttcaacaactgaggacgttgattcttgcacacattctttacaattattcacggagagatccaaagactgagcggaatcctacgttttttcttttctttgctttttttcttacaaatcaaatcggaaagtgtgtttgttccggtatcatgttttatttttccctaaaaattgattcgcgtgtttcattttcatgaactatatattgttctaatttgatattaacttctttttttggctctgtggtgttctaatttcttgttttttttatgtgcttactcccttcttaacctatgacgttttggataacaatgtttaatgaataatggctctgttaacagtttctaaaactcattcgacaagaacttcgccttttcaaggtttttctaccagcaatatatgagggtttcttttcagtttcatgtatgtgagaactataggttttgatgtatgttttcaactgtatcatctacgaaaatattctgaagaaaatgctttgggttcacatggaacttacttgttgggagacagagcggtaagtgatttttgcaagcaaagcctggtttctggctgttctatgaagaagataatttccgtttaaggatctcattctcttttctcagtttcattagcttctgtttcaatgtctcgacctgtcgatttgaagttgtatccctctgcttttcagctattgacgttctactaataagcactgcaaataataaaaagggatcttcaattagttttgcaatatatagacttaagaagttatgtggactcttagtcttgctgataaaacctgaaaccaaaccaatctatgactttttagtgaagaggaaaaaattcttacattccttctgcagactctgaagtttgttactgatatcatttttctctgcttgttccattagaaggcagtcctttagatcctgaatctcgagttcatctatcaaatgattatatcaggaagccatgtgaatgccgtaaagaaaatacaaacttaagtacaattggaggtcaggtgggtgagagtcttacacttgcactccacttccgtaactactcgatccagtttcttcgacattgcttgaatatgcgatttgttagctgtcaagtcttgtcgaagtctatcaattaccatatcgtttgttgctttttcaaccaaaaggcttctgtacataaatggttggggtatttaaccaaaagttcagatacattgacacttgaaataatagtcgtaaaatgagcttttacctgattttatactctagctcttcaacttttgttacatgcttctgcctaagtgattccaaagcattcctatgttcctgccacagcttacaaatatctcaaaacagatacataactaggaacgatccaagcatcatcttcagtttcaaagcacaaggaaactctacaaagaattgacaagtactaaaaactcttcaatctaaaagctcacatgttctttgcttttgttttcatcattcactctcttcaattcttctttcaagctgtgacacttagttcgatgctcaagctgtatatatctccaaccatataaaaggtttacaggtattaggcacaagaaacagagaaccttgttatattgtgttgctttgctcacaaaaagaaagtctagattctagtggaaacggacctgatcagcaaaattgttgagagattcggtgtaaagcttcttcagcctttcattctctgcaaattcccaaattcgagttaatcagatggctcaaaaaccacttaaaagactagcaaagctaaactaaacaccaatcaacaaaccttctttgagatttttgttactaatctcaagaacctctctcctgcttgattcaacattgctctttgatctgtaaacattgatctcattcaacccgattttaaaatcctgagagaaacaaaaatgaactatgaatgttccgattattctagcgatctaatccttcaattaagcagtactaatccttcaaaaacttatgagtaatcaattcgaaatctgtacggatttgcagtaccagtagcctagaaatttctgaataccagatcatctctgaaactaccggtgagagaaatacaacatgagctgatcaaaatttccagatttctcaattcattcggttcgattagagaaggagagcgaatcgatttgatttcagatgacgagataatcgtaatcgaattagatttaggtttctcctatcgaaaaacgaaaccagaatagtggaagcagcaagcgaagaagaagaagaagagataggaagagagaatcacctcgtagatttgatcgaaactggagagaagcaaattcatctgctcgtcgcttgttgccgccatgattttgagtttttgagtttcgaattcgtaaaggcgagggagattgaagaaaaaaggaaaaaaagctaggggtttaaaattcgaaggatgttttggtaaatatgccgagcattctgggccgtcgatgtcacctacacgctaatcgctaatccaatggtcatgttatctaattaaaaagatatgtaaaaaaataaaatcttattaaaaagggataacatgaaaattgttatacaatttattattttgttttgagaaatattaatatttgtttttttattaataaaattattactttacttaaaaaaatatatatctttcttgctttttttacatattttttcctttctttctggaaattttgtttttccgattcatgttatgagatatttttttacattgaccggtgtattgtattttgtactttaattttttattttatgtaatcactctcttattattctattgtgtacattttttaaaagtcatttaactatttgttcattgttttcttaagttaatttctaattgtgatagttcttttaagtaatatctatgatcacaagattatatcatgtactcaacatattggtttttcaatggaaattctatttttttttgctaaaaaaataaaagaactttttgtaatattttaattattaaactaattatatctaaactttttgtatcgtcgaacaaaaatcatattatattcttctttattatattcaaagtatacatttttttcatcgtatattagatatctacatattgaagattagaagtaaaaaatataacatataaatccaaaatttaagatatgaattaaatgaaatttattaagtggacctctgttaccataacttttgactgaaacataaaaatctgttgaactaaatttttagaattttattttatttttattttttgtgagagttgcactttaaatggaaatcaatgggataaacgatataataaatgattctcaacttacacatcccaaataagtaaaaacaataaagtgataaactaattttgaaataacagccaaatactaccaaaacaaatagaggttttccaaataaaaatatagaaaattacaaatttgaagattttttttatagtaatagatattaaaattagatatcagtccacaaaaatattcatttccttatatgtataaattagtttctttcttttaaaaatttccactttagtcttttttatttaatataaaaaccaatttacccttttattaaggtatactaataaataataatctaatataaatagatagatatgcaaagtatttaaaacacacgctcccttgtactatgaatcacagtgattttcccatccaaataaactcaagttcgataaatcaccagtctaaaatggtttcatcaatgttcgttacttctaacaacaaaaaccatgctaatttatatccatcttctttttttactagttcccatgtttcaaaagtttcttcatcttcattgagaaccaacatggtttctcctttcagtatgcctttcatagctcaaactagtggttttgttaactattctcaagtttttatcactcaaaccatcgcaaaaaggtatcatgctcttattccgacaagcaatatggtcattgtccaaaatgataatgatcgtgtcaaccgtttcatgacttcttatccaccaattttgaaatctacagttaaccccccaaatgattttgataaacagtatgaaaccttcacacctaaacccatcgatttcttttgttcgcaacaagactatgcatgtcgtcagcatttggatatattttcatcctccccaaaacactatcatgagcaatatgttcataaaaatggtcggtcggtgaaatatatctgtaaaccaacagaggtccttgaagaaattcatgacgaaatcgattatgaaaaagacggtggttggatatatagcctgccgtttgagaaagacagttcatttatatgtctaaagtgcaatagtttgtttgatacttcacaaatgttggttgtacatacagagttaattcattctaagaatgagactaagaaaaggcttaaattacatcatcaagaattccatggtaaatctcataagatcaacaaagatcaaactggaggacaaagttgcagaagaaagttgaggcaatagagacgatcaagtgattatgaaactcccagcatcatgtatttggtgaagaagcatctctttaagatttgactttatttctttcatgttcagttttattagtactttgtaaaacaactttttgtgtatttcattatcttcattgataatttaaaactgtttaagtcaccaaagctatgtacaaccatggagaaaactatatttctgttagtgtataacttttattcgaccataaagaaataagtcggattgggaaatcacctagaattttactttttggttagaaatctgtaaatttatcataaatttgtagaattcatggttaagataagtgattaaattataggaaaaaaaaaacagagtaccaaaaagaagagcctttcagaaaagctgacggcgattagggttttcgtgaaagatgatgacctagaagtaaattacaattttgactttttattttaagttttcaaagtaacaattgggtgtttacaataaaacgagtagacttgtaaaattttttaatattattattatagcgtaaatacataaatgccattataactgtagtctcgatgtcagacgataattccataaatctaacatctttttgtcatctgaattatatttctaatactatgatgaaatacaatcttaaacacacagaagacaaaaactttgtgaagtctaaacccctatcgaaaggaagcaaacaaactatagttggcgaaaagattacaaagatgaaagaagaatcccacaaaacaaaacagaccaaaaccgaagatcccatcacaaaggaaacataccaagcccgtcaaagaaccttattgcaaagagattatttgctcgtacatatcgaagatctactgccgaaacaagtttttgcagtttctgtcataaatgattatttagtttgtatccaagcccaaggccttgagcccatgagtgatgttggcctgctggggaagcaccagttttatcttagaacttatcattatttcgtttgataagagaattttttttttatcttttatgtgaagtttatctatttctttcatctatttttctctttttaaccttttcaattatctcttttaaaaaatacttttgaatatatatattttcattttcattttttatttggttttgatatcagtttctattttgtaaaaaaaacaaacaattagaaatttttactttcgaaataggttccttaacattgttgtcaagagtttaatcatagtttatagatggtaatggtatccaaaataagatatctatctataaacaaatgaattgttgaggacaaatttgtgggtaggtaggtatgtcttacaagcaaaatatacttgaaaatttgcaagtagcagataaacaacgggtactcaaattaattaaacattattgacttagagaacagataaaaagtttagctataaataagcttagattacgcgatttgttatataagctctctctcctatcagattaaatttttaatttttaaatgctcgtaaatattaaaaagttaaggtcaacttccatagctgttgagaaaaatcatgtcacaaattattttaatagaaatcttctcgaggaggaaacacattgcggtataaaataaatcatcataattgaataagaacaaatagcgaaatttacataaattaagtagcagaaacaaatttgttgtttccgataaatacaactataaaaaaaaattctttatttctttttaattaattttctagaaaatacataaaaaataaaactatatattaaaattgattataaatatattattttttgtgatttatattttctataatattaaatcaataatatttaattatttattttgaagtttagaatataataataataactaataaatagtatataaaacctaaaaaattaatatttcagaaataatttttttcctaaaaaattaaataaaaatgaacaaaaaaatacaaattttttatggggaaaaaaatttaatggtagctcggcttggagctttcccatgtgctcataaataatttgccgtgcgacagattctgtgggcgtttattacacctaaacccattattatacaaaaaatcaaaatttaaaaaaacgagaaataactttgacaaaaaaaaaacgagaaataaaataagaaagttaaaatcagagaataagtatttattgttaactatgtatttttctggtgtaactaaggtttcgtagtactatgtttttcagctttcgaggtagacagactattacataattgatgatgtgatcaattgaaaatatttgtgatggaagaaaggaaaaaagcaacttgttataaagatgtggaactcaaactattagataaggttatgaaactaccatatttctctgttgaaaagaactattggtcccagaaaatgaggtcatatactgagactttatatggtttcattccaaatttcaaaatttgacgtaattcaggaagacataaatgaaagagaagaggatttgtttctttctaccaaaagataagaaggttatcttcaactgaaaaacataaattctgtcatagtaacgtacgtgttatatagacggcgtatggagatgtccatgtatttgctttttagatagtccgtatacgtgtttgtgtgtggacatgtaggtgagtaattgtcaagcaaaaagtgttcaccaattgatattagattaaacatatatatatcttaaaatcggccaaatatccgccaaaaccttcttcatatcctaagaaaacaaacgtttctctctttacgtttcgtacagaaatctagaattctaatatcatgcaacataagcttatcaaaactcaaaaaaaaaaaagttaaatcaatcaaaattatagacttcttctggttagtaaattctcaattaaaaaaaaaaaattagacggtgcaacgaaaaccacattagatatattatttatttcttaaatgtaaataagcttatttaacaaacaaaagaaaatcgggtggcgacttccgagattcgcggggtactcaaatgaaatgaacaaaactacaaagtcaaccatttgagaaaagttgacttttcaatttgatgacgtggcatacagctttacggggccgtaccttcgcttcccttctcggacatatcttttatcttattttaaaaatatatttctcgtacatataaatataaccacaataatttaatttttgttataacctcgacaaaatagatgacaagtctctaacaaatatcgttctcacaaatcctttaactttatgttttgtgtctagtactcttatatagttgttagttatttaatttcaaaggtggattatataagtatagtggcagagtcactttagagatagtggggtcaagtgacctgtgacccctataacatctataaaaaatttgtttgtatgtaatttgttgttggggtaaattctccgagttgattcctgtgtcatgagttcaatactaatatgtgactctttttaatttaatcattccatttttcgacttaatccatttgtttacttgacacatggtaattattatttcgtctaaatgtatataaccattaacgttttttttaatatttttcttatactacaatggttttgttcaagcgccaaaaagttaacaacttaaaacatcaaagcaaccaatcaaattgaatattaggttagtatatttcaattaatatagttttttttttggtatgagagaggagacaaatttcaattaaagtagttcgccactgaaataattatactacataaaatatgttacaaaatattaaaatactgtgaaattataatatcttttaataaacattaatcacatataatcctaatatacatacagtattctaaaaacactttttaaatattatataaccgtatatataaattgatacagctttaggttcaactctttgtaaaacctcaacatttcattctaatgaaatacacattcttatcaaaaatatataataatatagatatatagagccagagtaaactgataatgagatacttaatacaaccaaacaaaaatctagagagagatagagaatttcaagttttcaacgcaaagccctctcttatcatccgtacatatcttccatttcgatcttcaactccctctattcaatttctttataattatatataaatagtatatggtgtctactcagttatataacacatcttcttcataacctctctctttcctcatcgctctctctatctctctttctttgtgggttctagtttgtgtgtatatatactatatgcacatacacataggaagatatgatgggttacgagcagatgaatcagatgacaatgacgacaacagcgatgatgaagaattacaataagaagggactaatcaatactccacagaagaaaatgacgaggagaagtgtgtcggctattgatggtggtgcagctgcgacggctaaagaaggagatcgccgtcagaatatcaagactcttgatcttagcggcatgtccttggcttctctctctgcctcttctatcaacttagcttcaatctccaaactcgatctctccaacaacaatattcaggttttcaacaaatatatagaaatgaaacacttgttcatttatcttatggaaatagcaattttttctcattaatttttttaagattttaaacctcaacaacaacctataaacccatatgtttttttctttgtaattacaaaatatccaaaagtacttgaattctagaaagcgattgttttcacagtacctttgaaaacatggtctttcctatttatcgaaaaaaacatggtctttccataattaacttataaatatattttacatgataatatattaatttaacaatttaaaatacgtgacaataatatatatagctagctagctcttaagttgaggcaaaacaaattacgtgagtttcatcgagactcgagttttttttttgggttttcagagacttgagaggttaacaaggatattataaccatttgattcggcctattcataataaagttgtggccttgtgggctctaattaaatcatgagagatcgttgctcactaaaaataaagaaattataaagattgtagcgaagatgaagcaaggaaacttcctcttgcatatacaagatttaattatgtatatcgtaactagacaaaaaaagaggttacggataaaacaaattttgccagaagtacttaccagaaaatttataaccatcactatttacgatatatatacgtatgacatctatatatcatgaaataaatgcagacaacactttgcacaaatttctttcggtcaactcgaacctcataaagcatattcgtttctatttactcaatgtctgggtggataagcaattgagccacaagtgttcgtttttttacgttacatagttgttaatttgttatatacataaaacatcaacgaatagcattaactatccatatatacgtgttgttcgtaatagttacatacctctttggaatctgtcctcgtccactagcaaaattgtcaaaaacaaaaaggaaaaaacccttatcaaaagataaatttttggattcgattgatgacatattgtatatagaacggtaaagatttttaaaaacgattaaactctgaatctcttaaactttatatacgtgtgtgtgtagtgtgtagtgtgtaggtagtgtgtaccacttaaaactttaaaaattgtatcactcatttatttatttttctgatggcagaaaattccggaatctctagtagcgagaatgttaaatttgtgggcattggatttgcaatccaatcagctaaaaactcttccaaactccattggatgtctttccaaacttaagtttcttaatgtctccggaaattatctccaatctctccccaaaactatagaagattgcaggtaagaccacttccttgcgtaagtatctatattccaagtaatgtaccaaaacgcgaaacgcaaaaacaaaacgcagatcgctggaagagctgaacgccaacttcaacgagcttacaaggctcccagacgcgatagggtttgagctaacgaatctgacgaagctctccgtcaactcaaacaagcttgttctcttgccaaactccgttagctacttgacgtcgctgcgtgtgctcgacgcgcggctaaaccgccttagttccctccctgaggatcttgagaacctcgtgaaccttcaggtcctcaacgttagccagaacttccagcacttgacgacgttaccttactccgttgggttgttgatatctctcgtggagcttgatgttagttataacggaattacggttttaccagactccctcggctgtcttcgccggattcagaagctatccgtggagggtaatcccctcatttccccaccatttgaagtggtatgtacaattgtttttcagacaaaacctattaatttgttttttttagaaatgcattcaacaaaaaataatataatacaaagtataacttgtatcacaagcattatgatctacggaattagatcatgacttgtatcacaagcatggtacgcgaaacttttgagacatataaactaaaatgtcttgttcttgctcatccgttagtgacatagtttaaatctgatgacaggtggaacaggggttggaagcattgaagcagtatatgagcgagaagatgaccgagtcttataagaaaactccgaccaagaaaaagtcttggggcattggtaagctcgtaaagtacggcctgagctcttctccggggaggagtaccggccgtgaagacgggaaggaaggcttcatcaatgtatctgattaccgccaaatcgacggaatcgcctcaccgcgacatgtgtccctcttcaacccgcgacgcctcttgtctccactctccgcgtatttctctcctcctaggtattagcttatttaggtgtgttgtctgtctttttttttttcatcttctacatacgattccataccgttttcactgttacatccatgtagtgttaaattgttaatgttcttttacgttgttttctgcatgcttggtgtgaggataaaatttaattaaattgtgtatacgtttttttttccctgtctcatagaatttttctatggcttttctcatttcgttgtattgtagttcaattttgttgaacacatttgtaaactattacatagacacttaatattttactatgtatataatgtaaaatcgcatttttgaaagtactccaccatccttctcagcctttgtttgggtagaaagctaatatgggccccaaatgagatgataggcttgagtcctgacattgatccggttaaaagataatccgaggagagaacaaaataacaaatcatcaaaatgtttgttacataggcagagaaatggttgttttggaagacttcgtagataggttttttttttggtaggaacttcatagataggtttgatctcgtcaaaaagtgtgggctagctgataaaataacatcacattacaaaaatacatagctcatgttattttctcaagagctcgtgtgctttatctaatcttgtttcaccaaatccaatttactgtacagtttagtacgaattagtacgaataatttactataacgagtagccatctattggctaccactaaaatctgtgggggcattccacaattagcaatcaaaaattgataaccaatcttctacaattagtcatctattgcaaccaatcactggatggatcaaaatgtattgatccgtaggtgagcttattacataacacagaggtctaagtagtaagtatataataactgaaacccaaagtagtttgagaaatcaatgccagatatttaactaaccaaaccacaaaatagaattaacctttgtttgcagactcctccttctcgtctccttcatcgttttcgatctgaggtaatgtctgcaaccaaagtgaacgaaaagggaaatgaattatcagaacatctatctccattctccacggattttcaaaacatatttttttggttcagctagacatttcatcgaacaccttacatacatttgtaaagaaagacaacttacgagatctggcttgtatatattgtgaacgacggaggctccggcgagcagagaggctacaactacgactgtcgaccacgctagtgacggtgttcccgtcggcttcttcccgccaaatttattgttcatctttttgtctcttcgatgctttgtttttttgttcttctttttgctttgggcaaatcaggaaattagtaacagtcttgatttcatttatagtctatagaagttgataaataatttaatttacacttataaaattgggtatgataaaaagtactcctgcttcaaaatcgtccataattaatggtaatcaatccaatttctactgcatttgtcataaataatcatctttattcttgatgtaatcagtgttcaaccaaaatactgaacaaacactggtttcataagaagcagaaaaaatgtaaaaacatttcattcgagctcaagaaagaaacaaccatttactcatttattattgtattttctgttctttgtacacactgcagatttttgagaagaaaatgatacagagcttgagagaggtctaactataatctgtgtatatagggtttatatatatatctaagtcccctcctttttcctttgacaaggatgagactttccatcatatatatctcaagattatggcgtataagtcagagaacccattagagccaccagaaaacaacaatcactagtagcaagagggagaatcccatcgcctgcaacatcaccagattttcaatttttcatcattctctccaaaaacgtatacagtaatatgagatagagaaaaagagttattacagtgattgcggaagcagcaaggccggctctttctctaggatccttgcggtagtagttcccgaaatataaaagtgttgcatagtaccataagaaagggaacacaaaacccaagagaaagctgcaaaacaagaagatagcttgtaaatctaaactgaatatagagaagctgcgttgacttcaactcaaaaaaaacttaatactctctactcacgagaaccatccgattccacaaccaaagcatggaagaggcttgtcatacactccattttccacctcgtctacgtcttttacaagcgtatatcttcctttcccacacaccatagcatctatcatacaaagccaatgtgtattagcttatggaaaaggtgcaaaaatcaaagtgcaggagttccacacatgaacaaatcttttaaagagaaggcttgtggagaatagtggtagtagtacctttaactgcagagtaatatttagcaactggtctcacgagaccggcatgcttatcagctacggatttaaccagctctgcacttccatcaccacgctctttaacagctgcaaataacagataagatttaatccaaagaggactctacttggacatcatgagaaggtacagagttaacttaatgttatctcatctcaagaccatgcccccttgttcctaaaacaaaaatttatgatctttgactgttggtgaacaatcacttccagctagtcaacaacttagttgtgagatttagatgatcctctattctagtaacaagaactaacaaagcacatatcttttgaggactaatatgaatcgaaagagataaaaagggaggaagatgattactttctcccatacgttcttcagcagatgatgaaaatgctaagctcttgcttataagtttgtgtcgtgacccacaagatcttcaaattgcctgcaacaaaacattaacaatatgaatgaatttcagaaaggaaaacatagaaaacagagacgatttcagctaaaaccgtagcagcaatcaaaccaacaagaaattgaaatcagcgtaacagaagcatgaaaaagtctgaatcagattatcttctctatttggaaaaagaacatatatgagacaataggacttcaaattcatcggaagaatgaaatccacacgaaccggagactgctccgggaagtaaaaggaaaccgatggagatgaataacttaccagattataatttctagagcacaaattcgagaagagatttgatttcaagggcagagggaatataaatatcggatcaagaaatctggaagcgagagagtcgtcgtgcttcgtcttcttcttgtgctgcttgtttcaacttcgtcagcgtgataaatgcgtagagagcggaagatgcaagaaaaatgaaagtctattttttcttttgcctaaagcaagtttgtctcttttctagtactattttgcttaattaaatacttttaatgtcttaacaactatacgagtatttaattcttccactaatcttttgtccttttcatgatttatattatgtaatcaataatgatgtttttactcacataattttgtagtgaaattagctctaagaaattacaatttttctatttcttttttttttttggaaaaatgaatggacttttcttaaacaacactttttcaaaatgaaataaacattattttggtattatattttttatatatatttttttttgtaattcagaaagcttcgacactgttagatttagaccattctagatacgttaccagttaccacttaccagtagccacataacagtactagttcatatatagcataaatagttaccagattttgatgttttcaaattaaatatgcgactaaaactctaaaatcattcaaagttattattatttatgagtttagttttcttcttttcctttcgtacaagttagatatcatgtataattaaccaactgtccatcataatctcatatattctggatcaaatcgtccgtttaatatagttgaatatgtctctataattattttaaaatgttacttgtgttatttaagtaatacagaattatgtaatagataaaaaattgtttgaccaaaaaaaaaaagagattaaaaacaatgttaacttttcgtccaagtagacaccacataccaagttaccaacaacacttcacatttgatcattttagttgatctcttccatccatgtggtattaatctaaaatatccaatgattatgacatcttattttattttggcaacgatcgagtattaccattaattaaaatcaacatgctattaaataatccaaataggcaaaaacttcacaatcaaaagagaagaagaccattcgtcgaagaaaattactcacaagagtataaaactatatatatgatcagcctattcttaatgtgaacattgagaagtggggaggttaaaatgcaatgattttgatccaaagttattgttgacaaagacaattaaagaaggaaaattcaaaggagagatgagtcaaggacaagtcaacgaccatttcgtcttcgtcttcttctttatactcattagctacacgacgtcgacggttcgtcattcttcctctaagctttatctttctgatctctgaccttgtgtctctgtgcatgtgtgtttatctgctactgtgttttgtcggtttgatctccaaaaaccagacatgaacagaggaagcttatgccctaatcccatctgtctccctcctcttgagcaatccatctccaaattcttgtaactctctttctctttttctctgtgtggattctttttaaatgtcaatattagggcattatccataaatgtttctagtgattactctgtttttattcttcagatttagatttatagttggtgattactctgttttattctgcaaatcagagttcactgttctctgtttctaggatttgttttcataccacaagtgattctacagtcttttactgtgtaatcattgttaggaattgaaattgtttgaatggagttttctgacattgaaaattggattagaacacagagtggaacgtttaaagatggagatcttcgagtgaacaaagatggaatccagaccgtgtctctgtccgaaccaggagctgtaagtttgtttattcatgagatctcacttcctttcgtacattatgtaactccatgattgaatttggatgtttttggtttttgcagccacctcctattgagccattggacaaccaattgagtttggcagatttagaagtgatcaaagtcattggcaaaggaagtagtggtaatgtccagttggtcaaacacaaactcactcaacagtttttcgctcttaaggtcgttgattcagattcttgttgttacttctttttctagtgttttcttctctcttggttcacaaagatacatgatattattttcaggtcattcaattgaacacagaagaatcaacatgtcgggcgatttctcaggagctgagaataaacttgagctcgcaatgtccatatcttgtctcatgttatcaatctttctaccacaacggtcttgtttcaatcatattggaattcatggatggtggatcccttgcagacttgttaaagaaagtcggaaaagttcctgaaaacatgctatctgccatctgcaagcgagtactctacgcgaaatctttaaacatctctaccggttttctatttttatcttctctaataaaacacataactaagctcattcttctctactaaacgcaggttcttcgaggtctttgttatattcatcatgagaggcgaatcattcatcgggacttaaagccttcaaacttgctaatcaatcatagaggtgaagtcaagatcacagactttggtgtcagcaagatcttgacaagcacaagtagtcttgctaattctttcgtgggcacatacccttatatgtctgtgagtctcctccattcacctctcaacactcaatatacatacaaactcaattttcagagttacaagtggttttatacgacttactggtgttgttatcatgttttgcagccagagagaatcagcgggagtttgtacagtaacaagagcgatatttggagcttgggactggttttgctcgaatgtgcaacgggtaaattcccgtatactcctccagaacacaagaaaggatggagtagcgtgtacgagcttgtggacgccattgttgaaaacccgcctccttgtgcaccttccaatctcttttctccagagttttgctccttcatctcgcaatggtgagacagatttcgaccagttgtcatgtcatttttgttgctataacgagtaggcatttgaaatggtgctttaacttgtgtagtgtacaaaaagatccaagggacagaaaatcagcaaaggagcttctggtgcgttaatcatataagactctgagtctttcaccttgtactgtcttggactacttttaacgatcttttttctggttccatcttggtgaataggaacacaagttcgtaaagatgtttgaagattcggatacaaatctctcggcttacttcaccgacgcaggatctttgattcccccacttgctaactagaaccgagtttgaacaatcttttaacctccaagttattatttcatatccactagaagagattttatgaaagataaatttacgagatgttatgacttaagagacttgtctacaaaatttgatttaatgtgtgtacttttcacatcactattataaacacaactatcatcagttatgtttctctgctagtggtggatatacttatatagtagttcatatcattatacacattttgttttgtacatagtttaagtatctttctattttcgtatgtaaagttttgaaagtaattgcataaacaataatactacatcttaatgtatgttgtaaccatattacaattagcccgggaagaaaaatacaaggggctttttagaatgtagtcaagacaaaagagcttaacacattaagcttcattatctccatatggttataacttgttagttaaaaaaataagcacaaattaataatagtaaatactttttcttggagagacccatattcattttaaaaattaagaaaaaggaccctctctgcctcagttcaagggtttgctcttgagtttcctccgaggcttcaaatcaaccaccaccacacttatgttgtctttgcttcctctctgtatcgccagctttgacaaatactcagccgcggacatcgccgcaggatctttcccttcctttctccgctcatccgcgagcaacgatgcatccccagccaccgcgtttttcttgtgccacaagagaatccgcttccttgccatctcacacgcttcttcatccgtcattacatcccaaaccccgtcactcgccaaaatcagacaatcatcttcttttactctcttcacagccgtcacttccggatcaggaatgatggatggtttcaagtatctatcgcctgtcacaatgataaatgtttgtaagaagaaaggtttcttctatttcaagaaccattgagaagctttatggagaaatataatgaaagcttaccaatggatctcgacatggcgagaacaccgaaaacacgagctccattccactgaatcactttccctcctgcggcttcaatcctcgcagcttcatcttctctatccggctacacacataacacaagcacacatcagaaatggtttcataaacctctctaactcaacatcttgaaaactaaaaacctatcacaagttcacaaccaatccaactatagatcttgagtctatatatgcttactttatggtcaacggataatggaagtgcagttttgccgcggcaaagaacggctctagagtcaccgcagttagcgacgaagatgtgagacgggaaaacaacggcaaccaccgacgttgacccaaccgtctccggcgcaactgactcaatctccgagtcaactctcaggaacgagttgaaaagagctttcttccacttctccagccacgtatcaccatcgcagagcatcggtttctccttagctatctcctccgccaaagccaaatgcatcctctctctacaatagttcgctacctacacaacaacaaccaaatcagattctgcaaactgtaaacaaccctaatcaaaagatccaatcttttacctgagaaccgccatggccgtcgtaaacaccgaagaaatgagcggcggattgaggatcaaaccgaccatctaacatcgaaccagaggaagattgaaggaatcttggtatagtcgaaacagcatcttccatctcaggtcttcttccacaaatcgaagtaaaaccatacaaaggcacactcttgaattcaaacaaactcctactctctgttctgctgatcatcttcttctcgctagtaatatctgagccgttgatctcatctccggcggagatatcaacgacgactatatcagcagctgctgattccttcatgtttaaattaggagaattgatccgagaaatcaaaactttcctagattcagaaccatgtgacccagaaacagagcatgatgaagtctccggtaacgaaaccattagatctccgttctcggaatcttgatttgagtattggttattgcagtaacctttacccaatctgatcccggtgaaatccatctgggtttcggagaatggcctgaaaggacctgcgatcgccggagatacttcctccattaacggtaaagatttgatctttttctctggttgtgatctataagatagctccaatggaacaaaaatgaaaattcgagagattttcacaagagaaggactttattagaagaagctaggaagacaagaagaaacacatgactcctatgaaaaaggaaagcaaaaacagagagacatatacccaaaaatatttcccgggaaaatcacaaacacagaaagaaagaaatgaattgaatttcaataagggtttcctggattgtgggtaattcgttaggacctcttgaaaagattggtgtagtaatatctctctctcttcaattaatttccaactataaaactatttctagattcatctatatacacctaaaaaagttgaaaagaagagttctaatgtgccttgttcacagatagaagagagaaagaaggaggaaatgggtaggctaatgcaacaattgcttcgaatctactatttatgtatgtatacttatatacatatcactttattttattacattattaaagtgatactttttttggcttatttattttttgtaataaggggagatgtttcgttcttgaaattttaaactatttaattcataaaaagacacttgcttcagacttcctatattcaacattttttttaaaaaaaatgcttttatcatttcttatttttttaacaaacataaagttttttggttttttttttctttgggagaaatatatttcttttttgtttgtcaaacaaaataaaatatgtttgcttttaactttagttaggtcatcagtttaatggattttatattttcataaagatgactttcattaaatgacgtgtcgtagtccgagttaaatcttgtattgttttgcaattattttatttgtcatatagttttcaatctaaataaatagagtttgaattacgaaaacattattcgtaattcctaatcattggactaaaaaacaccaaacataatataccatttagatattcatagatttaaataaaaattttaaatttgtgtcattttcagaataagaacaatactttgtcctttagataagaattcaatgttttatattcgggaaaaatgaaagaccaccggtaaaatatctaaataattgttatttaaggggtacgtttcattattcatctaattatttatcttgaaaaccatttttggtcaaactcaaaaccaaaaccattatgaagttatcgtctcatttatttatgtgaccaaaaataataactgaatcttagttgttagaaaaattggtctttgtagtttcatacaaaaaatcaagaaaagagatttgtcgtgcaattataaaaatacgttacaattatataaagctttttcaaattccagtatataattttcttctcaatttatccttaagggaaatgaagagttggtcatggaagtccattaaattcgaccaaatttttagttttttttattgaccagaaaagacagtacaaaacataaaattattgttgtcgcagtatatatataaaataaaaagatgattccgaaggtattttgatggatagactcatggacataattatgcaacgacccaaagaacatgaaagaatccgtccaattttttaaaataaaataaaaatgtgaataggtcccacgtttagcagaaaacaaaaaccggtggatggtcgacacgtagacgaagaaaatgggaaggagagagggtgacgtgtacggtttaagatgtgttagttgggtggcgggagagatttgatcgaaagaaaaaaaggttcattgcactgacaaagacaggtcccccttttatattatttttctttcgtcccattaaattccgtaaatatcttgtctttaaactctcttttttcctctcctcattattattctattttctctaatatctcaataaatatttattcgtcaacagatagataaaaaagaagtatttattcatgttccatatgtttgatgccacttgtgcggttttctttggacaatgtgtaatgatatgttattcatatgggagatgtgtgaaagtgggctttggatgatgggcaagagacaaaatacccaagacacctcaaatacaatgtaccaatcatctaccgttttttttttacaaattattacaaaagtagaaaaaacattgattttttattgaaagctatttcttttagataaactgagaagaaagccgagacaaatatgaacactagtaatttattttgtttaatgtgtgattaattgaatttgttagctttccttgcgattgcgggcaaagtggataagagaagtagaagtaggtttgttctaactcgtaataaagtcacagaactaattctaaagaacggtacatatatcatcattcataagtacttgatgtctcccattttcggtgaaacactttacttgaccagtctttttaatatgcaacaaatcttgtatatattcaacataaaaaaaatgcaccatcattggaattgttgacccaacaaaaaaaccctataggcattaaaaggctcttagagggccaattttgttatcgggccttcacttggccagtagaaattacaagcatgcaaacaacagttcgagacttcgaggaagattcctatctctctctactcgtttcttgaaccaagtcatacaagcaagcaagacagctttattaaagttgactttactttaatctttatgagtcaacacctcatctttattagttagttagctcagacaagtaaaagaaagagcgagaaatcatcgaaatggatttcatctcatctcttatcgttggctgtgctcaggtgttgtgtgaatctatgaatatggcggagagaagaggacataagactgatcttagacaagccatcactgatcttgaaacagccatcggtgacttgaaggccatacgtgatgacctgactttacggatccaacaagacggtctagagggacgaagctgctcaaatcgtgccagagagtggcttagtgcggtgcaagtaacggagactaaaacagccctacttttagtgaggtttaggcgtcgggaacagaggacgcgaatgaggaggagatacctcagttgtttcggttgtgccgactacaaactgtgcaagaaggtttctgccatattgaagagcattggtgagctgagagaacgctctgaagctatcaaaacagatggcgggtcaattcaagtaacttgtagagagatacccatcaagtccgttgtcggaaataccacgatgatggaacaggttttggaatttctcagtgaagaagaagaaagaggaatcattggtgtttatggacctggtggggttgggaagacaacgttaatgcagagcattaacaacgagctgatcacaaaaggacatcagtatgatgtactgatttgggttcaaatgtccagagaattcggcgagtgtacaattcagcaagccgttggagcacggttgggtttatcttgggacgagaaggagaccggcgaaaacagagctttgaagatatacagagctttgagacagaaacgtttcttgttgttgctagatgatgtctgggaagagatagacttggagaaaactggagttcctcgacctgacagggaaaacaaatgcaaggtgatgttcacgacacggtctatagcattatgcaacaatatgggtgcggaatacaagttgagagtggagtttctggagaagaaacacgcgtgggagctgttctgtagtaaggtatggagaaaagatcttttagagtcatcatcaattcgccggctcgcggagattatagtgagtaaatgtggaggattgccactagcgttgatcactttaggaggagccatggctcatagagagacagaagaagagtggatccatgctagtgaagttctgactagatttccagcagagatgaagggtatgaactatgtatttgcccttttgaaattcagctacgacaacctcgagagtgatctgcttcggtcttgtttcttgtactgcgctttattcccagaagaacattctatagagatcgagcagcttgttgagtactgggtcggcgaagggtttctcaccagctcccatggcgttaacaccatttacaagggatattttctcattggggatctgaaagcggcatgtttgttggaaaccggagatgagaaaacacaggtgaagatgcataatgtggtcagaagctttgcattgtggatggcatctgaacaggggacttataaggagctgatcctagttgagcctagcatgggacatactgaagctcctaaagcagaaaactggcgacaagcgttggtgatctcattgttagataacagaatccagaccttgcctgaaaaactcatatgcccgaaactgacaacactgatgctccaacagaacagctctttgaagaagattccaacagggtttttcatgcatatgcctgttctcagagtcttggacttgtcgttcacaagtatcactgagattccgttgtctatcaagtatttggtggagttgtatcatctgtctatgtcaggaacaaagataagtgtattgccacaggagcttgggaatcttagaaaactgaagcatctggacctacaaagaactcagtttcttcagacgatcccacgagatgccatatgttggctgagcaagctcgaggttctgaacttgtactacagttacgccggttgggaactgcagagctttggagaagatgaagcagaagaactcggattcgctgacttggaatacttggaaaacctaaccacactcggtatcactgttctctcattggagaccctaaaaactctcttcgagttcggtgctttgcataaacatatacagcatctccacgttgaagagtgcaatgaactcctctacttcaatctcccatcactcactaaccatggcaggaacctgagaagacttagcattaaaagttgccatgacttggagtacctggtcacacccgcagattttgaaaatgattggcttccgagtctagaggttctgacgttacacagccttcacaacttaaccagagtgtggggaaattctgtaagccaagattgtctgcggaatatccgttgcataaacatttcacactgcaacaagctgaagaatgtctcatgggttcagaaactcccaaagctagaggtgattgaactgttcgactgcagagagatagaggaattgataagcgaacacgagagtccatccgtcgaagatccaacattgttcccaagcctgaagaccttgagaactagggatctgccagaactaaacagcatcctcccatctcgattttcattccaaaaagttgaaacattagtcatcacaaattgccccagagttaagaaactgccgtttcaggagaggaggacccagatgaacttgccaacagtttattgtgaggagaaatggtggaaagcactggaaaaagatcaaccaaacgaagagctttgttatttaccgcgctttgttccaaattgatataagagctaagagcactctgtacaaatatgtccattcataagtagcaggaagccaggaaggttgttccagtgaagtcatcaactttccactagaccacaaaactagagattatgtaatcataaaaaccaaactatccgcgatcaaatagatctcacgactatgaggacgaagactcaccgagtatcgtcgatatagaaactccaagctccagttccgatcagtgaagacgaacaagtttatcagatctctgcaacaattctgggaatcgtcacctcagattagacctccagtaagaagtgagaaagcatggacgacgactgtgaagaattgagctaatgagctgaaccggatccggtgaaattgcagaaccggatcggagaagaagaattttgcatttgtgcatctttatttttaattgttacgtttgagccccaataatcatagatattgtagtgaagaccaaatttcatggtggatcaatcaaattgtattttcaaattttcgtagtgtaataacggaaaaaggaataaaaaggtcactgagtaaaattaatgtatcagtggggatggtgttcgtccgagacttgaagattatcgatgcctttaactactgattcgtagtgtcttcttgtggatttcccagcctccccaggagagtttctcgggatcacgccgcggctgacgtcacctgtacggcttctctgcaacaactcctcgctgcctggaaaattgtcccggctgccacttactgcagttactctcctcgatgatcctgctgattgtgcaaacaacgaggagctcgggatctgcatccaaaagaaattgaacaaagttttgatacttttagccactaaatcacatatgacccaaactcatgtttgcaggtgagagagatagcaaatgcagagagattcataccatggagtctctagcacttgaggatgtcggttggttcgaaatattccctgagttatcaagagcccctgaaactctccgtcgagatgattccatatgtggtcgcccttcttcctccccttggattcaacaatgaacaacaaacaatgtgaataataacttctttgcagagaaataagaattacgttgtaagtgatcagggaaatttacctgtgtatctatcgatgttggaaatgcccggaggcaatgcggcactagttcccacagcaggattctgaagcaggagagactccatcagaaaatgtcaaaccaaaaaagatagtttaaccaagaactcaagttttacttacgagggcacgagatgggggagcggttagttgtgattgttgatatttcaagattgtccagtcaaacacgtaatcaaactgaaaccctgcaacagggaaatgaaatcttgttagaaaatatattaggcttaaaaattgagagggaaggaaatatcaaaccttcacggataaagagatctcgaaatattcttttcagataagcgtaatctggtttatcatcaaaccgaagcgaccgacagtagtggaaataggatgcaaattcggatgggtaaccacgacataaagcctgcaggtgtaaggcgatcatatacgaatcagaatgagggaaacaaaaatctgagtaaaaatgtagcatacttgtgaaatgaacttacctcaatggatgtagaaactttcttttcactaatcctttcatacttttgctttttggttccagctttcagtccttgccatggaagactaaaacagagatattccacacatcaatcaaactgaagaagttagggaaataaagtgaagagagtgtgaggcatgtagcataaactcaccttcctttgaggaaatacataaggatgtaaccaagagactcaagatcatcccttcgactttgttcttcaggttcgcaatgccagaaaacaaataacagctgatgagtatcaaaccttataactcaaacacataaggagagtgactggaacaaattaacatgaagcaggtcttgtcgagcttaccaattcccaagtgagtgttcatactagcatatctcgcagttcctgtcaggtttttattttccctgcaaatgagaatcatgggaaaaattagcgtttccagtcatcacataacaacggaatcatgctcaagggaagaacattcaagagctgatacaatgatcgcctcacctgtagggaatgtgctgatgtgttgtactatccctatacttcttagcaagaccaaagtcaatgatgtataccttagagaaggattaaacttggtcaatacaatgatgtctccaaaagtaaaataagaccaaaaggatatagttaagacaataagatgataaacctggttcgcacgccttccaaggcccatgaggaagttgtctggcttaagatctcggtgaaggaaagactttgaatgaaaaaactcaacacggttgatcttatcacaaaaaccaaaggaagaaagaagtcaatatttcctgaaacatagaggagcaaatgaaagaaaggcgtcacatgaagaagtataccatttgatcagcaagcatgaggacagacttcaatgaaagtttcctgctacaaaaattgaagagatcttcaagacttggtccgagtagatccatcaccaaaacattatagtccccttcaacaccaaaccatttgacatttggaacaccagctaccaaagttaaggcaaaagaaaggtcataagtaacacaaactttacattatcagaaatcaatatctcattcagaagataagaatcattacttcccccttgtagaatcctgtataacttcgattcatagagcagctgtggatgttttgtcttcacattttcctgggaaaacaaaaacaaagagaatcaaaatctcagcttttcaacatactgaacttgatcaaactaaacatattgtgataatgttacttataaatccataaactttttgatcatcaaattattaaaatgggatgactgaagaactcacaagcttaatagccagttcttcattcgtatgaatattagtacctggaaaatcacaggttaacaacaatgttagagataatgtgacgaattcgataatccataaaattaaaaactagaaagtgagagagagacgaaccgagatagatctctccaaacgaaccactaccgatctttcggccgagacgaaacttgttccccacacgaggttccataaataaccacgaaaccccttgtacaatcttaacaacccagacgcagattcaaatagagcgaaagggaccccaaaaacaatcctgactagaatcagccgcaccagcaatccagaaaaacaacccagagatcacgaacaatgagattacggatttttcgccgactaaatcaaaacccagtaatcatcttcttcgtgctctcgatctggtgaaaaaactccatatgaacagaatgtcgttttctgggatgcttctctctctctctctcctctcaagaattgaatacgaagataaaaaaaaaaaaaaaaaaaaagagcttcgatggacagaaaacgatgaggatgtctttctcaaagtttgcgtctttttttttttcctctttccttgcagttgcgggtaatgtaaaaaaattatttacctctgaatgattccggttttgttgctgtgtgctatgttcggtttggtttctatgcttcggttcaaccaaacaatctaatgattatggcaagcagaatagtaaaatagaaaaaatgtgtaaaacatctatagaacacatatgtatatacatgctgagcatctttaaatccacaaaaatactactatttgagccgaatctaccaactaaactaaacctggttttaaaattatccggtttatttgagagtttcaacaacaagcgcgcttagaccatcattattcatagtttataaggttagttcttagataaagtaggtcttaaatttaatgttataattcaattaattgttaaaaatgactcttatataagagccaaatctaatgtttcttaggttaattcttagataaattaggtattaaatataatgttttaattcaattaatcttaattcttagataaattaagtattaaatctaattgtttgtcatatttgtttaaaattttatgttatgtatgtttcaaattttttgagttgtaataattattaagttttttaaaattataatgtttctactttttttccaattttttttttaagaactcaagttaagagtccaccattgcatattgccaaaatttcaatctcttaactaaattcttaacttcaaaattttcaaaatcaattataaaaatattcataagaactattaagattatgctaagaaactactattaatgatactcttatgatggctatatgatataaaaagattgaccacttaccaggtgtgtttgctacgcgtgacttgaaagctctacaaaatgtttctcttaagtgggagtcgtggaggtacaaaaagcttttcacctttgcttttaataggatgaatgaaatgatttacagttatctgattaggttgaatttgtctcatggttttctggttaaaaaaaaatgctacgcgtgaggcttctttattgtgtttctggtcagacgtataaaaggttgaaacttcaaattgaaaatgtcgtgatgagctaatctagattagagtacgtttaattcgtttgaactcgggatgagcttaaaccaaactaaagatctttgtgccttttgggatatgactttttgttgtggactgtttttttgtttttgttgtggactgttttttgtttttaattagtatgtacagtgtatgtgaacaaaagaagtaatcagtgtattgggcttggaaggctcattcttgggatgggccttagtactaacagattcagaaatcttctatttgatcccattaaagttcactaacctgtactgtatttggtgaagaatcaaatatatataagtgtatatatatatatataagtatatagataattaatataattacatgcaaaattttaattatatagataattaaagtttatatattagttatatatatttataattgattgaattcataaataaactttaattatctatatataagtcagttctcattatccatatatatatgtatgtaaagttttgcatgttatttaattcaataaacttaattttgctttttaaaacattaaacatcaatttttagagaaagaaaagtatatataaaaagagaaaaaactaaaatggcatttgttataattttggtgtgaaaaggagggagagaaaaaaacaaaaaaacaaagaggatttaagggttacgagtcgcctccccaaaacccttgtccctagtctcttctgcttcttcttcttcaaaatctctctcttcaccaaatcctcagaagatgagcaacgacaaggatagcttcaacgtctccgatcttactgctggtaaaatactcctactcacgattactcttatctctttctccgcctcttaagccagagctgctttaaccctaatttcctctgttatctgactggtgttccttttgtttactgtttttttgcagctcttaaggacgaggatcgagctggccttgtcaatgctctaaaggtgagtttttttccccttctgtaaactgtcccgtgagcatttgctattgaaagatatggaggatgttgagttactttcctctgattgtttagatactataagccgtgtcttggtgtttagtgttttggtttcaatgtcattcttctagtacaatgatagtttatgagttgttaatacattgttattaattcacagaacaagctgcagaatctggctggtcagcgttctgatgtgctcgagaatctgactcccaatgtgagaaagcgcgttgatgccttgagggatatacaggttagcgaaatttctttcacattttaccaaactatgtgtgctatatatcgtttaatggggtttgttttgttttgtgtgagttttctccctgcttatctgaatttaaagtttcaaaagtaaggtgttgcgttttgattactgatgacttctttccacgcagagccaacatgatgaactagaggcaaaattccgtgaggagagagctattcttgaagccaagtatcaaacgctgtatcagcctttgtatgtcaaggtaattgttaatgagaaagttttacaaaccattttactaaactcaatgtagatctgtgtatactctttttgcttatgtttacttatctgcagcagtgttagttttctatgtgcatcttaatgaattctacttggtatcttgtaatggcacagcgttatgagattgtgaatggcactactgaagttgaactggctccagaggatgataccaaggtggaccaaggagaggagaaaactgcagaaggtaacttcatgagcactatgtcttctttgtttgttgttaatctttttggaaagacaaaaacaatttaacatttttctctgtttttcattgcagagaaaggagttccaagtttctggctgacagctctgaaaaataacgatgttatttccgaggaggtagcctatatgcagttttggtgttcgttttataaacactccaatcataaccatggaatatgagcataacttattgtcatttatgtcaggtcacagagcgtgatgaaggggctctcaaatatcttaaagatattaagtggtgcaagattgaagagcctaaaggattcaaacttgagtttttctttgacacgaatccgtattttaagaacactgtcttgacaaagtcttatcatatgattgatgaagatgagccactgcttgagaaggctatggggtaactacttatactctcttgcaattgttgtatacttttaagtatattctgcttattagctgattgcattgagctgcttattttttttcttcgcttatattgcaaatggattcttattctttcaccattcattttcaggacagaaattgattggtatcctggaaagtgtctaactcagaagattctcaagaagaagcctaagaaaggttcaaagaatactaaaccaatcaccaaactcgaagattgtgaaagcttcttcaacttctttagtcctccagaagttccggatgaagatgaagatatcgacgaggaaagagtaagataacgattgttagaaaaacctgtcatcatttagttaatgtatttagtaactctttctcgttctttgatgcaggctgaggatcttcaaaacctgatggaacaagattatgacatcgggttcgtctttttctaaacacactttctctgttgattttatgggtttgcttttgagtcatgggactactttatcactgcaatcaaggtggttaccctttcattattatctgatcacaagtactttttactttctgcagatctactattcgggaaaagattattcctcgtgctgtctcatggtttactggtgaggctatggaagcagaggattttgaaatagatgacgatgaggaagatgacattgatgaggatgaagatgaggaagacgaagaggatgaggaggacgatgatgatgaggatgaagaagaaagcaagaccaaaaagaaggtataaagtgccccaagtatagttgtttcttttttttttttttttcttcatgccacgttagttttttactaatcctttgaaatcgcttaatatttttttttgcagccatcaatcggcaacaaggtatgtaacctttcagaactaaagtttatttgattttggaactccaacattcaaataaccaaacacaagaagtttcaggctgagcattgtgatgaaaatagaaattaatatcggaaatgtaggctctagaggcccatgaatcatacagattgctgaaagtaactgagcaatcctaaaaagtatgaatcagtaaataggtagttacgtagaagactctgagaaggatacatgaatgacacagcagagactaaacaagctctttaatcatggcatgggcagtacgagatagaaccattctcatgaattcattttattactatagtagcaaactagcaatcagtgtctatgtttgtgataaatgtgagaatcatctgcttaatttttttttcctcttggactgcagaagggagggagatctcagatagttggtgaaggtaaacaagatgagaggccacccgaatgcaagcaacagtaatcttttactacgctctaccagacataaaaggattgcgtgaaaatataattcaggtcattctctgttcatcaagaatgaggattgagaaaaggttttgggatttttaaaagtgaaattcatcttgtaggagtttcgttcgtttttctattggtgtgtttattttctctaaagcactttaataatataccttggtatttaatttatgaatcaagcatcatcatccctagtctctgcattcactacttcatcccctacctaaactttgtcgacgaaagagattttaataaccatttagatagtaatgggtagtgggaatgatcattattcttttgttcaccgtcctttgattttcaatggtaaccattttgttgtgtaagactacaaaagatgaataattggactatgaccatattatattagtcaagtctaaatcggtcgaaatcagttcacctttaagatgagtaatttgactaaatgcctccgcttgttcaacactaattataatttaaattattgtagaaggaaaacacaaagaaagtgaggttccgaacatccacaatttggactaatcacatactacttaagaagtttaatgcatcattagagctaaatgaggggaaaaaaaagctagctaaataaacttgagacacttgtttgtgtttggtgttatgaaaaacaaactcaaaagtcgcaacactgtttggtaaattggagacatgcgaagaggggaccgcttcgttaccattcagagtatttgacgtaatatattccgttttaagaaacctatctagtttccaagaaatttactaataaaggtgcttgagaaagaccgttgttgatgatacgtttttttatttgctaatgaaacgattcggtcgttgtttcttgaaattccactgttattagactcttgactctgttttgtttcccgccgatctcgtgatgatggccaccaccaccaccaccaccaccgctagattctctgattcatacgagttcagcaacacaagcggcaatagcttcttcgccgccgagtcatctcttgattatccgacggaatttctcacgccaccggaggtatcagctcttaaacttctgtctaactgcctcgagtctgttttcgactcgccggagacgttctacagcgatgctaagctagttctcgccggcggccgggaagtttcttttcaccgttgtattctttccgcgagaattcctgtcttcaaaagcgctttagccaccgtgaaggaacaaaaatcctccaccaccgtgaagctccagctgaaagagatcgccagagattacgaagtcggctttgactcggttgtggcggttttggcgtatgtttacagcggcagagtgaggtccccgccgaagggagcttctgcttgcgtagacgacgattgttgccacgtggcttgccggtcaaaggtggatttcatggtggaggttctttatctgtctttcgttttccagattcaagaattagttactctgtatgaggtaaaacacaatccactaaattctcattgactcataacatcatcttaagtctcctctgttttcatttcagaggcagttcttggaaattgtagacaaagttgtagtcgaagacatcttggttatattcaagcttgatactctatgtggtacaacatacaagaagcttttggatagatgcatagaaattatcgtgaagtctgatatagaactagttagtcttgagaagtctttacctcaacacattttcaagcaaatcatagacatccgcgaagcgctctgtctagagccacctaaactagaaaggcatgtcaagaacatatacaaggcgctagactcagatgatgttgagcttgtcaagatgcttttgctagaaggacacaccaatctcgatgaggcgtatgctcttcattttgctatcgctcactgcgctgtgaagaccgcgtatgatctcctcgagcttgagcttgcggatgttaaccttagaaatccgaggggatacactgtgcttcatgttgctgcgatgcggaaggagccgaagttgataatatctttgttaatgaaaggggcaaatattttagacacaacattggatggtagaaccgctttagtgattgtaaaacgactcactaaagcggatgactacaaaactagtacggaggacggtacgccttctctgaaaggcggattatgcatagaggtacttgagcatgaacaaaaactagaatatttgtcgcctatagaggcttcactttctcttccagtaactccagaggagttgaggatgaggttgctctattatgaaaaccgaggtatgctttcttccttcacttgaatatcgaatttcgggtaggaaaatgagtggaactaatgataacgatggtctatacttttcagttgcacttgctcgacttctctttccagtggaaactgaaactgtacagggtattgccaaattggaggaaacatgcgagtttacagcttctagtctcgagcctgatcatcacattggtgaaaagcggacatcactagacctaaatatggcgccgttccaaatccatgagaagcatttgagtagactaagagcactttgtaaaaccggtatggattgattcttatatgtcatctcttttctagccaacaaagaaatgatgtttagaactttattttgttgtatcttcagtggaactggggaaacgctacttcaaacgatgttcgcttgatcactttatggatactgaggacttgaatcatcttgctagcgtagaagaagatactcctgagaaacggctacaaaagaagcaaaggtacatggaactacaagagactctgatgaagacctttagtgaggacaaggaggaatgtggaaagtcttccacaccgaaaccaacctctgcggtgaggtctaatagaaaactctctcaccggcgcctaaaagtggacaaacgggattttttgaaacgaccttacgggaacggggattaaggaatgggaaatcatattccatttcactcccacaactaaaaatgatgtatgtcctatatcatgatgtttcgtgagtttcaaataaattgaaacgtacatatatcagtttttcatctacgtgactgcgttgtatagttttcgttcttcacttagcatcatgtgtattctagctccaagtgcgtttcaaacaaatatagttatttttagccaattatatatacggttgtgatcagcttgttcactcaagagattattttagtggtgatctttcatttccttctaataaatgacgactttgttcataaagtttgagtgttaatgagaaaaaggcttcatgtgttttaaaaatctaaatagcataatgtatgttaaactcctacaattactttcgaggctggtcattccttcagaatatcatcggaccattcctctgttcgaccacaaaaccgaataagacaaaactatatgagactctctaactcagagagagactctctaactcagagattctctaactcagagagagactcgacccatgtgacactcacgtgacttttaaattcccttcccgtgaagtgatccgtgaaccccattcttcaaaacttaggacagagacaaaaccctttaacgggttctaactatggtctatggctgcaactaccgacagccgaatgcaaggagcatcaagtacaactgattttgaatctcagagagaaaagacagtgtcacttttctatttgacacttgtcaattttctatttgaaattaaattagggtttggatagtactcctttcacactggaatgaagttttaacaaagattttccacacaaaaaaaaagcattggtggggaaccggtgacggagtaccttcctgtgtcgggctttaacaaccaatattttttgcaaattagattgcccagccatctaggtcacacaccatcaaatgtcatgaatgatatattgtcgtgaagctatgattatctttagcttatttactctattatcttgtacgttcatacaaccattcatatataatctttctcaaagaaaaaaaaaaagataaaggaggcatgtcacctgaaacatattggtcatagcataatttgcattgttagaaaacaataatcgtataacaactctttctaaattgagatatttcatacttacccacactcttgaaaaatatatgtacgaaaaatatcttcgtcgaccgtgattagacagctagtcatatctcaaattattccttttattagtttcttgctttaaacaaacttcatcataataactgaagaattcttgtaattatctactcaccagatattttttgagatgattaatagcttcataatgtatatatgttgatataagcacgtttcatgagattgagaaccgtcgttgtcattagtggttcaataaatagtaaactgatatcaactccataccataagaagtaacagatagaccaataaatccagttgacattaacaaatattactgttcttaatcagaacaatttagtaattaaacaaacattaatattactagaatctgacgagagaagtatcgatgaatgtttttcttctgtcgcaattatcgatgaatgttcgatttaaagaaaataatattattagaaatacttttttccacgtaaaaacagcataaaaactacttttaccatcgagtaaaaacaaaaaagtgcagtggaactcatacgtccagatccagcaattacgcacacgacacaaactagttttgtcatccagtcatcaccaaatctagaacacaaactagaaaatacgtatcgtaaatgacctaaacgccattcagattcaggggtatttaccacgaaagtacaaattggaaagcgagggaaagacgattccgacaaagggtaaaagcgtaatcttcacttaatcgttcttgagcatctctctgtaccttagaaacgaatctagcctctgtagcttaagctgttgcttaaacttgttgatgaaatttgaagctttatcgtcgacaccttcttctcctccgtctcctatcgacgtcgttctctcaactctcatcgtctccggccttctcttctccacggcctcaactgtctcctcctcttcccggccgatgtgtctctcgctagcagatttcatcatcttctttgtagctttcttcttcttcttcgtcgccggtttactcgactccgacttcgtcctcgtatgtgtttgcacttctggtgttggatctgggtcggatctgtataaagaaggaagctttatggatttcacccgctgcaagagtgatggagctccgaatctaggttcggtcgtgacgtcatcctccgggatcttgtcgatcgggtcgacccggttagtctcgtcgggttgggtcatgagctcgtaagcagcgtaatctccttcagaattgtgttgtgggaacttgaagtaaggcatgttgatggatttgacccgttgcaagagagaaggaggtgggttcgggttaggatccgacccggagtagtggatctcggattctggtgaaggagaattgtacagatggaagttgatggactttactctgtctatgagcgaaggaggtctgccaaaccgtgcctgattttggtcatgacccgacgacccgtaaccatcttgatgttggttgtgttttcttgaacaggaactgaaccggttggtgatgaaaatggtggcgatcgtgaaattgaggaggaggaagagagtcgtcggagttaaccagttggtcaagcttgtgagtagctccattgttgtttttgtgtgtcgtagagtgaagaatgaagtagtggataatatttatattagagatattttttgtcttggttaatcattaatgacccttgcgttagatttgttgtatgggtctttgtttttttttcatatggttttatttatcaatttgtctttctatattgattgttttctaacaaagtcagaaattaaacagtacatatgttttggtcttaacgtaattatcagttaaatagtccttgtagttgtggttttgtttagtatttgtgacttgtgtagagaagatcatccatttgaaatagttacatctatttctgacaggctacaaaactcttacattattgacctcattgaaccaaggtttaaatctgtattttaaccccgtgactctattgtctcatcggctcataatcatcttcttccctgagcccacatttttcttttgataatcgtacagttttctaacatcacattccttgagctttttattctatttcaaaaatagcttacttttacataaatcattcattacattttttttttctttctcattccttgagctttttattcatattgtctttacacttttagtttctcttttcaaaggttttcaactttaaatactacttgcatttgcaaagtaaaattggctaagtgattgtcatttaattttttaatgtgtcattttatttgaattatattatatatgtcaatgaaaaacaggtgggagaaataaataaataaaaagacacaaaagaggaaaacacaaacaaaaaagatttagaaaagaaaagaaagtgaagaaagtgaaggaaaaaaaagaaagcaacagagaaatttgtcttctacacatggatgcagctcttcaagtggaggagaggatcttcaatctctttaatctttccacaaagtcaagttgggattaaagaaaccacatcgtgatcaatcaacttgaagcattacttagcttgtgtgggtggtcaaacgattaaaataatatcacaactcgttttgagtcgtatagtaaatttataatatcacatttgtttgagtcgtttagtagctaatttttgaaatgaagatatcattaacgacaaaagttgctgactatgaaaatgcacaaagagaccaagaacactgctaataaatgtccactaatgatatttctgaaagtgaccaagaatactttattgcccatcaacgagattgttagtactagtatcgtagataagaacaataagtttctttatttagaatttccggaataagcttggagatgctattttcagaactcatttatgaccatcttcatgcaataaaccgtatcgtcgttgtagtccaaagtcaaccgtaaaacggtagctttcccttttatatgggctttattgtaggaggtccaaaggcccaatagatttctgatagtaaaaaagagagcaatgtggtctcggagcattatcgtttctctgactctgctggacatcagcgatgattctggagttgagcttttggtcttatctgcttcaaggtacttcagctcagtgtttttctattgattttgtaaagtttcttattgattttttctatttgattattgaatatttggtggagacaatttatcgtgtcttatgatctttaaatcaactactgtagtgtacttagaattagatatcacagtgtttaagcatttacaaaacttagagatgaagttagagcagacaatgaaaatggaattcaaaagctttgtttttttattagtctgtaaaatacattatacacttgtagacttgtagtatatttataggcaagatagagataattttcatctatatgagccaataattcccagtttatatgtacatttatatctgtattctatcaatgacttgcagagagccttaaatttgtcacaaagaaacagattttatcctgaaaaaaatggagtcagaaagctattatttggctgttctttttacaagagagatcccattgggttcaccaccccattcttcaagtacaatgacaaggttattagttggcttcagccatgaacgaggcacatggtacctgaaaacgaagataaagttcaaacctttgattcaaatttggactcaagaagaagaagaatttaggcagttttactcaccatctttgtgaagcttctccacagttactcaaacatttcttctctgtgaaagtcccggcatagctgcagcgttcgcatttcccacgagctgtatatgctggccagtggcgtccgatgttctgcccatttatccacatttgacctttccccattgtgttcatgtctaaagccaatggttcattgcctgttggtgagtcaaaagtagactgcaaaaagagatggtgaaaattctgccctgtggatttcggttttcattatattgatctaactttgttggtggtcatgattcattgattcctctgtttctcttaccttgtaccaggtcaagggctgctttttagccactaatgatccttctttccattctaccgttgaactcccggctaaggtatgaacgctcagagcttcacccttagtaccaatctgcttgaaacacaaatgaacaaatgtttatttcattgttaatgattgttggtaagcaaactcgtttctcttgaatttcaggaggaccttgtaagaccatttccatttagtcatgtcccatgttccggagttaactccattcagtgtcactgggccaagaactccagtattccaagtctcataatgcacgccaacgttctgtgagcaatgaaggaccaggaagcttagaacgtaatcagtgtatgagaaaaaagcgcagagataaactgaggagaactaaccggcagacccgctgcagtactcaatagagcaagtttgttgacccctgcatgtaatttgatcttctgactaaatgttagctttggcttctccagtgatccatatgcagttcctgaaacaaagaaatgtttaacagaagacaaaggcaagctaccatgaggatgagtttggcctatcttaatgttacctgcaagctggccattaacgaatacatgaagagcatgcccagctgacccaatagtaagaagagggtcttcaccagttaggaacttttcatcaggactgattgtaatactgatttatatccacagacaaaaccaaccgtgagttctccctttgagacaggaagatagatagtaaccaaaatgttgtcaagaattttctagtattactcactctgtcagataccagaaatagtctgtcttgtctctggtgatacttatctgttccacaagcccatcttgtgaaaaggtaccattgtcatttgcagaaggaatctcttcgttgtatgaaccccaagagaatggtgtgtttgtaggaaccatcttcatgtgtatgcttgatgtacggacctgtaccttgtaacacagaggtcaatttcagtgataccatcacccttaacatatcaacaaggtaatgtgtttgataagtttttttctcaaagttgatataccttggcagtgttgtaatactcagttttgcagtcgggtagaatactgacagaccaaggaggcagatcatatgtagatccgccaaacaagactcttgcagcagaacttgtgttgtagtttgagagaaaagcagcgcaagatgacttagacttgaacacgtgagcctgaaaaacaaaacatgcccacgaaaaggtaaataactttttttggaagtttttcttctcttctcatgtgtattgatatgcattgcatccattacttcttgtttatccccgagtgatgtgactgtaggatcagcagagaccaatgccggttcgcagagcttgatgaccttatgcagccttttcaagtgactatacttaggttctctcggtaacccttttgaaaaataaaccaaaacaagtattagatgatggttcaatatcgttttgttaccattgtgttttgtaggtaatgagacttcaaattaccgtattcatcaagaggagcatcatagtcatagctggtggcgatgaattcaccggctgttctgtcgaagttggttcctccatggtactgtttaacaacatttcctcactccatgaataatcaaatctagtatttaaagtttcaactatagagaagctgaatgaagttaccatataatagttgatgaaagagccaccgttctgtatgaagcgagccacggataaggcaatgtcttcggctggcctgtatggtactgcacctccaaactctgtaaacctgataaattatttgcagattcacaaataaaaaagttatttcgtacaaaaataaaagatacattaaatttttattttcttggtcttaaagatttgtattgaatagtaatatttttggaagggacaattgtgttgtgtgacttaccaaccagtccagttctctgtccacattttcggcttattgtccgagtttggtttgaaattctcacaataaaacccattacatgtgtttatctgtcgaccaaataaataaacaattaattgttttttttgtcatttgttaaaaagaactatataataatatgtattccattaaatttctctttttgatcgataagtccatgtaacggaaacatgtgagaagaaggaaatcaaattaactgaagtaacgttatttcccacgttaggaagcgtgatataaacgtcaaattgtaacaagaaaataatgaagtttttaccaataaaaaataataatgaagagaactttaaatcaaagaggagtagaggacacagaatattagtgactaacctaccaagaaaaatatacgaagaaagatgattcgagctattagagaacacaaacacaaaggagattctataaaaaaattaaaaatgaattaacaaacatcttcttttgcttaaagaaaacatatattataatcgttaggtataataaaaccaattaatagagtatatatatgtattattaagaggtaaaagtaagagaagacaagaaaataaacaatacaaaatgaaaaaaaaaagtatactacaaaacttttcttttccttttgtatcattaagaaaaaaagatttacgagagaacacaataacatattttaagtacaaaataaaaccccaaaaaaataataaacaaaactacttcttttgcttaaagaaaatataagcagaaagcaaatatgtaataactaaagagagaaaaaaggaagaagaacatacaatagagttaggagcatcatcttgcttgcacataatccatgggacaccagtggagagtccttgtgccatttcagctacccattttgtgtatgccttccctggtgctcctatctcccactctattggtccatactcattctctatctgcccatttaaaacatacaatgtaaatatcatctttttttctttcaaaaacaaagattcatttggatatacactactgacattatgtactaactaatacgaaaacaaacaaacctgtgacagaatgatgggtcctccttgagtctcaaataatttttcttctttcatcatcctcacaatcttctcagtgaatttttgcattgcagccttttcattatcacatcaattttttgttagttatcccaaaaaatggaaactttataacatatgagaagaaagttagataagttttataccttgaaaggttcattgtcggtcctaaataccataccgggaacatatttgagccacacaggaaaccctctgcaaaccattaatttaaacatatttcaatgaataattatatcaaaaagaaagagattcaacaaatttaatctgtattaattagaccatatagtttacccaaagttccattcagcgcaaacatagggaccaatcctgagatgaacgtaaagaccagcttgttgtaccaccttgatgaacttaactagatcatatctgtcctcaaaataatactaaagcagaaataaaagttatagaattagttaaagaattcaaagttatagaattagttaaagaatcaaaagttatagctttgacttacttgtccaggagaaggttcatgcccattccagaaaacataagtctgtataacatccaaccctccatctttggctttttgtataaggtcaggccacatctatatataaaacatagcattcaggagatatttttataaatactttatcttatacaaagaaggaatttgtaatgaaatagtgtagactataagcaaaaccaagaaaactccatgtgcagaaaaactttggaaacaaagatccaataataacgcagaaaatatgcatagaattaaagaagaaaaaatgcatgaagattctgcttaaccacaaataaaagagatttaattgttttctatgtattgaagaaattgaagaatacctcaggtgtgcttcttgggtagtgaatggagccagagagaaggatccttctctgaccattgatgatcacagctttacgatcgtaagtgacaattgctttaactgaacaaatcaaagatgaacaacaaagaatccccagaagtatccatgccttttccctgaaatttaaccccatctttttccttatttgcaaacctttggatgttttttttttctttggtgtgtgtggagaaaagaagattccaccgaaaatgttatgtattgggtattattgggtttggagttatgaggttcttgaagctatttatagattaaggttgacacacatgtcatctcattattatactatcttaaggagtattagagtacttgcaccaaaatgagaacatttgggagagtaattaagaatataatcatggataaataacaatttataattctcctattgccaataatgattttgaattatggaagtattatttttgtctcattgtcatttacaaattttaatcggaagttagtgggacccagtttacttcatttgggcgggtgactttaaacccttggcttggtaccttgccagttaccagttgagtaatttgcaattttcctatttctttaagatccattttcccattttctaattttttttttcttgttgagtagttaaataaccaaacacacttagatatgaaatctatcaaatttcattaaaaaaatccaaattaaatatttgtctctaacatgtctgtttggtttcaagattgagtattacatcatatttagagagatgtaaaattaaagtatgtagattttcaacatactgatttcatattatgagatttatgttaacttatatgttaaaacatactgtatctattattcttgaacatttaatagaccataatgaatctttgaaaatggaatatattggaagttgtgtggtccgtgactctaagtagacaacatgtagaacaccatagtaaaagtcgatcgtgcaatgcatatttattgatgacaaactatatatattttcttatatgaatgtaaattatgttaataaattaaattttaggcaaactttaagaaatgttgcattgtttgtttgactgttaaatgttaaatatttaactcgttaggatattggattaatcaaatgtaggcctcgtgaactatagtaggatattgtgttaatctataattcaataattgaagtgatgaaatgaggtttagttgacacattggttcgttgataaagtcaagttgccgcatcttatgacttaacttcgttgactacaaagctttaccttcgacgcccactaaccattcaaagaatgccacctggctctattaaccaaatcttactaacacccccctatccaatcccccaacgttcaccaactaaccattgtgacagatataataataccgtgtacacttactttgttcataaaaaactatacatgtattttgaaaaacaaaacaaatcgcatgttaaagtgaagagttcgaaaagaaaaatcaaataagttggaaattcttttatcataaacctagattactgttatgaaattgcaattggaacgggagaaatatcaccttattatagcgtatcaaagtagttaggagcatacgaaaccttggattttcacaatacaaaaacaaacaaattggtttctaatgcttaatttgacgtctcctacgtttcgcgttctgtatgaaaagacagaggaaaggaggtcattgaacaaatctaaaatgaaataacaatgctctaactaatcataagttattctgctggacaagtgaaaagagagaagttttgtgttggtatagtgtgtcacactatcaacattgttgtaaattaaaacttggttaggtgctcgaaaaacgaatttaatctagttaaaagtaacttctgtcttaacattaaaaccaaaaaaaaagaaaaagtaaattctaaagacaaaatatattgtcccatactcccatttccacctttatcttttgtttcttctcttaatgggagaaaaaatgggaaaattatatgtttcaattcgaacaaacagatgcccttttaaaagcccagtttttttcagcccaataacaaaataatgggatagaagcaaacatggaccaaaccagatcattaaccaaaccgaaccaaacctggataaaattcggctgttctaaaccgttttcctttgtagacaacaagatagcgacggcgacgcatttattcttcagagattatcttctagggtttctagggtttgggtttgggtttggggacgtatatgcttgaccaccacataattaatatatatctatatatgcgtacgttgaagattagtctggactatatagctaagaaaatcttagaaaatccgatctaatgaatgaaaagtatatttgtgataatgatgcatgtaaagattagatgataatatcgaagaaaaagaaagttcacatcacacagatcaatatatgtcacaagacagattgatacggtggtgaagatcagagaggtaatggtcccttttgggaaattttattatatagaagaaaccaaaacaagagacaagtcatgaaaagtaccaaaatgttggacataaccccaatttcactgacattcacatatatagatatacatacagtctcatatgtatgtctaaatatgtgtcttgttcctctcaaagtgtcactagggtgagagaatttgtgatccctatgccgcatacgtatcccatctctctatcgtttatttttctcatgccacttctgtttttttcctaaatacatatctatctgatcggattcttacttcatttattgtgattcagattctgttctttgtgtatgtttccctcttgcccttagcattgtttcaatgggtgctactagggcttatagtagttgatggatacccgctgaaacggaccgcgcgcgagttaaataaagtattaagtttttttcctcttctgaaaattacatatgttacctttacttggtccataatcatacatctttgatcttacaataggcagcttttatgttcaattatatatgagagtttgtaagaaaagacatccaaaccaattcgcatggtcccttacttggttctgtcaaaagaaaggtctagagcctacgtttttgtatgtttgaacttcttttggtatacttctatgtagcttaatgtttggttattttctaaccattttgttaaaaagtaaaaaatattagttttggttataaaaatttgaacatgtggtggggctacgtacgtattagctgcgataattggatgtatgtgcataaagcaagttgtagctaaggaactttcaaaggtgatagatcctcccttttttcttttgtttgtttttgatccgtgtattgatttttagggtttttttatatatataaattcgtcatgggatcataattcacattgtaaaacagtaaagatgttgtctaactcatctattaagccctgatcaatctatataatgttattcttcgtttggatcaaacctcatccaccttcaccaaactttacttgaatcttgatgctcattaagcaagctttaatttataaagttttaaaatagtagagttacgaatttgcggtgaatcctaagtaataatcaatcattaagtctcatttgcacacaaaattaaacttcaaaagcacattgaaactatataactttttaaaacatttagtagctaaactcatgaaagtgaaaatgtagaaatgtagaaatacaacatatatataaactaaaaaatgtatgtggggggtcctgagtgacctgtaaaacttgatcagaaggaattgaatggttttggcgaatactaaggtggggatgttttcttcctttgccattctaaacctatcacttgtcttctctccctctcttccgctcaattatgattcccctctgtccaggactgctctctctctctctctctaagaatgattattgatgaatcacatgcgatagaaagatcaagtgttatgatacttatatagttatattatatataatactataatttgtgtgtggtcttttaacatatgattgatatacagtgtatgcaatagttaatcactaaactttaattttaatagaaaaatgaccgatcaacctcactgatcctgttttgaaggttcctgcatgtttttattttttatttgttgggtatttatcgaacagtcttctacctttgcaatgattaaccaataagacaacgactgatcaatgacgatagtgaatgaattcacgatggagttttgttacgtgatcaattaaacagatcttgaattcaaattacgtagctttatctttttaagaaagtaaaatcatgacatttaggatagagaattgctaaaattgatacaacaaccgtactgaaaagttatatcagatcatccagaggagccggttgcaacgcatcatttgatcattatcatgatatgtgtggctcttgttcaagtaattactattattatctacttgttatttgttatatggttgagtttctctcttttatagggtaacgaaatattacagataggattacttgtgttttggggtcgtccactaccattcctacactcattttgtctcatgtgtttgttttcagatgtactcacgtgaacctcttaatttattacttttggtttgtgttttcctccacagtttgacaagggcgataaatattttttattcacaaaataactatagataagttttagatctcagccgttgtagttcgaattaagcaaatttaaccagcagtgcactagtagttcaatcggttatctaaactttagtatagatctcagctgtctataatctatccgttaccattatctcttacaatctctaacgatatcattttttactagcaccaatattcagacagttgattgctcttcatcagtctctaaacatggccatataatccttgcgtaagtttatataacactggtctctgccctaaattttcgagggatccattttcctaaaaaagatttaattgtatagatttttgttagtgagcaagacacttgttaataatgctatgtactacatatatatgtatctttcaccaaatcagtttttcaaatttataaacataaaaagtaagaattgaacccccaaaaaaatacaagaagtaaatataactaaacttctattcttcttttttttttcttttttgttgaagaaatggtatttgtatttcttaatttgtttttctttttgcttaataacttcttttttatacattagatttttgatattgtatatatacatcaaacaagttaaataatggttttatccatattttctaaattctcctaattaactctactagagttaatatgtgtgtatatagtcacacatatacacaaacatttgtttctgctcgtggtctatatattgccttttaaaagggtcaaacatagtatagcttggatccttctttacttgtccctgatctctcctaatctctcgtcttccctctcttttgtgcttcatcgatctctatcggtcatgggttccaattttcattacacaatagatctcaatgaagatcaaaaccatcagccttttttcgcttctcttggatcctctcttcatcatcatctacaacaacaacaacaacaacaacaacattttcatcaccaagcttcttctaatccctcttctttgatgtcaccgtctctttcctactttcctttcttgataaactctcgccaagatcaagtatatgttgggtacaacaataacacttttcatgatgttcttgatacccatatctcccaacctctcgaggtataatttcaaatgaatttcatgtcaatatattaactcttgatccttatatatatggtttatattcatatggaaatttcagaccaagaactttgtatctgatggtggttcatcatcaagtgatcaaatggtgcccaagaaggagacacgactaaaattgacgataaagaagaaagataatcatcaagaccaaaccgatcttcctcaatccccaataaaagacatgacaggaactaactcgctcaagtggatatcttcgaaggtgagattaatgaagaagaaaaaggcgattattaccaccagcgacagcagcaaacaacacactaataacgaccaatcctcaaacctaagcaattcggaaagacagaatggttataacaacgattgcgtgattaggatttgctccgattgtaacacaaccaagactcctctttggagaagtggtccgagaggtcccaaggtattaatcacacgtctgttaattacacatatatgcgtaagcttttttttggttttaatgttaaaagtagatgcctaagtaatgtcatatatactcatattgattattagaagctcacgaagaatatgtctttttatagtactaattaatagcaaatgaaaagtaaatctacaaatctctaactggtaaaaacaatttcatgtagcattataagttggtttaaacagattaatctttgagatcttctaaaattcatgttacaagataattaactaaattatcatgttttttcttgttttgttattacagtctctttgtaacgcttgtggaataaggcaaaggaaggccaggcgggccgctatggccacggcaaccgcaaccgcagtctctggcgtatccccaccggtcatgaagaagaagatgcaaaacaagaacaagatatcaaatggagtttataaaatcttatctcctttgcccctaaaggtaaacacgtgtaagagaatgatcacactagaggagaccgcattagccgaggatttggagacccagagcaactccacgatgttatcatcttcagacaatatctatttcgatgatctagcattactgttgagcaaaagttcagcttatcagcaagttttccctcaagatgagaaggaggctgccattttactaatggctctatcgcacggaatggttcacgggtgattattttaagtattttaattataactcgcatgcttaagaaataaaatataaaccataccataagccctcatagctagtaatatctagattatttgatacatgaaattttgttgcggtgatatattaatttcagtcagtccaactttattataagagagtgttggggtttagtagattttgtatgaaaggcttgtattttattttttatggaacttgatatcccaacaatgtggttgttcttgttcattcgcatgttttttgtgtttctaagttttgagagttgatataagaattactttaatttgtcaagatctcgtcaagtgtttatacttgatgaaaatcttttggggatcaaaacggtttgaagtaaagatcgtactgtcgtactggtgtctgtagattgatattaaactcgaacaacatgattattgtaatataccttaactaccatataatttttttcaattctttctggatacaattgtaagaaaacagaaaaatcggaaaaatgagaaaattcaccaaaactaatggggttgttttgaaattagtttgatacttgaggattgacaaacgaattctacttttccggggaaagaattagagagcgaaacagaacaaaacaaacaaaaagtcatgtctccgacgacgacatcgttacgatccctaagcttctcgctttacgcttcttctaattctactccgatttctacaccaattgaggcccgacagttactgagttcatgcaatagattctacggtctgtcctcttcgagctcttcttcctcccttactacttcatctttgatcggaaatcttgttttctcatcaaggaatcagtctctctccgtaaaggtatacaatttcgtaaatttttgtgatggatttcaactttacggcctaaattcgagaacccatgttccacttattgagaaatctgcttaattcttatgtcacttgtagtcgattgggaaattagggatttctatatgtgccattgattgtgattactctttatgtggtctttttggtccatttgaagatgttttaagttaggtctctcagccacatagacgattacattagtcctgtgtttaagttcacactgtcttactttgattgaagctaggttgcgttaagggcttttaaataacatctaactttatgagtgtttggtgttgtcagtgtggctacatattgatgaaatgtatgtgtgttttgggataggtccaagcgttagctgctgaaaccgaacagccaaaatggtgggagaggaaagcagggccaaacatgattgacattacctcagctgagcagtttctcaacgcgttaaaagatgcgggagatagattagttatcgtagatttttacggaacttggtgtggttcttgccgtgcaatgttcccaaaggtaactttcccgttagctacttaacgattgtatctcttcgtgtatactcgatcatctctcatttcattcagttcgcgagtcttgaaccattatgtttcttaagcttgctcaaattatcggcttgcttattctaaagctgagactcttttcttattcttttccagctctgcaaaacggcgaaagaacaccctaacatcttgttccttaaagtaaactttgacgagaacaagtctctctgcaaaagcttaaacgtcaaggtgttaccgtatttccacttctaccgcggtgctgatggccaagtcgaatccttctcatgctctcttgccaaggttagttcttcttgtcccagctttctttaatttcaaacgtcacttgtctatcacgaaaccagagaatagttactgcattgtatagtcttgatggcgacctctaagtctaataagcgtctgcaaacatttatgcagttccagaaactgagagaggcgatagagagacacaatgtaggaagtatcagtaacatctcttcttcagcttctgagaaagttgaagattcaagtgaataatcaatgcctggttcagattgatcacagattattttgttaaatcgcttccctgtatatatgttgactgcattttccatgtggtgcatcataatttttgtacataaataaatgagtctgacttcgagttcatcgcctatcaagtatcagcttccctaaaccgagtaaaaccgggaagtgttgggtttcaaaattaacttggtgagttaacagttaacacacacatccaccgtttttagatagataagaggatgccctaataaaaccactgctttgtcttgggtaagaagaaacgttaacatgttagttgtcctacaaattcattcatctataaacgttaaagtctgtattaacgaatgaaagtaatcaaaagctacatatttattacacaaacaaaaatgcatcagttgcatctcgtctaagaaagcattttttcttcactcgaagaaaaataacaagaagttgaagccttaggctcacgagccaactcctttaacatgtcgagtttctaatccgagtaaaggatttgtatttcgtcgagaaagttgccgcttcttcaaatgtttggcatttgttaagttgcaacttgtctctcttcttcacgttgtccattgtatccttcccactggaatctttgtaggtggaataacaaacaaggaggaacagaaatcggtttgctaattggcgggttaatagttttgtaaaatggtagattaaacatgcgctctatcctgtaacatttctgagcttgagaacttgtagttgaggagaattcagtagcaaattcgttagtagcttccaccgctcgtttttcctagtattgtagctccaaatgtacatcattaatagatcatataaaagaaaattataatttcaaaaaaggctcaagttgaagtatccaacggtggtcaatttaagactataccaacgcctgtacttcaaaagtttctgcaagtattcattagcagtgacgaattcaaatttgaaaaaaaaaacttttatctgtaaattctccatccttaacggtcaaatttagtcgggcagcagacaaactctcaagtccgatcaggaaacgaaacgagaacaaaagaaaagagattggattttggtgacggcgtttccttcgccgtcgtgttcaccatgttcaagagagacgactacattcgaactaatcatgacccctttttttcaaagtggcaggtactctcgcatttcaagaaatttagagattctgggtttagggttttgctccatctttcattccgttgaaaaccctttcgagatcaacagaatttcgaatgaattctcttggaaatatctgcaatttttatttaaagatctaacttttaacgcctaccacacttttcttcaacgtttctttgttggatctctggagattctgagtaattccattgatgattcttgggtttctttcagggtttcgcccgatctatgtttctgcgtaaacccatttcagaaactgcagaattcgcaagacttttgcggactactccttaatttctcgagatttaggtccaaagccaaaggtcacatttttaatctctcttcatcacattgtaacttgtatctttgttggataactaggtggcttagtctcatgtttgtcatcaatataagctctttatcttacgtaatgaagttggaaaacacacatttttaaatgtcaaacttattacacttgaaaacagattctgataggagccaacgagaaggaaaatttcagagaagggaaagatcttgttggtagaaacagagtccaaggagccttccagggtctgtatgagctcagtcatgaccatggcagaaaagatgatgttcttgtggctaatcttggtcaacctgaaagcattagatcccggctccggtcttatagtagatcttttgctcatcatgacttgcttaagcagggtttgtctcaaactattcttcctactactcagaacaaaagtgacaaccaaaccgaagagaagaagtctgattctgaagaagagagagaggtcagttctgatgctgctgagaaggagagtaattcgcttccatctatacttagactcagtcggtctagacctcaaccggtttcagagaaacatgatgacatagttgatgagtctgattctgcttctgcttgtggagtcttactagaagatggtactacttgcactacaactccagtcaaaggaagaaagagatgcacagagcataaagggaagagactttctcgtgtttcccccgggatccacataccgtgtgaagttcctaccgtaagagaatgtgaagaaactgagaatatatgtggagtgattttacctgacatgatacgttgcagaagtaaacctgtttcaaggagaaaacgatgcgaggatcacaagggaatgagagttaacgccttcttttttctgctgaacccaacagaacgtgataaagccgtcaatgaggacaaatccaaacctgagacaagtacaggcatgaaccaagagggttcgggtcttttatgtgaagctacaacaaagaatggattgccttgtacaagaagtgctcctgagggcagcaaaagatgttggcagcacaaagataaaacattgaaccacggatcatctgaaaatgttcagtcagcaactgcaagtcaagtaatttgtggctttaagctgtacaatggatcagtatgcgagaaatctccagtgaaaggaaggaagagatgtgaggagcacaaggggatgagaatcacatcttgaattcaaagcagtggagtataactccttttgtaactacctaaccaaaatgttatgtatcgagccggtttggtattggtaaaatctgttgatttgccgtatcatacctttaactctagataataaggttgtatgaattaactaagtaggtgcaatttaatcgaaccgaatatgcatttctgtaagaagcagcttcgatgttctccatcaatgtcttgtctctgtaataaattttgttgctatctgccataatgtagaaaacaagctcactactcgtatgtgtagttgttcagcctatcaacttctgtcttctttctcatcaactttcaacattgatacacatttgttttaagtaagcatcactctagaacttaatggacctccttcttgttttttgccacatctgcttttgtctactagttctgttgtgttgcctttgacacttgaaaatcatctgcagaaccattctaagtcatagcaatctgaggggtcctgttactttaaggtcctgaacagaaatagtatgatgtgtatgcattgtttcaacctgcaagatagaactgggaaaatttcttctgcaatttgtctttttgagttaagaaaccgatgagcatgataaatattttgaaatcctgagaatcaacaatctgtgtctcagtatttcgtaaggtaagatacattggaaagtattcaacaaaaacgtataagcaattatgtgtttacatagagaggtcctagagttttcaattgggattctgacactgtttatatggaggagtgttagcttcagtttcctctaccaaaaaatggaatgtacaatctagtataataatatgtggttttaaacaccacaaagaatcagatcatatggttgatcttagtattaggtgaaaactttcctttttcgtgtcgtcacagcttctgcctcaggttcctctcgaggcgggactcttaagtgcagcttcataatatcatacactgtgaatccgattgccacagacggtacaacctaaagaaacccgaaaggaaaagtgtttgtaacttggttgttcattgtccgaaaacaaagatagatcgatgaaactagtctcaaaccttaaggtaattgatgctaagccctgagaagagttgcttccaaccttcttctcttgcaatcttgaaaagggtttgcattgttcctcttcttgtttcttccttaacggctgaatatagtctctcaacctgcagggagtttcggttataatactactcaggatcattttatgaagattcaaggatgtcttcgattcgatagaagaagaaccagatcaaacctgcatttgtctccggacaacatcgagagggtatgttaaagtctgaccaagcaatccagcgactgacccacaaacgagtttcagggaaatgtcttgcttatgttccggagggacatgacgtttcatctcctcgtagaagtagaacttcaaaccagcataagggaagatcccatagagagaaggagctgatacacaagcaaccaaagaaagatcaattttttattgagtcttagagaaggagaagatctataacaaatccaaagaaatggttagtaatgtacctacaccacgatataggcctcgggctccagattctctgtatgtcctcgagaaacaatctacaattcctctgtatatgatttgttccacgggaatagcttttacttgcgtctttgctgaaccaacaacctgcactgctgaactctctatgagcctactaattatgtattatctcgagatgagacataaaaacacaagatctgaagcagcttacctgataagcgagcttagtccggaccaggtcaagaggataggtgaagagaaccgcagtaccaccagcaaatgatccagctacgagatcaagcaatgggcctcgagtagtgtctgggaaaccaaagataatccatctcctgtattcctcataagccatgtaatgaagagctgcatagggaactatccgagcaacacttgcaccattccctctgttcacaaaccaaaacgaaagttacagaatcatctgactgaactagatcccaaaacgcatctaacactaaagacaaacgtacctgtagaaacccatcaaaccttcagttttgccaatcttgttgattgatccaacaagtcctatccttttaaactcatcccttctggtctgacaaaagatcaatacatgatcatgagcttctataatccagcaattgtgtaaccaattcagaatacaaacactaaaagctttctaatttcgatgcttgaatttgagtacatgactcagagtcagaggacaaatcaatcttagttctggtaatctagaatcaatacccataatgattgttggtacctggaaaagaatcttaattcgctcgagtggagcaacggcggttttagctataccacccgtgacgccgccggcaataagctccttagcgaataaaggaatcgaatcaataattccgttcttctcttcaccctccgccatggaaatagaagtggagagagaaaagatagatacggtttaatggatcttcttcttctccttttaccaatctttgtacagttgaagctgaagctcaatgaaggaagaagaagaagaagatattaaaattgagagagcgaaaaaacgaattgttcttttgtgatcaatcaaaagacttggtttctgtctgattctcaccttctcctccaagttatgcaaatattattctccattaattagtggaagttaattaattagtatgattttaattttaatttctgctttcgctttattttatttgtcttgaagattcgaagttaggttcctttttaaatgtgacgattagactctgaattgataatgtatttttgaacgagtaaacaatcaacgacaaattacaaatctgaatctaaaaatgtatcgacgctggtctcttcgaaacacgagatacaatatcaattaagatgtaaagtgagctgaattacacttccaacaggaacttcatctgtgtgtgcatcaacacttgcttgttgtgagctctagagagtcgacagcatttacataacagtaaaaactcctgttgaggaattacttatgtgcttcgacggccttagagtaaaactcccatgactcgtgtgtctcagttatggcagtttgaccgaatggattctccgctacaaacttctgaacgttctccgcatccgctaatctttctagatacttccttagctcaccctcaggccctgtctcaagaaataaaacatcagtgtgctattatgcttaccattttattgaaagagaatgatgagtgatttaagactaacccaatgcagaatcttgacggtttgtgtactggtacgggctagggaagattccagtgtgtggctaaaagagaggaagagcaataccaacggatgttgaggttaaaagtgacacattcaatgcataagcctattcaaaggtgctcgagtacacttacaggattacacaaggccttgtcgggtgaatcgtcaactagcaaagtgtttgtctcatcatactttcgctttccacaactgatgcatgtcccaatatggtcccatactcttcgtaggtccttgaggaacaaaggtttatccttcttctcctgagttttaaacttcgttgtagtgcatatattctgatcctgtgtccataagattcattagctagctggtttttggaccaactattagaatgagttctgctcatacgtaagctacatatctcatagtcaaagaaatgcaaagttcacaaagattgtagactgtgtttctacaatctcaatctcaactgcatttctcataatacagtccttctcatataggaactgcatttctcataatctactctcaaagtcaagaaaatagctcatagaggttgcagggatcacttacaaaacagaacaacagattcctcgcatggtttttcatgacaatgttgatcatataatccaacccactagtaagagaaaaaggagagacagagttaattgaggaattaaacttcgtatatgtataagacacctaactaagaagagtcaaagacaatgcattttgggttttgaatcagttcaagaagctcacacacgtctggaagaccatatcgcaacatcaaatctctcaaagcaaaagtcgagaaaactaggaagaaaaggcctcctgaagactataaaaggacaaagaaattactctgcagtaaaagaaacataaaacaacttacaagtagcgacgttgaaattgattctttcttacctgatctgtatgatactttaccatctggaagaaatgtacctgtaaaaccctgaacaatatctgcaaggattccatttaaatcaaatataaccaactttctggtacgttgagctttacatgtgcatctaggtacatctccagtttctgatgaaataactccttgagctacgttatcattttgtattaagacagaacttgacaatgacgtttcaagcttttccctgtcaaattctggttcttcatctttcctaggtaatgaaacatcatccttcccctccatatcatcagttttatgatctaaagaattttttttcctcttgctcttctttgttttgacctcaaccttgctaacaccttctgctcccaaatcattctgatcaacttcttcctttttttcatttttctttatactatcctcctccatattgtcagttttatgatctaacaaatttttcttcttcttgcttttctttgttgtcacctcaaccgtactaacaccttctgctcccttggcatcctgatcaacttctccctttctatcctttttcctttttttggtatttttatcatcttgaacgctttcccccttagttgcagaatcttcaatgttactagccaaatccttactggcaatctccccatcagcattcccttcataatttttcacaccttctccattcgattgatacaacaaagactgtactgactcactatccatggtggcaactgattcgcagtttgttttgttttttatcttcctcttctctcttttgtgaccatcatcactaacaccttctgcgtcgagtgcatcctgattagattcaatatttttatcttttgtcatttctttacgttttccagatttctgaactccacttttctctctcgttgcagatttttcaattttaattgtcatatcctctcccccgaactcttgtccagcattcccatcaaaattttgcatgtctttttcgtttgactgattcaacaaacactctactgatcctgatggctcaaagacctccatatctgcagatgaagttttcttcttctttcccttccgttttttgctccttacatcacatacacctgctccaagaacgtcctctttaacttcagtgttttcatctgtttccttctctttagtttttccgagattctgaataccgttttcctccccatttacataattttccgtctgacttgccgaataactaattaactctcggccaccattcccatcattattttccacacgctctactggcccgcttttcatggaggtagacaaagtatttcctaatgggtcacacacctctattgtttcggtctttctcttctttcttctcttggctttaggatcctgagtttgggccacagtttcactgatgttgacatctgtgcactctttttgttccactgtatcatccttggatttcagacaactacttatcacaacactagcaacagatttttcctctttagtcgtcgattttgatccttcagcttcagaaatagtatcgtatttaacttcacgaacgtcctctttaacttcagtgtttccatctttttccttattcccatcattattttccacacactctactggcccgctttccgtggaggtcggcagagtatttcctaatggatcacaggcctccattgttttggtttttttcttcttccttttcttggctttagtactctgagtttggaagacagtttcattgatttgaacatctgtgccatctagttgttccactgtatcaaccttggatttcagacaaccatttatcaaaacactagcaacggagttttcctctatactcatcgatcttgatccttcagcttcagtagtagtattgtcagttacagcaacctctgcattggtgctaccaatatcaacaccactttctttcagtacatttctatccctccttttgtttctctttcttttcgaggaactagtcatattagtagcatctggcagtgaatctttgcaggttgacagatttgggtctgtacaaatttgtgccgctccaggcttctcacatgaatcctgagttagttcacctgacctttcttgtaccataccgtttgacaaaggattgttgggtggatgcacttggtcttcgctggtgattttttcaacttcatccaacaatttctcttcacaggacaagtcctctttcttcttcttcttctctctcctttttgatttttttgtactagaacccttcctattatcatctggtagagaatcttcacatgagattgggtctgtatgatgtagtgtagctctaggctcttcacatgagactgaatctcgttgacaggactctgcaggtaatgaagacaaaagattctcggataaccgaacttgactttcactagtggatttctcattttccccttcttttttttcttgagatgaaaaggcctcatctgcgttcccaatttggctactgatatgagaatcattatccttcacctcattatccagtttcctcgattttctcttctttttccccgatctcttcttatgcttatcaatcaattctggattcgtttgaccgtcatttgagtttccagtttctgaaagtgtttccactgaaacactctccattactcctttaatttagtcggaaatcagctgcagttcaaaactatcaagggaaacgttttctcaagtttagcacaagtgaagtgatgattcacaaagaacggataaattaagatgcctcacataaatccatcaaacggtagctctagaaaacccaacacggagctcttaagtgattggaaactgagcaatagagactatgtattaaatgtgaatcaaacaattccaaccaaagaagcagccatccagaaaattatgcactttctaataccattgttcgtgaaatgatgattggcagtgttcttattcactaaaacaccaaaacgcttcttaacaaaaaccattaacaagagaaaaacgaaaaactgccagattcaatcgagctgaggatattccacataaatgatggcaaccttaaaaccagaagttttagtaactgggtcacatcttaaatctgaatttgaaaaacaaaaatcaccctcgaagaagagacggacatgtcaaggtatcaaccgaaattagagcacagggcactgtctcaaaaccgaccaggagatttctcaggctacgcttaatacaaatagaaggagaagaagaagaagaaaaagatgagattacctggaagttttcaaattgacgaagagtatctctgtgaaggagacgaagaggcgcggcgaattc

SEQ ID NO: 630 - DNA, 89904 bp, Arabidopsis thaliana
aagcgttagctgctgaaaccgaacagccaaaatggtgggagaggaaagcagggccaaacatgattgacattacctcagctgagcagtttctcaacgcgttaaaagatgcgggagatagattagttatcgtagatttttacggaacttggtgtggttcttgccgtgcaatgttcccaaaggtaactttcccgttagctacttaacgattgtatctcttcgtgtatactcgatcatctctcatttcattcagttcgcgagtcttgaaccattatgtttcttaagcttgctcaaattatcggcttgcttattctaaagctgagactcttttcttattcttttccagctctgcaaaacggcgaaagaacaccctaacatcttgttccttaaagtaaactttgacgagaacaagtctctctgcaaaagcttaaacgtcaaggtgttaccgtatttccacttctaccgcggtgctgatggccaagtcgaatccttctcatgctctcttgccaaggttagttcttcttgtcccagctttctttaatttcaaacgtcacttgtctatcacgaaaccagagaatagttactgcattgtatagtcttgatggcgacctctaagtctaataagcgtctgcaaacatttatgcagttccagaaactgagagaggcgatagagagacacaatgtaggaagtatcagtaacatctcttcttcagcttctgagaaagttgaagattcaagtgaataatcaatgcctggttcagattgatcacagattattttgttaaatcgcttccctgtatatatgttgactgcattttccatgtggtgcatcataatttttgtacataaataaatgagtctgacttcgagttcatcgcctatcaagtatcagcttccctaaaccgagtaaaaccgggaagtgttgggtttcaaaattaacttggtgagttaacagttaacacacacatccaccgtttttagatagataagaggatgccctaataaaaccactgctttgtcttgggtaagaagaaacgttaacatgttagttgtcctacaaattcattcatctataaacgttaaagtctgtattaacgaatgaaagtaatcaaaagctacatatttattacacaaacaaaaatgcatcagttgcatctcgtctaagaaagcattttttcttcactcgaagaaaaataacaagaagttgaagccttaggctcacgagccaactcctttaacatgtcgagtttctaatccgagtaaaggatttgtatttcgtcgagaaagttgccgcttcttcaaatgtttggcatttgttaagttgcaacttgtctctcttcttcacgttgtccattgtatccttcccactggaatctttgtaggtggaataacaaacaaggaggaacagaaatcggtttgctaattggcgggttaatagttttgtaaaatggtagattaaacatgcgctctatcctgtaacatttctgagcttgagaacttgtagttgaggagaattcagtagcaaattcgttagtagcttccaccgctcgtttttcctagtattgtagctccaaatgtacatcattaatagatcatataaaagaaaattataatttcaaaaaaggctcaagttgaagtatccaacggtggtcaatttaagactataccaacgcctgtacttcaaaagtttctgcaagtattcattagcagtgacgaattcaaatttgaaaaaaaaaacttttatctgtaaattctccatccttaacggtcaaatttagtcgggcagcagacaaactctcaagtccgatcaggaaacgaaacgagaacaaaagaaaagagattggattttggtgacggcgtttccttcgccgtcgtgttcaccatgttcaagagagacgactacattcgaactaatcatgacccctttttttcaaagtggcaggtactctcgcatttcaagaaatttagagattctgggtttagggttttgctccatctttcattccgttgaaaaccctttcgagatcaacagaatttcgaatgaattctcttggaaatatctgcaatttttatttaaagatctaacttttaacgcctaccacacttttcttcaacgtttctttgttggatctctggagattctgagtaattccattgatgattcttgggtttctttcagggtttcgcccgatctatgtttctgcgtaaacccatttcagaaactgcagaattcgcaagacttttgcggactactccttaatttctcgagatttaggtccaaagccaaaggtcacatttttaatctctcttcatcacattgtaacttgtatctttgttggataactaggtggcttagtctcatgtttgtcatcaatataagctctttatcttacgtaatgaagttggaaaacacacatttttaaatgtcaaacttattacacttgaaaacagattctgataggagccaacgagaaggaaaatttcagagaagggaaagatcttgttggtagaaacagagtccaaggagccttccagggtctgtatgagctcagtcatgaccatggcagaaaagatgatgttcttgtggctaatcttggtcaacctgaaagcattagatcccggctccggtcttatagtagatcttttgctcatcatgacttgcttaagcagggtttgtctcaaactattcttcctactactcagaacaaaagtgacaaccaaaccgaagagaagaagtctgattctgaagaagagagagaggtcagttctgatgctgctgagaaggagagtaattcgcttccatctatacttagactcagtcggtctagacctcaaccggtttcagagaaacatgatgacatagttgatgagtctgattctgcttctgcttgtggagtcttactagaagatggtactacttgcactacaactccagtcaaaggaagaaagagatgcacagagcataaagggaagagactttctcgtgtttcccccgggatccacataccgtgtgaagttcctaccgtaagagaatgtgaagaaactgagaatatatgtggagtgattttacctgacatgatacgttgcagaagtaaacctgtttcaaggagaaaacgatgcgaggatcacaagggaatgagagttaacgccttcttttttctgctgaacccaacagaacgtgataaagccgtcaatgaggacaaatccaaacctgagacaagtacaggcatgaaccaagagggttcgggtcttttatgtgaagctacaacaaagaatggattgccttgtacaagaagtgctcctgagggcagcaaaagatgttggcagcacaaagataaaacattgaaccacggatcatctgaaaatgttcagtcagcaactgcaagtcaagtaatttgtggctttaagctgtacaatggatcagtatgcgagaaatctccagtgaaaggaaggaagagatgtgaggagcacaaggggatgagaatcacatcttgaattcaaagcagtggagtataactccttttgtaactacctaaccaaaatgttatgtatcgagccggtttggtattggtaaaatctgttgatttgccgtatcatacctttaactctagataataaggttgtatgaattaactaagtaggtgcaatttaatcgaaccgaatatgcatttctgtaagaagcagcttcgatgttctccatcaatgtcttgtctctgtaataaattttgttgctatctgccataatgtagaaaacaagctcactactcgtatgtgtagttgttcagcctatcaacttctgtcttctttctcatcaactttcaacattgatacacatttgttttaagtaagcatcactctagaacttaatggacctccttcttgttttttgccacatctgcttttgtctactagttctgttgtgttgcctttgacacttgaaaatcatctgcagaaccattctaagtcatagcaatctgaggggtcctgttactttaaggtcctgaacagaaatagtatgatgtgtatgcattgtttcaacctgcaagatagaactgggaaaatttcttctgcaatttgtctttttgagttaagaaaccgatgagcatgataaatattttgaaatcctgagaatcaacaatctgtgtctcagtatttcgtaaggtaagatacattggaaagtattcaacaaaaacgtataagcaattatgtgtttacatagagaggtcctagagttttcaattgggattctgacactgtttatatggaggagtgttagcttcagtttcctctaccaaaaaatggaatgtacaatctagtataataatatgtggttttaaacaccacaaagaatcagatcatatggttgatcttagtattaggtgaaaactttcctttttcgtgtcgtcacagcttctgcctcaggttcctctcgaggcgggactcttaagtgcagcttcataatatcatacactgtgaatccgattgccacagacggtacaacctaaagaaacccgaaaggaaaagtgtttgtaacttggttgttcattgtccgaaaacaaagatagatcgatgaaactagtctcaaaccttaaggtaattgatgctaagccctgagaagagttgcttccaaccttcttctcttgcaatcttgaaaagggtttgcattgttcctcttcttgtttcttccttaacggctgaatatagtctctcaacctgcagggagtttcggttataatactactcaggatcattttatgaagattcaaggatgtcttcgattcgatagaagaagaaccagatcaaacctgcatttgtctccggacaacatcgagagggtatgttaaagtctgaccaagcaatccagcgactgacccacaaacgagtttcagggaaatgtcttgcttatgttccggagggacatgacgtttcatctcctcgtagaagtagaacttcaaaccagcataagggaagatcccatagagagaaggagctgatacacaagcaaccaaagaaagatcaattttttattgagtcttagagaaggagaagatctataacaaatccaaagaaatggttagtaatgtacctacaccacgatataggcctcgggctccagattctctgtatgtcctcgagaaacaatctacaattcctctgtatatgatttgttccacgggaatagcttttacttgcgtctttgctgaaccaacaacctgcactgctgaactctctatgagcctactaattatgtattatctcgagatgagacataaaaacacaagatctgaagcagcttacctgataagcgagcttagtccggaccaggtcaagaggataggtgaagagaaccgcagtaccaccagcaaatgatccagctacgagatcaagcaatgggcctcgagtagtgtctgggaaaccaaagataatccatctcctgtattcctcataagccatgtaatgaagagctgcatagggaactatccgagcaacacttgcaccattccctctgttcacaaaccaaaacgaaagttacagaatcatctgactgaactagatcccaaaacgcatctaacactaaagacaaacgtacctgtagaaacccatcaaaccttcagttttgccaatcttgttgattgatccaacaagtcctatccttttaaactcatcccttctggtctgacaaaagatcaatacatgatcatgagcttctataatccagcaattgtgtaaccaattcagaatacaaacactaaaagctttctaatttcgatgcttgaatttgagtacatgactcagagtcagaggacaaatcaatcttagttctggtaatctagaatcaatacccataatgattgttggtacctggaaaagaatcttaattcgctcgagtggagcaacggcggttttagctataccacccgtgacgccgccggcaataagctccttagcgaataaaggaatcgaatcaataattccgttcttctcttcaccctccgccatggaaatagaagtggagagagaaaagatagatacggtttaatggatcttcttcttctccttttaccaatctttgtacagttgaagctgaagctcaatgaaggaagaagaagaagaagatattaaaattgagagagcgaaaaaacgaattgttcttttgtgatcaatcaaaagacttggtttctgtctgattctcaccttctcctccaagttatgcaaatattattctccattaattagtggaagttaattaattagtatgattttaattttaatttctgctttcgctttattttatttgtcttgaagattcgaagttaggttcctttttaaatgtgacgattagactctgaattgataatgtatttttgaacgagtaaacaatcaacgacaaattacaaatctgaatctaaaaatgtatcgacgctggtctcttcgaaacacgagatacaatatcaattaagatgtaaagtgagctgaattacacttccaacaggaacttcatctgtgtgtgcatcaacacttgcttgttgtgagctctagagagtcgacagcatttacataacagtaaaaactcctgttgaggaattacttatgtgcttcgacggccttagagtaaaactcccatgactcgtgtgtctcagttatggcagtttgaccgaatggattctccgctacaaacttctgaacgttctccgcatccgctaatctttctagatacttccttagctcaccctcaggccctgtctcaagaaataaaacatcagtgtgctattatgcttaccattttattgaaagagaatgatgagtgatttaagactaacccaatgcagaatcttgacggtttgtgtactggtacgggctagggaagattccagtgtgtggctaaaagagaggaagagcaataccaacggatgttgaggttaaaagtgacacattcaatgcataagcctattcaaaggtgctcgagtacacttacaggattacacaaggccttgtcgggtgaatcgtcaactagcaaagtgtttgtctcatcatactttcgctttccacaactgatgcatgtcccaatatggtcccatactcttcgtaggtccttgaggaacaaaggtttatccttcttctcctgagttttaaacttcgttgtagtgcatatattctgatcctgtgtccataagattcattagctagctggtttttggaccaactattagaatgagttctgctcatacgtaagctacatatctcatagtcaaagaaatgcaaagttcacaaagattgtagactgtgtttctacaatctcaatctcaactgcatttctcataatacagtccttctcatataggaactgcatttctcataatctactctcaaagtcaagaaaatagctcatagaggttgcagggatcacttacaaaacagaacaacagattcctcgcatggtttttcatgacaatgttgatcatataatccaacccactagtaagagaaaaaggagagacagagttaattgaggaattaaacttcgtatatgtataagacacctaactaagaagagtcaaagacaatgcattttgggttttgaatcagttcaagaagctcacacacgtctggaagaccatatcgcaacatcaaatctctcaaagcaaaagtcgagaaaactaggaagaaaaggcctcctgaagactataaaaggacaaagaaattactctgcagtaaaagaaacataaaacaacttacaagtagcgacgttgaaattgattctttcttacctgatctgtatgatactttaccatctggaagaaatgtacctgtaaaaccctgaacaatatctgcaaggattccatttaaatcaaatataaccaactttctggtacgttgagctttacatgtgcatctaggtacatctccagtttctgatgaaataactccttgagctacgttatcattttgtattaagacagaacttgacaatgacgtttcaagcttttccctgtcaaattctggttcttcatctttcctaggtaatgaaacatcatccttcccctccatatcatcagttttatgatctaaagaattttttttcctcttgctcttctttgttttgacctcaaccttgctaacaccttctgctcccaaatcattctgatcaacttcttcctttttttcatttttctttatactatcctcctccatattgtcagttttatgatctaacaaatttttcttcttcttgcttttctttgttgtcacctcaaccgtactaacaccttctgctcccttggcatcctgatcaacttctccctttctatcctttttcctttttttggtatttttatcatcttgaacgctttcccccttagttgcagaatcttcaatgttactagccaaatccttactggcaatctccccatcagcattcccttcataatttttcacaccttctccattcgattgatacaacaaagactgtactgactcactatccatggtggcaactgattcgcagtttgttttgttttttatcttcctcttctctcttttgtgaccatcatcactaacaccttctgcgtcgagtgcatcctgattagattcaatatttttatcttttgtcatttctttacgttttccagatttctgaactccacttttctctctcgttgcagatttttcaattttaattgtcatatcctctcccccgaactcttgtccagcattcccatcaaaattttgcatgtctttttcgtttgactgattcaacaaacactctactgatcctgatggctcaaagacctccatatctgcagatgaagttttcttcttctttcccttccgttttttgctccttacatcacatacacctgctccaagaacgtcctctttaacttcagtgttttcatctgtttccttctctttagtttttccgagattctgaataccgttttcctccccatttacataattttccgtctgacttgccgaataactaattaactctcggccaccattcccatcattattttccacacgctctactggcccgcttttcatggaggtagacaaagtatttcctaatgggtcacacacctctattgtttcggtctttctcttctttcttctcttggctttaggatcctgagtttgggccacagtttcactgatgttgacatctgtgcactctttttgttccactgtatcatccttggatttcagacaactacttatcacaacactagcaacagatttttcctctttagtcgtcgattttgatccttcagcttcagaaatagtatcgtatttaacttcacgaacgtcctctttaacttcagtgtttccatctttttccttattcccatcattattttccacacactctactggcccgctttccgtggaggtcggcagagtatttcctaatggatcacaggcctccattgttttggtttttttcttcttccttttcttggctttagtactctgagtttggaagacagtttcattgatttgaacatctgtgccatctagttgttccactgtatcaaccttggatttcagacaaccatttatcaaaacactagcaacggagttttcctctatactcatcgatcttgatccttcagcttcagtagtagtattgtcagttacagcaacctctgcattggtgctaccaatatcaacaccactttctttcagtacatttctatccctccttttgtttctctttcttttcgaggaactagtcatattagtagcatctggcagtgaatctttgcaggttgacagatttgggtctgtacaaatttgtgccgctccaggcttctcacatgaatcctgagttagttcacctgacctttcttgtaccataccgtttgacaaaggattgttgggtggatgcacttggtcttcgctggtgattttttcaacttcatccaacaatttctcttcacaggacaagtcctctttcttcttcttcttctctctcctttttgatttttttgtactagaacccttcctattatcatctggtagagaatcttcacatgagattgggtctgtatgatgtagtgtagctctaggctcttcacatgagactgaatctcgttgacaggactctgcaggtaatgaagacaaaagattctcggataaccgaacttgactttcactagtggatttctcattttccccttcttttttttcttgagatgaaaaggcctcatctgcgttcccaatttggctactgatatgagaatcattatccttcacctcattatccagtttcctcgattttctcttctttttccccgatctcttcttatgcttatcaatcaattctggattcgtttgaccgtcatttgagtttccagtttctgaaagtgtttccactgaaacactctccattactcctttaatttagtcggaaatcagctgcagttcaaaactatcaagggaaacgttttctcaagtttagcacaagtgaagtgatgattcacaaagaacggataaattaagatgcctcacataaatccatcaaacggtagctctagaaaacccaacacggagctcttaagtgattggaaactgagcaatagagactatgtattaaatgtgaatcaaacaattccaaccaaagaagcagccatccagaaaattatgcactttctaataccattgttcgtgaaatgatgattggcagtgttcttattcactaaaacaccaaaacgcttcttaacaaaaaccattaacaagagaaaaacgaaaaactgccagattcaatcgagctgaggatattccacataaatgatggcaaccttaaaaccagaagttttagtaactgggtcacatcttaaatctgaatttgaaaaacaaaaatcaccctcgaagaagagacggacatgtcaaggtatcaaccgaaattagagcacagggcactgtctcaaaaccgaccaggagatttctcaggctacgcttaatacaaatagaaggagaagaagaagaagaaaaagatgagattacctggaagttttcaaattgacgaagagtatctctgtgaaggagacgaagaggcgcggcgaattcgatagcaagggttaactgaatcttcgtttgtgttaaaacttccggtttatattgaaaaccaaaacattatcaataaccattcaggtttacaagcatgactccaaataaccaggttttttggtttgtgaatcacaactgaaatgttttaatttaaacccaactaattaggcccatatatgtggcccatttatatatctattttgattctgttcatcaaatcaagaaatttactcatcatattgatcatcaaaattcaaagtcatactaaagttcgtgactcacgtttaattcatacaagtaaatggtacttttttttttttttgtaaacgaagcatgcaaaaaatgatttaagaactgcaaagtactagttttatctttttgtaaccgtcaaagttttggatttaagctccttgcatctctttgaccaataaaacccatactgtatatttgactaaaagagagacccctgaagattttgatcagtgttgtgttctcaagtctatagattattgctttcgagtcttcagtaaatctgtaaaagaaaggtagcaacataccttatctctatatagaaatgctccaaaaccaaaacacatgttttctttaagtatcacaatgggtttattgtataactcggtatttgaaattatctgccaataaacctgtaaagcaacttgaactttatagaaaaaaactaagttgcacgcgtagcaacaatttccatctatcacatgctttatctgcatttgtacaataagcacattttaacacaattgggcaaattggagctaatcataacggcttggtgttcttaaactacttgacacagctaattgtaacgttttggtgattcttctcatttctaaagctttatatcaatctaattaatcgttcaataaaagttaattgctcaatcagtgagtagattatacatacatacgtgagaatagactgactgtcgtattttaccttcttacacgaaagtgtttgtttttctttcgttcgtatttttttatttatattttgggcatgagaatcagtgtccaagtggaagctattagctatgttggttgataattcattttgtatatgtgcaaatgtaaagcttcatatatatgtgacccattcatgcattattcagcaatgattgaagattgtaataaagtgtactccttaattataagatattattacaaaatttacaacttgaccatactccatgtgtgtttttaattctcgaggcacttttgtgttcttgattatatttacaactaatcaacaattattatacagccatttatacatataaaaaaacacagccatatctgtcgaaaaattaatgaagtccccaattgtatatacaaatccatttttcacaagttccaacaccatatatatgatgagtataataattctaatcaattgcttcagtttggactgataatgcaagtgttaacatcaaattttatgttggaaaccctatactaagaagggaactattaatgatttggcttctctaattgttttggttagcaaacatgcagtactatacataattgtagcaaagcaatgacacatcaagaacacgaacacaaaccactatttgctgctctaagtttatttctcttcatattgatatcaaaatggagaacaaactttagtatacaatcattagttttccgtgtgcgtgtgtgtgtatacagatcaatcaccatactaaataatatttaatcgtataccaataaacgagttaccaaatacgtatttcaaactttgcatttatatattggcatttttaatttcttaattcttgaattcaatgagaacccaaaacaatagtagtacagtataatattgcaaaacgcgttatgacatgcaagaatatttcaaacgtgtttgtacgaacacgttgccgtactctgcaacacaagttctccactgccagtgttactttatcttctcaagtattaatttgtttttgttatgttttctgccagtgaattactttatcttctcaagtattaatttgttttttgttatgtttttctatatatatagttatatactgccaattactatatatttttattaattagtttaatttttttattatcttcaaaattaaataaataattattattttaatgtagggattttaatgtgtaaggattaagagcatccacaatagtggactcttagtaaaactctaaacaaataataaatattttatatgatttaaatattagataagtctcttaaatttgaagaaaattagatcaattgtcttaagagacaattgatctaattttcttcaaatttaagagacacatcattaaaatatattatttatctatacttatacttgtaagttagttaagaaacccatgtttagagacttccattgaggatggtctaagggtatttcataagctcatgtgaataaaatatatatacatgctcgtctctagtataataactcaatactcttcaagtgaaacaaaaacatatgtacagttcctgtcttataatttatatttctcaccatatggtaggaaaatatgtacgtcttctcaaaatttctatggtatatcgtaaattggtaatataattgaaattacccatgaatacttaagcttattagatatttatattattctatatgcatgtgaagccaaaatttgccttttcgctaaacaaatttaggcacattatattgctccaacataatatattattgttaatccttctcctaactatgaacagttaagggagaaatcaagaacctctttaaataaatacaagttcatgaatacataaaaatatttctatctagccaagtttatgtgttcacacgctggtcacgctcgcgccaaatgataaggctcgtatgattattatccatgccaaagtcgagataattctttacttcttcccgttaattaatgagtattttaaaagcaattttaatcattttgaaattatacgttttgaactgacgatatgcataaatagaccatgaagtgtaggtcgacgtaaaaaaaaaaaaaaactctacactgcatgcatatcctaacaaaaaatgtttacgttttacttctaaaacattttaaatcacaaaagtattaggttattcataaacttctcggatatcaatctttaaaataaataataaataaaaaaatctcgaatatcaatatcgctaaaaaaaagaaaaaaaaagaaaaaaaaaaaaagctaggagtcgccgcattattgataaagatatagcaaactatatacggtggaatcagaaggtttggttggaaggatatatgatacgacttaccaactgaagatgtttagttaatctatttctgacaaatgacaagaagagtgaaacatgtatctcgtggcctcttttcattggtctcatgagactgtggaagatacgacttttcacaaaatcatttataaaaaatatttttgctgacagcaaatcattagggattaggatcatcatacttctcagtttggttgctagttgctacaattatctcatggttttgtcttgatctttttatttcttttgactggttatgaatgcttttaaacgagtaatggacaccgtaccctctagtagtgaaattgttaacatgttaaaaactatattaattatatatgtagtatactagtatgtcagtgcgattttagcaaagtcgatatatataccttttcgtttgattgtacactcaacaaattatgtaaatccttataaccgggaacgtaacctatatcaaagcaagaacaaccaagttaaaaccaatcctcggaattaaacaaaaacaaattggaatcttcttggtataatttatttccttctaagatgtcattacctaacgcactatatgatttgcctaagaaataagtattctcaattgcttgataatgaaatatcctccaattgctggtatatcaacctttcggatatagttaccatgtgtaacaatctattgtctatggctcgagctaaacacttgcattcatgtagctcatccccaactccttgaaagtgggacctctggaaacctagctataaatcacgttaaaaatcttcttaaaacaacttttagaattagcatatgatacagtattgacctactgtacaatgggtttcaatgtatgtgtaagtgaatgacaagaaatatcagtagaacttatagttttcttaaaaaagctttacttaagctgtgtaagtactttttaaagtaggtgcattggttatctaatgaaaatagtccaatggtcgaaaataaatagacactccacacacattaattagtgaaatccacatattacgaacaatagtttataacattaacagaaaaagttcatagactcatagctatataactagataatatacttaattaataacaaagattatagatcgcaatatcgtttgatgcatgtctcgtatattttcatgaaggtgctctcctaattagccgcacaaacagtccccaaactccacttctctttcacgttctctattacaacttgcttctttgtttattttaaatttatactaaaatagtcgagctattagtatttaaattagtacatacatcaatgattgctccgtaagatatcatgaacttcttcttgaagatttcgtgttagaattagtaattgattgcaatttcttatacacttatgagaaccaatcaatcaattggtgactaaatttgattctatgttcctatgaaagtacacaaaattgtaaacaatccattggattgtcacgtttgtcgaagacataatccagcatgatttgaagccaatctatgacattaaactagaagaaatcaaccaattcattaactccccaaaaagcttgcatctaacatgtttgttttcaaaacttaacaaacaattaatgtgtaaataaatcacgtttctaaatgtggatcgttacaatgtctttcgaggatgatatagatcatttaattcaacttagaaaatgataatttttcactctgcaaactaaaatcgttgtggtatatacacacatgtatatgtgatgcattacgtttaaaacgctttaattatcggagtttggctccatgtacgctagctataacactctaaccatcccgtcttctcaatatatattttacagttgaaataaagattaaattttgcaatatatatatagatattcacactaatcctaaaaatttatcacatagtatattagttttttttcttcaaagtctaggttattgtaatttctatttataagaccatataaaacatatagattagcattaccctttgtgttgatcatgtactgagattcaatctacagttttatttccgaatcttaagctggtgggttcgatcacatgcaaattacaattgtctattagtattacgtaaatacgaatatacatccatatgtaagaacacgtgtgtataactgtgtatatctccaatatacgtgcatctacatctataagtttacattgttttcgttatcttctacctaaatttattaattttcatttgggtcctattgttatgtcgattaataccctttaatttaggctgatgttctaagtccaaacatacaaacagccaatcttaacacaaaatcttaatctcagcatgcgggcaaaattgcgaccatacaactattatgctatgatggttctagtaataaaagcaggcatttagtttggaaaaaaagtaaaatctccttagagtactttaattagtaaccagtgctataaacgaattgtaaccaacacgcaatggaatcaataacactctattaacttaatatagatatgagaaactcgtgcttttaatctttgttaaaacgtcgacaaaaaaaaagtttttttctgttaattagttctcctctttttaaagttttaaatttttgatttcataactcactattaattgcgatatgtggggtcacctaagatcctccaagaacttatattcttgatgaacatatattgttcacaaattggaatcataatcttatcgtatgattgtatgtatatgtgtcacgtagttggacttttaaccactattagatctttccaaatatcctctctctttttttgcttcaaatttgttttttttgtgcacacacatcttatattattaatatataaaattggatgagctttataagagttttaattacatataggaaaaatagaactaattaataagatttagatatatgtataaacgtatttatatattgacatgtaagttttaaaataatatatcgtcatgggaaatatttttaaaaatcttaaaatacagtatggacttatatattcatactaaaacctagtggggtttttttttgtgtgtacatgaaaagtggtaaaagtattttctcttttttaattttgttagattaaaaatatgttaaggtagcttgttttgtttatcgtcatgtgttaaagtgtactatatggtaaagatttatacagtagcatgtgtaagcgggttcatgagtaggagagaattaaattctgccttaattaaacaaaggtttcgattagccgtacgtaccgccattaatagggagcataattatcacccattagggagcatactttgaccactaggggaaaattagaaacctatggtaatcgtattaattaatacggccaaaattaattctaattaacatataaaactgtttcccacaactaatttttatagatatatcaccttttagataaaatatagaaattctttcttcatatatatgttactaacaaataaaaatcataccgatgcaatgacctacaatctgaccggttagctcaacaactcagtatttgagaaatgtaattttgttcgattaccataggtttttatttgtataaatctaaatataatcatattacttctttttttatcgaaatataatcatattaactcacgcgaagaaactataataatccatctgacttctggttcgtaaatattgtcatacttaattagagacgaattgttctcatggtaatcagcaaaagatcgaatttcctaatttctaatactagtccagaaatatggtatagatttttatcataattttttttgtctagatataataaagtgtaaatggatagccacccacccactcctctcgtataatgtaaatttctcatttttttaatgatgccaaatccatataatcggaatttcaaccaccgtatttgggctatagatcataactaaagttatggaaataaatgaataaattaaaaaatgttaagtagaaaaaataagtatcaacaagagagaaggaagaagaagacataagctaacagttgtccgaaattgattttggcaaaaggtgatctttgattttgcttaaaacatcgaatcagaacatttaatttagttgtttcctcatttctttcatctatggagtttagtatacccaataaatttgattagttacttattccagctcctattattatatttaacacacataatgtaaaacagacgcgtataatttatatagaaactgtatgtagttaaaaacgacatactagtactgatgactctttgtttacgtaaatttgtattctcaaagaaaaaaagtaactaccttttgttatggtctctaagaaaaaacaaaagtactttacagttttcttagtgaccattctgtaagaatatcaaatagtgaaaaataggtaaacgagaatctttttttctgtgtaacaatattgtattagtgaaggattattaattacgagactattatctaaaacgcattagtgacccttttggatttaaatcgtagcagccgactaaaccaaaatatttagaaagttttccaaaaacaaacaacattaaaacacatttaaactcgtacacaataatagaaactaaactatttttagcagactaaagtctaaacaacattacgtttaaaaattgataatcagtgttttatagaactggcgatctcctaaagatgaaccaccgagaagtttcaagataaaaacaaaaataaaaatagccaaacactcttatctattcatccatttgcaggtcaatgacaccgtatttttccacaatcgaatcttccttattctttacacaaacttcttctctgtatgtaagtaaactaatattaaaattgaacttgtcaaagactttcctcttggtcacgtctgctatatatactccttcattcacacaaatgtttaactccaacacacttctctttctctcaacctctctccctctctctctccgattgtgtttttagagctgtcacgtgtcacgtgtcaggttcgaagctctaagaaaaaaatgggtcttcctctaatgatggagagatcatcaaacaacaacaacgtcgagctttctcgagtggcggtttcagacactcacggcgaagactcaccgtacttcgccggctggaaagcttacgacgaaaatccttacgacgaatctcataacccttccggtgtcatccaaatgggtctcgctgagaatcaggtaataaaatctttcatatagtcaacttttttttattaattgttatatattgcgataatgtattaattgtctctttcgatcatttttttcctacaaacaggtctcgtttgatcttcttgaaacttacttggagaagaagaatccagaaggttcgatgtggggatcaaaaggagctcctgggttccgtgaaaacgcattgtttcaagactaccacggtctcaaaactttcagacaagccatggctagtttcatggaacagattcgaggaggcaaagctagatttgatcctgaccggatcgtcctcaccgccggagccaccgccgctaacgaactcttaactttcattctcgccgatcctaacgacgcccttctagttcccacaccgtattatccagggtacgtcacactttataataagatatataatgaattaaattaagaaatatggtcattcgtatatatgaagataaactacaaagaaatagctgcaactaactaacaccatttaaaagaaagttataatctagcaaatcttttattttcgatatttaatgcattgtatttaccgaaccgtttatttatttcattacagattcgatagagatttgagatggagaaccggagtgaaaatagtacccatccactgcgacagctcgaaccatttccagataaccccggaggcgctagagtcggcgtaccaaacggctcgtgacgcgaacattagagtccgaggagtgctcataaccaacccatcgaacccattaggggcgacggtccaaaagaaggttctagaagatctccttgacttctgcgtacgcaagaatattcacttggtctcagacgagatctactccggctccgtcttccatgcctccgagttcacaagcgttgccgagatcgtagaaaacatagatgacgtgtcagtaaaggaacgagttcacatcgtctacagtctctccaaggatcttggtcttcctggtttccgcgtgggaactatatactcgtacaacgataatgttgttcggacagcgagaaggatgtcgagcttcacgcttgtctcgtctcagacacaacatatgctggcttctatgttgtcggatgaggagtttacggagaagtacattaggataaaccgggaaagacttagaagacggtacgataccattgtggaagggcttaagaaggcagggattgagtgtttgaaagggaacgcagggctattttgttggatgaatttgggtttcttgctcgaaaagaaaactaaagacggcgagctccagctttgggatgtgatcttaaaggagctgaacctgaatatatctccgggatcttcgtgccactgctcggaggtcggatggtttagggtttgttttgctaatatgagtgagaacactttggagattgcgttgaagagaatacatgagttcatggaccgacgaaggaggttttgaaatgttaaaaaaaaaagtaaagtaaatccgtttttttggtggttaaatatatgggggaggggtaattaattttttaggaaagagaagataattaatttaaacccattgatgtaaaatgggttttgatttgtttctcttttctagatattattgtttgttttcttgcttggacaaagcaagttaatttcatgttcatcaaggttgatttgtaatatttattgttataaacgaattttttaaaatataaagcattacagaaacatctctatcggaaaattatccctattacttaagtacggcaaaaacaaatatatttatattgttaagataatgatacacctcgcaaatatattatagacagtagatacagatttacttattgttcttgaaggttatacatctgtatgtaatatttgttgacttttttgtcaagttaatatttgttgtcgtatacagaaaatgggtctaaataattttatttcaatatggttatgtcattgttgttgtaattttctgtaaagaggttagtgttgttatgtggtcgggtctttttttgacttggtcactgtacaactctaacaagaaatgtgttctttttcttctcttaatactagttatccgaatacacacacggtttcgatgagatcgaactagttttgtgtggctaccaattagtgaggtatttatgacgatttatgacaaaaaaatattgaaacaactattatattgtatttagggttacatgtataattttaggattttgataaccaaataattaattgcagtaacaaatattcttaaataaaacattttgatgtttgttctagattaacataatagaaacctttaactaatcatataactcgaaatataatatctaaattacaaacaaatcagcttataaaagaagtgcacattcaagttttccgtacgttacaatgagaaatatatttgttgtgatatcattcgggcgatttttaaaatttggtctaccagatattcattttcaataacgaaatttgaatgattaaattttaaacaaatggttgattcctagctaaagtctctaagttatttcgttttcttggccaagtcgaggtcgtataccacttggttgaataaaaacaaatcaatttaagtgcaaagacaatggaccattgtcaacggtctctactaaaataatataaataatgcaaattatagttacatgtattcaacacacatatttttttctaaaaagtgtataaatatacagtattgtatttggaatgagttcatctatacaataatgacagggaatgccggaatggtatctatggtatagaagttgcatgcaacagaactatagacatttcttacatcatgcacctagaactaaaccaatcatgtttaatacatcattttttttatattaaaaacttgctttagataaatcactagatcgaaagtcaggactatagtatataggtaaagttgaacctggcgaactctaaatttacaattgaattctgaatatttttcaattgcaccaacatttccaaatttatacgtatttttataaatccatatcatatatatactttgacttagttagtttttttatgttatgagtatttattgctttcgttatgtcatgcacaaataataaacatatacgtacatactttgacttacatagcttatagctatgtataaaattaatgttataatacttcaacttacagctaattaggagaagtagtatttgatttgactagtccttccaaaggaaaccccccttaattaagcttattaaattgagtttcgaaagcgtcaaggaaatttaagaatgtaagactagtagactttgcatgcataatccttttaaattaatcaccgatttgacattttagtctcttaattttgcatgcttcattatgtctttgtactttactacttttgactttatacatgctcatgtcattatctacgtatctaatacaatttcttgtactcgaagttttgggtcaaacctagttaccttttcttcttgttaattttagcatgaattgatcattaatctcaataacattataaaacagatacacatttattctaaccagtttccttaaccgattaattatgatacatttcaaaaaccggctacgtgataggcgtcttcgaattttggtgcctcttatatatttagttccaaaagctttgcacgggaatacttttgactttagtacgttcgtgtattttatagtaatggtcaaaagattcaataatttatttgtaattttgtgacaactggtaccaaaagttttgtgacaggtgcaaagatagacttatatcaaactttcgtataataagaaagtttttttttttgtacgtttgtcaacaacaacatgcaaaaacatgatattttcaaataaaaatagcatttttcatacagacagtgcaagtttaacgaatcaaatatagccttttcattcataactaatgccgaatctaatctaaacgcacgatgatgcaaaatacaatcaaaaccccacgacttctttcaagaattatgaggccatttactttctcttttgtttttctttggtacgtaaatttacaaatgtgattgatttgcctactaaacgaatttttttttatctacccttatgtattctgatagtaaatgttcaaattcaatcttacttcttagaatcaaaaatgtgaagaataaaaaacctcatccacacgtgtgtcgcggtcgttaggattttccaacccaatgctactttttgagggtcaaaggtcaattgaacagctggaagaatcttagccgtcagatcagtccccaccgcacacgcgtatcacgctgacaggctggcgcctaaaatcattggccaagtcccacgtgtgaactaatcatcaacgtcgtcattagttttactacattggtctcgtcttcgtgtcgtattacgatcgagctgcttcacaattatgttcttatggacttatctatacaacaacccgaaacctataaatctttattgtcaaaaggaaatacacattacacactatacacgtacttatattggacccaaaagtggttaggttaaaagtgtttgtatcagttctagtaattactaaattagaatattggtatagttccgttttttttctttttctaaatgataattcaataattcatatcatccattgtatgtaatctgtaaaaagtacggacagaaattcattgatcagaaactttttttttttaataaccaaattttgtggcatcatcattaattccgaacacagagattgatatatcacacttacatatatagattagttggatgattgctatatcattgctattgaaaaattgcaaaaagttcttctaattcagatgatataaaatgtgactgtacatttacttattatttaataaagtcgaatttgtagttgaaaataaatacttgtaatcaagtggtttgtactactagtagtctagtacccacgtcgtatcataacttcattcaaatttgcaagtgtatgtgttggagactttgaattatatactaaaaataaataggcaaaaaataaactgaatttccaaaaattctttaaatgatttcgtacgtgtattattgcttgtgatctttgtttttgtttagatgattttagtgagacgagaaaaaaagagaagaagataaaaatgcatgacatcacatgtcagtggatccagagtattatttgatgacaatctagtcagattaggcattcggtgtttaatcaagtacttgtatatgatagctagctaatcattaagcaaaaaaatgagatccaatgactaattaatatatttgattagcgtgtttaatgaagatgacatataattataatacggtgttgggtgagatatactttgttactcgctttgtacatacaacaagtgtttgcattattttattcctcttgaatatattgaatattacggatgagtctgattgtttctcaatagttttggaatggcaataattttatcaggaaacaaaaaaaacgaaaaacaaggtgataacaaaaagaacaataggaatatgaatgaaaaaaacaaaaaagaacaagaaaaacagaaaatgataataagtaggaaccaagagaaacatagaaatagaacaaaatgattatggtaaatggtaacaaaaaaggtgaattaatatttaatataataattactaaataatcatttatttgaattttgtttattattttcatttaaaattaaagttctgtataaatttaaaataatttatattataaatttttcttcaaaacatttatttattttatagtaaaattttcaattatattacaaagttaaaataagtttcactttaaaacatttatttatactaatttaaaataaattcataacattcattaaattgaaagtttgataaatttttttatatatatcaatatatactaaagatatgtaaaatattatatttaaatataaatattatcataaaagctattttaaatttatttaataaataaaaacgaattttatttttttgttcctcttggttcctctacaattttgttctatcatttttttttttttgaggaatgatgaggaaaaatgtaagacccatatgtataaaaatggaacaaaaataccttgcaaatggtaaaaaaaactgaggaacaaagaggaatacaaactttcctactcattcttttcctaaaaaatggttatgaataggagccaataatttagtaatttacacaaatcgaatatttctatgcgtgagaggtgagacctaacaattcaattcaaatttgacattatttgggcctccttcttaagattcgcctacgtttgatcaatctaatttcatattgggctattaagagttattaaaggctcatatgaggcctgtaatgtttttttcgccgcattatcggaaaaacctcaagaagaagagtggtgacataacaaaaccccaaaagctcccaagcctagagattctgttgttgatccgattcccgctctccttctccggtagtacaatctccgtcgccggttacatcagccaggtaagagacattagtttttattttgtttcgaagtttcatctcttttctttccactttatccccttcaaggaatttgtgctagatctacgcttttaggtcgctggcatttgattgattttggaccaacaaaagctaatttaaatgttcatgaggtcttgagatttgatgattaggcttttattttgtcgagactgatgttaggtcgaactatgttgatttaggtttgggattcgatttgattttatggaattggattccttagatagatcctttatatgcatccgttaggtcctcttttaatttgtaattctaaactgtgtcttagggaagagttttaagagatggcatcaaagttgctacaattgaaatccaaggcatgtgaagcatcaaagtttgtttccaagcatggaacaacttactacaaacagttgctggataagaacaagatgtatatccaggagccagctactatagagaaatgcaatgaattgtctaagcagcttctctacactcgtcttgctaggttagtcttcgctctctcatctgatcctggatttcgtttgatgtgtttgttagacaagaaattgtgcgaaatcccgctaatgatgtagataatcctgcttcgttatcaaatttggttaggggcagtgttataaaagaattgtgaaattatacattctaggtttgatggttctgaaccatgaaactcatcacatacctagttacagtctctactttgctgcatctgaactagatactaacaatcccctgcttatatagagtatagtatttgtgtagatttcttaccagaatagtcatttcactgtttctagatacgttattcagaaactgcgtgtcttctttgttgctatgactgacttgtttttttcaaatggatcgtagcattcctgggcgttctgagtcattttggaaggaagtcaatcacgtgaagggtttatggaagaatcgggcggatttgaaggttgaagatgctggaatagctgcactttttggtctggaatgctttgcgtggtactgtgcaggagagattgtaggaaggggcttcactttcaccggctactacccttgaagaaagaaagcaaccccctcataaacaaacatgcgtttcagatccattgaataccgaaaagcctttttatatcataattagcggcttattatctatctcactgctgacattagaagcaaagttaatttctgtttctctggataatttatacacaaaagttttgaaggtgaggcatcatcactcgtgctagctctaataatatcagtcgactaatgttggccatttggttttttctttgtcattttcatttatgtgaataaccatttttcttgggtttagagtctataaaccgtttggtaagatgtatcattcgtgaaacctcagcacataccaaccttaccagagaagagtaagacggcattatattataaaccgtttggtaatatgtatcattcttcttctatcacaaaaaaggaagaaaatcctatatttttgacaattgtctgaaaatacgattaggttcagagtatttcaacgttgtctctgtcatttgtctatcgcaatttcgcataaaagcaagccttgtaggtgtagaagccatcacaccagattgtagtggatgatcggaaactaagacttcagtcatctggtattctcctctctctctctcgaccggtcctcactataagtcttctctttgtaacatttttgtgatcattttggatcgttagttttgtagttgttctttttttttatgagtgttttgatagtgaacataaacttgattcataagtcaactgtatgctcaatcaattggtttttgaagaagttagttctaagaatcaagcaattggataagataaaatcagataaaatctacacgccttttatcaaggcaaagcttatagtgtttaaagctgttttccttgaaaacttgaaagatctacactttcagaaaaaagttgtaaactgcagcaacccataatcaataaagaaccagtagtagttttcttcagttatgcaagcaaagattatatgaattagcatggctatttaatatatgcttttttccttgagcagagactttacagtgtttgaggaacgaagattgtgagacacaatggctaaggatgaagccaagggattgctgaaaagtgaagagctctataaagtttgtccttacatactcatctctacgttagttcacttctccatttctctgatacatttctgtgaaaaatgttgtagtatatactggagactagtgtgtacccacgcgagccagaggttctcagggagcttaggaacattactcataaccaccctcaagctggtatggctactgcaccagacgctggccagttgatggggatgctgctgaatctggtaaatgcaagaaagactatcgaggttggggttttcactggatactctcttctcctcactgctcttacgctaccagaagatggcaaggtatttgcatagatatgaccaaaccaaaagaaaaagtgtcatgatgtttttcgttgttttgcttctgtatcatttctgcaactgatttggtacacgagctctgcaggttatcgccattgacatgaatagagactcgtatgaaataggattgccggttataaagaaagctggtgttgaacacaaaattgatttcaaagagtctgaagctcttccagccctcgacgagcttttaaacaatgtacaacttcatacttctttgtctttcaaaaaaagaattagtatgtatcctgagatggtctttttgttttgatgtttgtgatgcagaaagtgaatgagggtggattcgacttcgcatttgtggatgcagacaagctgaattattggaactatcatgagaggcttattagattgatcaaggttggtgggatcatagtgtatgataacactctctggggaggatcagttgctgaaccggactcgtccacgcccgagtggaggatagaagtcaagaaagcaaccctcgagctgaacaagaaactctcggctgatcagcgtgtgcagatctcgcaagctgcgcttggcgatggtatcactatttgcaggaggttatattgagcgagtattgttgttctttgtgatctttagggtcatatgattgtgagccctttatattgagctattgtgatgcaagagtgttattgttctatgtgatattttggttcctgtgtgaatgtgaaccttttctatcaagtttgtggatttcttcaaatttcaagattataacagacagttacgaagaaacacaactcattttatgttttgtgtcttttggcaaaactccaaattctgaacattgctctaaaatctaatataaaaagtaaaaaaatgaatggggcgttccgagaatcgaactcgggacctctcgcacccaaagcgagaatcataccactagaccaaacgcccacattgatatatagtttgctagcttttaatacaatgtatattaaataatttagttttgtgatataaacagtaaacagaacaagatattttcacccaaagttaaaaaatccaacgtttgttcaaaaataagaaaaaaactatccaaagttaaattatcaaatgttaaaaatcgttagacgttaatcacaatataaaggaactcttttttttttttttgagttaagaaacacttagttgggccataaaaatataggtctagtagatgaaaggcccataaaatcaactagggttagttcttcttcttatagagcgccgcatataagcttcatccttctccgtcaccaccggctctgtatttcggcatttgtggagagaagaaggtactctcatccctttctctttcttatcttaatctccttttttaaaatttgtgacaaagtaaaatgagctaatctcgtctttaagatcatatgtcaaaactgaatttgagttttgatatattcaggtaaagagagaagatagaaacataaaatgtcggagaagaagggaaggaaagaggaggtggtgaccagagagtacaccatcaaccttcacagacgccttcatagctggtaatttccaaaacaccaaaaacacttttgtcttattgcttcaaagcttttactgttagatagtggaattggaatgttgataatgagctcttagctaatgttttaattcgattgctctctatggattgtgacattgaaatgtttgatcttctttgtgtgtaaaactagtacctttaagaagaaggctccaaaggcgatcaaggagataaggaagtttgctgagaaggaaatggggacaaaggatgtgagagtggatgttaaattgaacaagcagatttggagcaaaggtatcagaggtcctccgaggagaatcagagtccgagttgctcgtaagagaaatgatgatgaagatgcaaaggaagagttcttctctcttgtcactgttgctgaaatccctgctgaaggactctctggcctcggcactaagatcattgaagaagaggattaaactatcttatagtaacaacaacatttgatcagatttttcgagttttgtttttcgaatctttattggagagaacatttatcttcttgaatccttaagccttgaatcatagtatgcgattgagacagaatctcagtcttgtgtcgtaagtagtcttcaacaatccttacacttgtttcggtaaagtttgagcatctggttcgatcatgataatatctgcagctatgaataagtttatgcacctctctcaagtgaattgcttgaataaatcaagagtattacatgtatgaactggaatctagttcgagtcaatcatgagtttttaaacaaaacgaacttcagagtttcgtatctatttacaacaacagaagaatgttctttaggggataatagagtcaaaacttgcactcttgctatcacaaattcactctgacgaggtttgaaagtagctattatctctctaccgtgctttatatgcatacatatagttcctcagttttttcacttcctcagatgactcctctagaagatggtccacgtatagacaaattccagctccactgcaatttcgaagtacagaaaagttgatgcaaactttagttttacatacacaggggcatataaaacaacacaaggttatatctaagcgatagatacacataccaaagcggcccaaacggaagccagatagcatcccaccggaatttcggaagcctagaacacgggtgagatttataagcataaatttacaaagagcacgaatggaaggaatagacaagaaatgtccttcatgttgaatacagcataaacgactaacacaaggattcatgccactaacaatggcattataataatgaaagtttgcgaagtgcaagattgtatcgaaaagaaaagaaatgtatactctctagtgtacctcagcaagtaataaagccaaaagatggtcaatgcagatccaacaacacaagagtaccagaaccatcgtctatgatcattcttcttatctcgtagcccgacaatggagagggagcaagccatgatagcgatccactctgatccaaaaatccagtgataaaagatttattgttctagtaatcaaataacatgcgaagccaaaaatgaattgaagataaagcaacaaagtcttctgaaggcagtaaggtttcagtatgaccataatttgttttatcttactgtactagcaaagacgcaatttgacttccctcaggtcgaaaacactcaaaatgcaatcactctttctaattctacactaatccactaacagatatgctcttagattcatatgcatataacatatctgttttttcccatgttgttacaggatattacacagaaacttccacacaagctcagaattggctgtaccaccatatcgaatggcaagagaaatctaataaaccgtgactacaaagtaaaaaaaatcacatagatgtaagacaaaccagctgaaatgaccatccatgacttgagatcttccataaagtaggcatgataccgctgctcaaaaaaaatggcatccataagaacccatggaatatagaacgtagataacgtgacatttgtgtatgtatgtataagtgcttgcaactccatacgcaggcagaattagtgtatcatacaaagattgcaagtgtattagctcacaatagtcagcaagaaactcaaagctctaaatccgtaatctatcgttaaaaaacaaaatcaattttaaactgaactcttaagttttaatccaactttgtcttctaagatcaaaatcgctgcaactgaagacaagtgatctgatctgaattttaactttgaattcaattcaacttaagcaacaaaactagtcaatcaaatggaattgctagaaggacgaacaaggccacacttaaggagagattatcagtaccagttcccatggtgacatgaactgctggaaaatggagtagaagaggaaagctccaaagcagatcagaagaaccacaaacacgctctacacaaaagataaacacaaacttacttaagaaacagaactcctcaaaattttgcagaaattgaatattgttcttagatcataccctccattgaagactttgctgagcatgagcttcctcaagataccgaacgtactcctcctgctctgtaaaacgacagtgatagcaataaactattacgaacttgcttttacaaatctgccaaaaattccagaggatgagagaaacaaaataaaccttgcgtatcaataggccgagaatcgacgtcttcagaagtaggaaggacgaacttatcatcatcttcgtcacgacgagttctccgccattttctcgctaacttcttcatttgatttttcttcagattgcagaagtagaagatggagaaattaggaaaacttcaatgagcatcatcgtttcttcaacgaaagtgtctccagccaaaacgcctttaagctacggcctattaagaagcccagcccatagtttagcaagattgattcggtttcttatctccggcttggtttgctgtgttgaaataaatgggctatttaattcaacgcaagtgggcctaactagaacaatttagttacactactttttttggtcgcaaaactacaagagtacacgtaacgaatgatttaagggattagggatatttcagaaaggtaacacatatggcaatatatgccatatgaatcaaacattcaatgcaccgatttaatccgtgagcaaacataaatattatgaattatcctcgtttccatattagttaagcattttagattcatttttctatatcctctctgatttaatccatatgcgcaaatatttatgatgaattatacttagttccatatgtattacaatttttagattcattcttctttatccttttcgatttaaatcttcgtagtcaattactcccttaaaaaacgttatcaagagttaaaatgtttcaaatattctctaattaattctcccctctcctctcactcccttatataataaacgctcgtttctcatattaattcacttatcatcgcaaaaaaagggttcttcactaatatttttctcattttaactgtttgagatggctcaaatgtcgatgaccgtcgagaagagtatcaaagctgacgtgacggtgagccatgaccgtgtgaaaagggcttacgtcactttccttgctggaaacaaagactactggatgggtgtagttggtctagccaagggacttcgtaaggtgaaatctgcttatcctcttgtggttgcgattctcccggacgtgcctgaggaacaccgtcaaatcctgttggctcagggatgcatcatccgtgagattgaaccggtttatccaccggaaaacaaaaccggttattcaatggcctattacgttatcaactactccaagcttcgtatttgggaggtaaaaaactttcttactatatgtctatatttgtgtttattcatcatccgatcgcatcgtttattttttgttaatgtaattatcaattactttgattgctacattagtttaaaagcataataacgtggactaatgtcactaaattattaaagattatatatccaaatttaatattctgattgttacgtttgttttaaaatcatgataacgtctaacgacttgttaatatatgtaaatgcagtttgtggagtatgaaaagatgatttatctagatggagacattcaagtatttagtaacatcgatcatcttttcgatactcctcgtggctacttgtacgctgtcaaagattgcttttgcgagatttcttggtccaaaactcctcaatttaagataggttactgccaacaatgtcctgaaaaggtgacatggcctgttgaaagtcttggttctccaccgccggtatatttcaacgccggtatgttggtttttgaacctaatctcctcacttacgaggatctccttcgtgttgttcaaatcaccactccgacatattttgccgaacaggtttgttttgttttctttatcattattttattttagtttctttattatacaaatctaatattaatgcttgttttttgtaggattttctgaatgaatactttacagacatttacaagcccatcccttcgacctacaaccttgtaatggctatgctttggcgtcatcctgaacacattgaccttgaccaaatcagtgttattcattattgtgcaaatgtacgtttaaattccttatttcgtctctacatatatgcattaatgtagatttaatgtatttctgttactcaaattttgtagggttcgaagccttggagattcgatgaaactgaagagcatatggatcgtgaggacataaaaatgttggtgaagaaatggtgggatatttatgaagattcgagtttagattacaagaactttgtcgagactgagtccaaactgagtccgatcaatgcaaccttggcttccaaggaatctgttggcgatgtccttattagtcttgccccttccgctgcataaccaattctttatgtggaagctctatctatgcaacttttttttcctttttgttttaatgagaggtttaggctatatataaatttttatcataactatatagcaacctcgtttgagtttgtgtttgtgagattagagtggttggtcttgtgtttgtgtcaatgtcgaccttgaccaccctttccctctctctttttttgttttagaatcaataagaagaaaactcttttggcttaattttcttctgttcctatttctttttgcgttttgcgttttgtataacaactttattagattcgacaataacttttgttttgatgactgaattcttacgactggtatgtttgtcccatccctcatgcgctagattaaaatttaaaaccatagttcatcatctttaaagaaacttggcttccatgttgaattattcttgcaatgcctttacctccgttgagagtattttgtaaagagaaaaggtgttttgagattgtaatactgtaccattcaatatatatgactggtaatgcattttacactcggtttactggtatgtttgacccatccctcattatgcgctagaataaaattaggatattttttagtttgagtttgatgtaatgatttgtggattggaatcgtgtggttggttttttctcgtctccttgctcaaacctttcttatggttgcttaaagttctcattaattggagatggcattgtatcgtttaactgatacattaaagtctcactatttatgacattggtttaaatgaataataaaacaaaggatatatagattatactacatattcgtaaagttaatgcggattttaattagtatagaagagaaggagagtataatttaaaacaaaatgatctcaggacattattgttaattccatataagttggcattttccgattctgaaactatttgattcttaccaatatggtaagcaaataataactgagacattatttatatgaatcttacttttgaatcgtttcctccattagccaattagattttatatggaaatgtatctcataatattagcgtatttaatgaatacagttgaccaaaagaaaactatacctcataaatcgtaatattagcgtggttaaatactactataattctattcttcagttacaatgcattgaccaaatatcatccatgattcaataattttgaccggtctgatcgttatgaaccgaaattgatttcggatattttaactcttgaaatttcacattactatgattggtatgccgtcactgtaatacgtcaccatcgcttgaacatgtttttaccaaaaaaatatggttttcctttctttttttcttcttaaatgaaataatgatgactaggtattcctgctatagccaatacatatagaggaactagagtttggatttattctttatatatgtttcattcggacagtgtgtggttaagctcaaatggttttgtctaatatcaaattattgtacttgatccatataaataataaatatacaaacatttttacggatttttatgccaacagtaatctgctcttgaatttattattaaatattaacatatcaatctttatatttgcagctcaattactcataccgttcctaacaatatacgagtatctgagctagtatatggttagatttttagtttagatttttttgttgtgttttatgaaaaaaacaagaaaaataataaccaaatcaaaatcggatcttctttggtttttatttggtttccattagttaagattagctatatatatttgaactttgaagcaagattagttttatatctatttcaatgaatttttattggttgttttctttattttctacttagtgagtcatgtacaattatagaaatttgacgccatataaattttttaatttgtttttttcatccatttttctgtgatagtttggtttgattttatctgattgatcacctagttatgaatctgaattaatcacacattaaataagttattggattttaagatcttggtaaggttatggctcttccacacttaggaggacttcctcaaaggggtgttgttggtaattaaagtttaattatataacgcacacccaatagggaatgtgtcactcaacagtcccaggtggctacatagaatggaagcattatgcagtcagcatggcaatttttcatacgataccattctttatacagtaagcatttaatcttttttttttaaacacggttattaaaatttaatttaataatctgcagcattgcacacggctggagaatacgcccattttaagaatgagaaagacaaggagaaacctgatcggctgcacattttcaagtaatgattattatttttaaaacattagtaactgactgagtcttatttaatcctaaaaaaaaataaatacatatacaatgattgaaaggcaagcttaattagttattacgttcctagcctatcgattgtttatatcggtaaatattttataaattattgtaattaacaacaaaaaaagcatacaattttaatggttttgattatattttgcttatattatgcaacaaataagaagaagtgaagcttgggtttattcattttacacatgctttattaggacagagtgtgtagttgaacataaatgagtttgtctagtattcaattattgtactcttttttttttgggtcatcattcaattattgtacctgatagtagccgactgcttagatcttgagtcttgattatattattgtcgtatcaatcaatacatataattgcagctcaatattcgtcattgcgtgtctatctcatcgtccttttgttgggtcttattatgcttgttttcatttaagtacaaattattaatggttttgaagtatgtatatgccttcgtagtaaaattttaatgttgtgattttggatgtgagaaaaattgatatatgtcaagtaagttaatagtacttcattcagagtaaagcttattttaattaattaattacactacaggttctccttgtcttcctccttcataagatgggtgtgttttcattctccagcggtgtgcaatgctccagaaaaaaaaaaaatcttaagtggctatacacgtatgtttttaagtaattacatttcttaaacatgattaagtgattaattggttgactttaatcctaataagttgaatcactaatattctatatattcttgttattacagcacaagttatacactagaagcaaaaagttcacgtctatctatcgaagacgacgaagcgttcttggcacccgagataaatgccttcggggatcagttcaggtttcttttttcttccatctatatacattgaattaaaaaagatattttgaatatataaagaaaaattggagtttttttcttttggtcgtcggatctaaaatcttgacttgatccgtaacgattacattggtatttggtcgcagggactacgatgccgagaatgagaggcagaaaggcgtggaagccttttagaaatctcaacacattaaccaaactgtcgactttgtaagattcttaaaaactaataagggtttatatatatttaattatttatacaacatctatatagatctatgggatccacgtagaatatatatgtgtaatatctatataaattaaacaatataatttttcaggtgatagagacgagggcagaatttggtaaattggataaagaagtgatgagcatttgggaatgttgtgagcttcttaatgaggtggtggacgagagtgatccagatctcgacgagcctcaaattcaacatttgcttcaatctgccgaagccatcagcaaggattaccttagcgaagcttggcttcatctaaccgctctcattcatggtaatttgttattacaaatagtctaatatagtgtgccttttttataatcagaactatatatgagtatctgagttagtttttttttttttttttttttttggagcaacatctgagctagttcatggttagatttgtttagatttttttttttgtgtgttttatgaaaagacaagaaaaataataagcaaatcgaagtcaaatctactttggttttgatctggtttcaattagttaagattagttatatatgtatttgaaacaggattactcttatatctattttaatgagttttattggttatttttctatgtagtcagtcatgtataattatagaagtttgacgccatactgatttgtttaattcgtttttatccatttttctgtggtggtttcggtttgattttatccaattgatcacctagttgtgaatcaaaaataatcacacttctgattttattgcatcttcagatctttatgattcttccacacttcggaggactttctcaatgggattttgttggtgattaaagtttaattttgttattagtatatatagtcattaatattttaattatgcgaattataagggtatgtggaactaataatttatttttctctcacaaaaacttgcaggtgacatagattccttgttaggtgtgcatttgatgaatctaacgtacaacacggggtaatcaatactagcaatttatgatcaagaaaagaatattagacacccacattatatggtttttcttaagagtttataccaaaatacgattaatttaatgactgttattttctctttcttttcggcagtatttaaccaaaaatggcatctacagtcaagcatgtggactaaacaatgagcatgatgtcatggggccatgacgactacatgtacatggaatttacactcaaggatgtggattaaacaatatagttaagcaaagttcattttgacttgatcttcatcacgtcaacatgaactttgattttactgtataacttgtatttactgtaataacaacaatatataacaattagaggttgtagatattatgatcaattacttaatcatgtcttgatcctaataactacggtctctgaattgctgtatattattattattacagcaagtacaagttataccgcaagatcaaagttcacgttgatgtggagaaagtcaagtcctactagatgtctctgataggtggtggtggagaaagttcacgttgatctagaaagtgagtatctattcttctccatttgcaaagaaattatgaattttcaactaattattcgttttgaatttttacagtatattccggaggtggtggtgaagtgtggagaagaaaagaagtggggcatcacttagaagaattcaagaaatacagatagtacaatatcttaaataaagagacatttgtatatgtatcataagttaacataactccataaacaaggagaactagtgtatctacaaagattgtaagtgtaatccatatagtaaaaaaaaaaattagcttctcatagtcgagcaagaagttcaaagctcttttttttttttttttttttattgtcaacaatttagtcccagcccatataagagtatagcccaaagccccaaagtattataagttattatccaattatttatagactaccagtaaaaccatcgtatcttctaaaccgaaacagaccaaatcaactcacccaaaccaataaacgacaccaactcaagtcaagcagcacataagaaaaacatttcacattatctgtgtttgatataatgcaaatgattaaattgtaatgatactggtaattagattcaattttccaatattttgatgatactgataactatctacaatgttaatatttgtaacattgaatttgtggaaaatatagatagccttaacatttaaaagaagcgtatttgaagtacatgttgaagatggtgagtagatatttcgtcatgcatgtgtggaaaagcaaatcagtagaatttagataacatataaatgaaggccacgtaatggtgagtcactccttgatttattttaagaacatttctgacttgtacaagctacaattcaagctaacactttttcatacttttcgaggacaaaactcatgcaatatttaagtttaaggacaattcattgttatttttataaattattggcatattatttttcttgttgcatgtgtgttagacactaaaaaacgaattgagacttgttattaaaacaaatttctatgattgtgttagcaaattactaacatttgttctttggtcaagtaaggctttttttactgtacacaatataattagttctgaccagtagaggattttattggtcacattaattagcgtccgtttaaaattacttaccaaccaaaaaacagtatatagatttaaaacttttaaaagatattttgataactgttatctggttatttccaaaatcacaacgtaaatttaatcaatataagcaaaaataggaattatcgattcttatcttctgtttttgacatggaattatcgattcttatctaaaatgataaaaaaaaacacagtcaacataatagctaaaaaaaccagtaaaatatagcaaaaaattacaccagaaaatcaaatcactgactgatcataaatttccttatcgtaaaatttagacaatacaaaaaaagaaataaacagaaagtcgttcctggtttggataaatataaaaagtagttgtttagaaagaaacaaataattcgtcaataaggacttagattttctccaaatattaaggaggggaattgtctcataatccttatccaccactataaataccgtaactcctaattaaactcgtaaagtcttcatcgcagaagtatatataatcaaaaagcaaatcgagttattttctctctcaattcatcccaaaccgtcgtaaccattctctttcgtttcgtttcgtttcttctcttttaaaaacctttcttcgaaaagatgacgatctctgttgagaagccgatttttggtaagaatctattctcacaatcttttgggaaataacgtctttatcaagatattattattttccggctaaatcaacgattttctaggaaaataatgtattttggtggtggctaattcacaacaagtttttgggatttttttgtgtctaaattatatatatcttacaaagatttttttctttcaagaagaagaggtttctgcattcgagaagagtggggacaatatcggagagttgaaattggacggaggattttcgatgccgaaaatggacaccaatgacgacgaagcttttttggctcctgagatgaatgcatttggccgccaattcaggtttctttttcttccacatttttctattcaattcaagaatgaagaaaatatttaattaaatcaaactgagtgttttttgtttgtttgtttggccggatctaaaccttgacttgatccataacgtgtacattggtggtatttggtcgcagggactacgatgttgagagtgagaggcaaaagggcgtcgaagagttttacagattacaacacatcaaccaaactgtcgactttgtaagattcttaaaaaagttattagggtttatgtgtataatgacacatcttattataacttatgtgatccaggtagtatatgtatacttttatttaattaataaataatataaataattgtatgttttgtaggtgaaaaagatgagggctgaatatggaaaattagataaaatggtgatgagcatttgggaatgttgtgagcttctcaatgaggttgtggatgagagtgatccagatcttgacgagccccagattcagcatttgcttcaatctgccgaagccatccgcaaagattaccctaatgaagattggcttcatctgaccgctcttatccatggtaaatttgttgtaaccaatagtcttttctatgaattaattagagcaggaacgatacgtcctcgtccaatattttgaccgaatgagttgttctaatggaattttcagatcttgggaaagttattactcttccacaattcggaggacttcctcaatgggctgttgttggtaagtcaagtttgattttgtcattaatattttgaatatgcgaactatatttgaaactaattgtttattccctcttacaaaaacctataggtgacacattccctgttggatgtgcatttgatgaatctaacgtacatcacaaggtaaataattgattcaatctcttaagttgttgatagaaattaatttattagttttgttgaaatttctatacatactctcaaaatataggattctcatttctttctcatgagtttatacccaaagcaagcaacaattaactaacatatcgtttctcttatccacagtactttgtggaaaacccagattttcacaacgaaacctacaacactaaaaatgggatttactctgaagggtgtggattaaacaatgtcatgatgtcttggggccatgacgactacatgtacctggtaattacttgattatttttacagtttagagtaatgttttttcagaaaagtttaatcaatcttgagttttgtaaaggataaagttgatgttaattaatattttttttcaggtggctaaagaaaacggaagtaccttgccgtcggctggacagtttatcataagataccattccttttaccgtaagcacttcaactaagaaatatatgattttagtaacattataaatttgtagctatgagtaaaggttattttaataaatcaattgaatatatgcagctttgcacacggctggagaatacacccatcttatgaacgaggaagacaaggagaatctgaagtggctacacgttttcaagtaatcacattttcttaaacatgattaagtgatttgttgtttctcctaatagcatctctaaactgctatatatatatatgaattttattacagcaagtacgacttgtacagtaagagcaaagttcacgttgatgtggagaaggtcaagccttactacatgtctcttatcaagaaagtgagtatatattgcatgctcattacaaaaaacaatgaaaagtgtattaatattgaaaacattcatatatttctaaattcttcagctgactataaattctttcttctctttttcgattttgcagtatttcccggaaaacttgaggtggtgaattcggtggagtaaaaaagtgcccatggaggattagtcgttttatttacttacaaatatttttacacattttcgagttaatgtgaatctattgtaattgtgttatatatatcttatgttaatcatattcaggctgtctctgaaatgtaatcacaatcaaccctcgtgaatgctaaagagtttgtacgtcgggtgatataagatcttaaataatgaagtttatttataataatctaagcctccaaggtctaaaaattgtgcattgtaatgtaaacaaagttttattaacgtaactctaagtgtacaatattacattagtactgatacatccatgcgaacaatgtcatgacctttaatgctcatactcagatagaggtgttcaaattgatcacggtatctttgcatcttcgcttctgttaggtcatggacagaagagaattacgtaccaaacaggtgtaattcgtaagatacgtaatcacatatttctatatgacgatgataatgatctagtataactgtcatttcgtatgaaattatctacaaaatttatgttgatcacatggttaaaactttgaaggattcaccatgttatagttgaaagcaagaacttgaatatttgcattttgatttcagcaaagaacatatttttaacgtcttaaatagcaaataatcaatcatcacattgacatgatcatgcattgacaattcgtagctagattattctatatataagcagaatgtaaaatgggataaatggaacttatttatatgacgtgggactaaagcatcatgacgtggaaaattacaacgtgaggcatctaacaaagattgctttgttatgccaaaaagggtaaaaccgtcaacaccctattattttactcaactacctaaaacatgtaacatcttttgaaaacgcaaagcttttctgtcgttgttcttatgttcaggtcacttggtgatctctttggtgactggaggaacatccaccacgccattgcagttaccatcgtcaaggagagccgacatcggtttctctttattatcaaagacatctttggggcccaagaaactcggctggtttgtcgaagagagtagccttgcccacatcctgtctgtgatcaccacatggttctgtttctccgttatcctctgtaacataaaaatgatgtttacataaaagtgatactatgattatgatgatatgaggatgatgactttaacggtgatgataactgatgacagtatgatgatactggtataatgatcatgcatcatcaatttttggtgctctattttttgattgccaaagcatgctatcacatcattaaaatttaaatcgattttatgacttacgtaaaagggtatgtaggtttgtcttccgttcactagaccactgatatagccagtgtatccagccattgcaccgtgcactgcactctgagccagaagtgtacaataaacattgtctgacgcattgctaggaacagctcgaatcatgtatgttggatctgaaattaagacaagaaaaatgaacaatcaagaaactcatggtggagagaatgcaatgcaagggatataaattgtacctatgtacttgaggttcatcaccatcttcttctgattaaaatgatcctacaaccgagtaaaaccaaaatttagtagtaggtgagtttagtctgattttcctatgcatcaatgtttgatgctgtctctgtaatttatggtttaccttgatgctttgtgacagccaaaggccaacatctttaagaagtttgttaccagatgcatctttgagtgtcatagattccatgctcttcgacattagatcttgtcctgcaccttctgcaatcacaagaaccatgtgaccgctctccttgagtcgtttctctatgtactcaaacagtccgccttctccttccaggtaaaatggtgactccggaatcaaacagcagtccacatctctgcttgctagagtggcatacatcgctatgaaccctgttaaagcagtgaacaaacttgtgaaatagtctaataagagagcttgataaggcaaagaagaagtagaagagtgaattctcaccgctgtagcgacccataagcttgacaactccgataccattctctatactctcggcttccacatgtgctgcattaatagctcgttgagcctcttctacagcagtgtcaaacccaaaagatttgtctatcacctgcacaaatacaaaagtcaagttctcaatttctccacataagaaatacagctcttctatagagacaaagcagtagaaagagatacatacaggtatgtcattatcgattgttttcgggattccaataactgcaactttcaggccacgtcttctaatttcctacatggttaccaccaaaagatcagtaaacactgaaattgtagaattgtaaggtagaagtgaaatttacctcaaatatgacagatgctcctcgctgtgttccatctcctcctataatgtaaacctgaacgatgaaaaaaactacatcaagaacgagtttgtatgtactcttggaacagaacacggtgtaaagaggtgatggttatcaaaacctgattgattcctcgatcttgaatgctgtcaactatctttgtggtatcgtgaccacctcgtgaggtcccaaggatagtccctccacgcttatggatatcatttacaactttagagtccaaggagacagtattcttagcataaaagcctctatatccaccctgaaaaagtctcaagcatgtgaaaatgaaacaaatgaataccgtgtttgttttggtaagaaggagattacaatcacagaaacttacatctattcccagtattctcttcactccatacatataagatagactgctcactatttctctaatcacggtattaaggccaggacaaagacctccacaggtaactatgcaagcatgcacttcatcagattcgaagtatacctgcagagaactaagtcaacaacagaccctattgaaatggaaaaaggactttaaagcaattcgataaaacgacgaaaaaccttctgacgtggcccggctcgtctaaaatgaatcccccttggaccatccttgtgaacaacgatctaaaacaacaaaaagaagagtcagtaagacaaaacatgagctccaaattctcaggatgccctgatattatagaaagaacccaaccaaatatataccttttgaggaacactgtcatcagcatcaacaaagtattgcctgaaaatttccaaaaataaaaaactaatgtaacaactgcaggctaatgattgaatcaccataggacacaattaggaaccttagtcaccaaaacatctgtgagaaaggacttacttaaccactgagtaagctggattgtcttgcaatggattaggataagtctacaataacataaaaccaaaagaaaattgaccattaatcaaaacttaaccatcattcgatcccaaaaataacatggtaaaaggacaaaaactcttaaaccatgctacagattttgatccaggttcataattcttgagacccaaatacaaaagacccctttttctttaccctgggctatcttatactaatcagaatctgggaaattcatttcatctatctcaaattccaaacaaaaaaactaaacagtcctcagctgaaaaaattgatatataaatatctatcaacatagatcaaagtttcaaccttttgcaacagttaaagctcaaaagcaaaagctttaatcaaatcagattaaaaaaagagagaggtaaacatacaggaagaccaggaaggtaatcggagagatgcggtacatcttctagaacataaccacaagagccattgatgatcttcggtttgctactctccacagtactcataacgaacgctcgaaacagaggaacaacaatttcaggggaaaagtcttataatataataaaaaacgatttttttttctggtatagagacttttgaactggtcaactacaaattgaatacgaaagcaggaagaaaggtaaaaagaaagatgaatcaaatccgttgatcaaaaacaaggcgacccatttttataggagtagagaaattttgaccattgtagtcggtaaacaaattacaaagccaggtagagatagagagagagaggaaaccattaaaggtcttagctatgtgcggaaatggtggttttggtcactgctttgtagattatttgacagtaacgacgactagtacaagtacttgcagagaaagatcgatatttttctagaattgatatttgtttattggttttctattttgttaccttttattgattttttccaactgttgggcttggttatcaagtcaaggtcaagccatgcattaatacggtccgaccgataaccgaaataaccgatccggtttattatttctcagaattttgaaaccatgaacctttacatgatcaaaggatacaggtacttattgttacaatgcatttcaaaggaaaacaaaacacaaacaacacataaacatcactaattcagaattttaaaaccatgcaccttaacatcagaagggtcacttattaattattacaatgcattttcaaaccaaacctcggaataatctttgagtttctccttcatgatcatgtcgattttgctacccatttccggagttagatgattcttccagtcaccaactatccctttgcggaaatggttcttgtactctatgccattgattgactttccggtcttgttaacctccaaactgctcaggttaggcagagaacacatctccaagatcttatttagagatccgttcttttcttcttccttagaaaatggacaacccaaaaactctgcgagtttcttgagctgaccatgaggatctgtttttatctcatcatacctcatgaaaagcacttgctttggcttttccaagctagctttccagtaactcaggatatgatcccaaaacggaccaaacaagcagactccgctgcaaaaggactcaaacatagactcaagaatggttctgtcctcttctttattcagactcctgcaaacgatatgccaacgtgacaccagcgaatctttcgcgtccctgcagatgtaaaccaccttgcaaggagagtccttgacagctacttgcagcgtgtggaaaggcgtgtgagtagagaacaaccttggagatgatgatgagagctaggtcaagtccggtgtttgggtatcccggtaaagattcatctcaaggacaggtacgaggttgtgaggattgttggatagaagaggatggctcataggatcatcatgagaagggttctttgttctctcaaaaagcgcgacagtgagtgccttgagccacagggtgccggattttgggtacgatgcgacgataatatcagtgtcttgaggcttaaaacctctctggaaattgagaacaccttggagaaagttgtagtaataccaagagccttggtacttgcagaggtttcgaccgaggtaccctttctctgaagaaagtgaagagattagagtctttgtttcttccgttaagtcttcgtctctcaagttcatccacttctccatttttcttttgtttttacttttagcgacttattttgaatgctgtgtttgcttcaaacccctagtatcactatttatattaaaatgttaaaatatatgatccaataaaacgtttacacatcacttttaaaaatatttattttattttattacgaacatgtatctcaaaaatcgagaggcaatagtgacgtacaaaaacaaaaagagagataacgtggtaggggattatgaaattatgaatcagaaattatagtgcatgtatttttatactagaagtgtaatacatacaaaaaaaagttcttttactcgtgaaaagtatgtcttcctataactagcatacgataactataaacttgatatttttaaaagtaaaaattctgtcttctttgtctatgagataataggacattaaaatccaaagattccaaaattatcttttctgctgccaaggattccattcactttccaactggtatctaccatcgatttttatctatttgtacctcagcctgcccgaatggtcatttgatgattcaataatatacaatgtcctgacctatacatatcacttagggcatcacttattcactttaatcgagagtgtttatattggaaacgtacatgacatcgcaatgtcagcattaattatttaaatattttaatatattcctatcgcaagataatgtctaagttagattataggttcaacattctgcaactttcatatattttttttttaagctggttaacaggttagtttaagtgtttgacgtaaccataagagaattgattcattttagcttgtgtgtaatagttggcgggaagggtaattttgttggcatactcttctctgctatttaaccagggcttgaataacaaatatggatgtgacattgacacagttcataagcaaatatacaaaattgagggagcaaatttacgtaacattttgtaaaatttacgtgtatatataatttatcattagcttacaatttttatactcgtagaattgcacaacaccataattaatgcataaaatctccatttataattcaaaccatcatttagaaattaagagatgaccatatgtaacatgttagggtagatgtgattatggtgctaaactaaagaagaagactagattgttggaacgaaattagaactcacggaacacgttggcatgtccaggagaatagttatttacatgacatcattgatagcataaaaaacatggataaagttaataacgttcaaatggtcaccataattacaacaatttcctttaaagcattcacaacaatttctgatctagaatggttatatctactcgaatttgaatggaaaaaaaataaaaataaaaataagataaaagagtcaaccttatgtccaattcaagataattgttaaaaaaacaatccaaaattcgatttcagtcgttcataatttatattcaattgggatttgggatcaagataaaagagtcaaccttatgtttttatgagaggctagagaaaaaatagattatgattaataaatttgatagaagaaacagagtaaaacgttatccacaggccacagcttgcacgtaagtaatacctatacattatcgtttattcgttatccttttttctcttactaaaccgtatctcttcgcttatctacatgtgtaatcctctacctccctctatatatatacaaaacacaacttttatcaaaaaaaaaaaaaaaaactagaacagaacacaaacatctcgacaagaactctctgttctttcttatcaaaaaaaaaaagaactctctgttctgttcttattgatcaagaaaccttttcttgtccttttggttaagacttcaaaagaaagatcaaatcagaatctaaacataattgacaaaagaagaagagatgaacattcgcgatggtaatcttatttcgactacaaaagaagaagagggtgttattggagtttcaggatcctctgcaaaagtttcatcttcatcttctatctctatgtgttcatctgatttaacagaggatgcttcttcttcttcttcttcttcttcttcttcttcaaatgggcctttcgacgatctttcggacctcatctctcagctccctatcatgtaatgacactaaatctctgggtgaaatattatctcacagtccttattctctttgatcgttccatcttgtctccatagacagtgttaagaatttgttttcttattgtctttgttttttttcttacagtcaggtcaagaaaggaggactttcaaagtattataaaggcaaatctcaatcattcacatctctagcaaatgtcacaagtctacaggatcttgtgaagagaggatcaagaacgaagtcatgctgcaaaagggattatttctatggaccaaaggcaacaatctccatgaaagccacgagaacatcctcaaaacattcaaattcaagattaacctttaaaccatttcatgattcacccaaatcagttcaatgacatgacaaaacaaccttctgggttcagtttaacattgtattcatttgtatacaagtttgccccaagctaaatgagaacagagagaatttagggccaaataacgccttttacactaattgtgcagaaaaattgtcaaaacgaattaaaaacattttcctttgggtcgtttacttgtgatgtgatcaaatcttgtaaaccggagtgattccaagaaggtggaagcatttccgcatgactatggccgttgcttcacaaagtaggagacggcttgtctcctctggtgaaccattgacctgtaaaagatcatgttttaagtgagatcaacattatagtggttgattatgcagctatgcagtctaatatcacaatatcaaatgagaaatgtagagtcttgtgaattgcacacctgacaattggagtagaatctggtaaagtgttcagataaattgtagaggtactcgcacagaacactcggtaataagttggtacaagcttcctccaccgtctgcaaattgttcacacatgagtttcaagttcatcttgttgccgagaaaaagaagccaaatatgaaagaagtatctaaagagagcatgtgttacctcagcaaatcgaagcaagtgaagccccagtgctcgttcatctgcatgatccaatgctaattttcctgtctgcaatgaataagatgttgaaacataagaattactctttattgtactgcgtatggtaggaactaataacagacttcgtaggtgttcgacgatccatatcttatgaaaatgtgaaagatagcacaaccaagaaactaaaaaggacaaaaaggcccagggtgtatacaaaatgaatcttgagactccaaaaaattaaatgctcactatagacactggcattaacttaaaagtttaaacacttctgaaaattgtttaagctttcaatttcaaactaaatagtttataacgtcgcatttccttgatagagacaatgggaaagtttcaggggcagccaagaggaacaaagaataaaattcagcgattcatgttcatgcagctaaagtacctttttcagctcatctatgtctttgccagactttctgatgattgaacagatccgagcatgggcgtaaagaaggtaaacggctgtatttccctgctcatgacatatgatcaataaggttgtgtaggtgactgcaaaatgcaaatttgtaaactaggtggcaaatttcagtaccttgtcattaagcatttgatcaaagctgaaagtataatttgttaatctgttgttcttcaggtcagcataccttgaaagaatattaaacaaaaccgcacattagcttgtagccatgaatataaaccaactgtcaaaacatctggcaaatcattcatcataattgagcagccttaattataaaacgtcaccgaaaaccggaagatactgaatagaattcactattatcagcagtagaatagagatgatacttacttgaccgcaccatatccaactgcctcagctgtttggtccagttcttccggtgtccattctttgtccttacctaaacagagaaaaaacatgtaaggattaatagaccaaataataactcaacaagtgatggttcaacatttcaaaacgtagagagttttaagacaaagttagataccgcgctcaataagggcaagtttactgcgagtcttggcctcatctagcaaatcaactaggcggactacatctgttgcccgagttctaaatcgcttgccatcttccccaaggacgagaccaaaaccaacatggttaactctagggtaagttttatcattgtctggaagccaacctgcttttctggcagcctaattcacagtaacatgataaccacagttacgactgacagtttcagtcaatagaaaatatttcacaagacgtcaaaaacaataaaatattcatcaaacctactttgaagaacatattaaagtgctgctgctggccaacatcggtcacatatatgatccactcagctttctcttcattgagccggtacctgggccaggcaaaatttagcaccagcagacaatccattgaacaatatgcaagttcagatcaaacttcagtaagtacagacacggaaagtcataacatgtgagatctattttcaaaagatcactactaaaatccggatttcatgaaataactaacgtaaagataacccaccaaagagcagtcagatctgttgaggcatagttaaaaccaccatcactctttacaaccatgagtgggatgtcgaagccttcaaggaaaatcacacgagcaccttcactttcttcaaccaaccccttgctattcaattcctcaattactttagcaatatgagggttgtaaaagctttctccctgtcatgaattaaatcaatgcatttttcattacccatccatgtatctctttttccattatatctcaaataatgttgtacaggtccagctattactttaccttttcttcaagctcaactcgaaggcgttggtaaaccttggcaaactcagttcggctgatgtcacagatcttagcccaagccttacggtaaacaggatcaccaccctgcgccatagaaaggaatatattaagacttgtgagtaatttagatcttgcaaccaaaggcagctgcaaattgagacactgcaaaacagaataacacactagtgattatttacctgtagacggaccacagcctgttgtgctttttccttaaaggcctcgtccagatcaaatttatgttttgatgccttgtaaaacacctatcaaacgacatctctaaggttagaaactatattgctttggttcttcacatgcaagcatattatgccaatattgctacataataaaactgtaaagcttgagagggcatattatagaaggcagctgacctgaagatctccaattgctgtctcggtcacactatctgtatcaggaaatttctcaaagaggtactcaattagcatgccaaactgcagaataaaagcagcttttatttcgctgataaatattggaacacaacaattacaaaaaaagaaccaaggtcaaaaaaccatttgaagagcagaaaagtagctacctgtgttccccagtcaccaacatggtttctgcgtagaacttcaacatgtgagtactcgagcatgcgagctagagtgtcaccaatgatagttgatcttagatgaccaacatgcatttcttttgcaatgttgggagaggaaaaatcaactacagctctcttaaccgaaagagtaggtgcccatgtgtcaactccatcgatgagcatattttcaatactctgcaaatagattaaaaaacaattatgctaaacacacattttatttacatgagcactagaaaaggactacacaattacaacaggagcaccttagccatccacttagctgatagtacaacattaataaagccaggtccagctacagagcatgattctaccatctcagaagtagggagactcttaacaagggcctatgtgaaaaaaggatcagaataaaagttaaagaacataccaaaagccacgaaattataaagaccaaacaaacgaacctgtccaacagctggaggacccttgaactgagtaccctttcctttaattatggaccatagtcccattgcgttgttactgcagacaacaatatgatgtaagaatataatttgacaaagagaaaacaacttaattagaactataatttcactgaaccaagtgagagggggagcaccattggtaatctccaaattttccaagagcggaggcagccaccaagggctcaacactaggttcatcaggaaccgttaattttagagaaacatcaaagagcttcgcgagttgacgtttcagatttcccgtaaattcttcattctgtcaaaaagaaattagtcatgaaacagggaaataagaatgttataaactttctcctggattttaaaaaaaaactgctgacttacagctgccattgctaccacggacttagctctggatgagaaagcaaatctccaagccgttgctctcaatttttctgtctaggttacaaaaccccaaagcgaaatcagtacatccaaattgcaattaaaaaaaacaaacaatgaaactttgattgtaagcagtagattgctcttctttattggagttacatcaaatcattgatacagtgcacacaaaccgtgttgaaatataaacaaaaatgaacacttaccctcttcagcatttctatagaaactaaaacgaaaaccacgcaaacacaatatcatttcgcaaagttccaacagttagaaaaaaaatgagcttagccaagaataagaatctaatctcaacaaatggggagaatgtagtcgagcagagataaaccacaagtagagagaaaaatggagataagaagagctcggagagaggattttaccagttggagaagaagaagagaaataagcaaagtgatgatgggaacgagaaaaacgattcaaggagaagagacaagacggcggtggtgttgctgtgaccggaaagagggttaggcttattattgccatttccaattttctgtctctctctttaatttgtttccctttttttatttttttattttatcttctttttttttttaattgttcaggtaattttcgtgttgggccgaaaaaatattaggcccattatgccattaggttactgtgtttattaatgcgatccgattcgttgaacatttaggctaaagttgaacaaatcaacggcgaatttgaggaagattaaataaataagaagggatggagaatcataccacggtggtaaaagtcagatgatcggcggagaaacggagctttgtcgttaaagtttctcttctgttttcgtcttttgggaaaatgaacatatgatgatgaattttaagggttcttttgattatttatttccttgttaattcgttgaatatgtctcttaaccaccggggtaatagacattttgatcgacccgaacctgcaaacttaattaaaccgggctggactattcggatagaccaactaaagcgcggtttacgtcaaattggctattcagaatctggttttcgtctgaacagatgaagcaaatatactctcagaatcaagcttatattattgatactgaagaggcaactgcatatagatgcaagataaacaccaagtgacattaaggtaagaaagtagcacctgaaggattagacctttactttcatcatcagcaagaggagatgaggaaaaactcatcactgactcaaggatggagtttctaatgtaaatttgagcatcgtcttctaatatcagttgatctacctttttccctctggatgactcaaaatcgtctggataagcgagaatatataggaaagtccttgctttccatgttgaagctttcatgcctcaagaagctcagcaaagttgggtgagctctggacataaatctgaaaagtacgaccaacacaacactgtccgttgatacggttgaaggacacggcggtagtgtttgaaggcattaataggtgttgggccgaaaaattaataaatcataaaaattaacctttatgattctgaaatctttgtacacaacggaagtcttcttcatatagaacttgtgacaatcgacacaagtctcagaagctccgagattatgagaactggaataataatagcaatagcttcataaacactaaacccctaatctttctatcaaacgtttctcaacatatccgatgtatcctccataggagaagtattaaacgactacgcaatagtttcatttgttgtccctgtaatgagcgaaagcaagaagaggactaacgtgagcaaagcccatatcaacaacaatgaacagagtaatgaatcaaagagttgacttaataatacctcttaacaaaagagtcatcctcagtgtttatcacaatcttttcacctgcctcgagataagatggtacctgaggtattcaaggtggaaccaagagttattttggtatttagatgaaccagactagttcctgttacatgaaatttgaagatcaaacaatactaatagctccaacttcctagaacgacatcttacctgaatagtggaaccattatccaggagagctctcttgtacctgcattttaagaaataaggcgttttctcataacttataaacgattgattcatggtgttaaggaaacaaaatggtacatgtgttaaacaaaatggtacatgtgttaatcaataatatgttaaacgcttataccgtatagagaaaaagcgttcctgacttttgagaaaaaggacataccgaggagctgatgttaggcctttcattggaagttgtgtttctacaactgtgcatgtgatatgcttagggatagatgcagataaagctcttccatcatacagctgcaactgaactttcatttcctctgtcaatcacgaggaaagaagggacaaagagatacatgacaaatatgttagtatttctagcacatgcactcaacttgctcaacaatgactgtctgcactcaagagtatccatattgttgttgagacaaccatcaacaaaggaaataagtatgacatgcaccacgaaagatatcatcttgctaccaaccttttaaatatacagcagcttttccaaatatgtccaatggcacttcaacttgctcaaacgtattaggcctgttggatttacataatcaaggaaatcaactttagcaacacaagatcctacagtgtttaagttgatataaaacaggtaatgagattacacaaaaaaatatggactcactcaatcagatatgcagtatctccctctgcatacaaacacgtgaaagatttctcttcaacaaaaacttctgcagtaaattgatgcaatcaatcaatatcacaaaaaaagtaatcgacctatcctacgatgctaataccaaaatggttagagaacccaaaaaaaacaacttttagtaggtaactgatgaattaacactaagctatggaataagcaacatactctcaaccgactcctcagatccaaaacgcaagttaagcttattcccagtgtcaacatcacgaagctcaacctgttttccacagagaagagagtttaggctaagagacggaatatcaacaacagaaaaatatgaaataatcgatcaaaacattagactgttgattaaagagtttcaggtatgcatacctgtatggaagctcctcctctaccttgttgcttatgctctgcttctacaacctacaacatcaaacaaaaagataattagcgtttctcaatacctggaactaaaaaaaactgaaggtataaaaccaaacgtccaaatgactaacccgaaaagtacgccctgaatgtgcaatggtccatcaaaattttgttaaatcatactcatccaaaaacgttcagatgtaaggagaaaacttcaaaaagctaacctgttcgctcaattacatttcctgcccttagctgaaattaacaaaccaagaaatcagagtgcgaacatggacacagatcatctttactcgtgtgagctcaaaaaggttcaataatagtttattcgctagtcaaatgagtaagaaactttaatctctgcagttaaactttacctgaatcgcgttaaccttaacaccgcggcgttgcagagcagaccacggagaatgaagcggaggcgtttctcggcagcatccaccggcggcgtacggggttgatgacaacaacgacctgctcaaagaataaagagacctcctagtcgttactgccccaggagaagtggcattagagaaggagaagagagatcgagagattgagattctcttgaaatggtgcagccctctcatctccgtttaacccttgcaatcggaaaactgattctcgctcgctactccattgatcgagaaaagaattgaaaaaaacaacaaaacaacacggcgtcgtttgctatgctgacgtcgcaaggacgccgttaagacagaactaatggttacggcgccgttttcgatgctgatgatccggagctaatgggttcgtttcacgagcggaaagacggacaaggccttctaattataatgggccttaaaaagtagcccattaaacttgttatactttcttcaaatacttgagatgaaagcaactgtcatgaacaaaaaaaaaattcaatacattcttgaagttcaaattctatttatacagattatattaatactacttttcttagaagatgtcatgattgtaaagcttacaagttgtttgcttgttgtccccctcccactataatgctttgagattaagatttcaactagtttaatttttatttaatcaccaaactattgaaataatatgattactactaacagcaactaatgatttctcaaaggggaaaaatgttatttaatacttgaactttcaaaaaatggccaaattaatcgtgcattcttgaaatggtcgttttatacctcaacaaaaagttgacttctaatttaacctataatttatcgttgatttctaatttaacctataatttattgttgacccggccaaatcgactcaccgttaacactccttaacagcgctcctaacagccgttacaaaacatggcctaacagctgttatcgttggtttaaggacgaaaacagttgttagttatgctgttaggagagctgttaagaagttttaacggtgagtcgatttggctgggtcaatcataacttataggttaaattagaagtcaactttttgttgaggtataaaacggccatttcaaaaattcacggtaaatttaaatattttttgaaagttcaggtattaaataacatttttccctttctcaaactacattcttttttttaaatgattttgtcaaagctacgctgaataaaaaaaaagtgaccgagataattttattgattcaaatgtggaaaatcttagaacagtacataagaatgaaaaccgaaataaaaaaacaagaatatgatttttataacattaaaaagacaaaaacaaatttgtctagaagagaaacccaaaggccaaagtggctaccgaggcgaagaaagcggggatggccaaggaagcatcggaggtaggactcggagctggagcctccaccgcggcagcctgttgcaccgcagagaaagccatcgctgccaccaaaaccgccacaaagagtctcatcttcattgcctccattgggttatctctaggtggttcttgagaaagcacgaagagactatatgtttagtgttttgtggtgtgttttgatgtgttgtgacttgtggtttatatatacacatagatgcatgtaaggccaactgtgtaattatcactttacagtttgattaacacatcaacacaattaatcattttcgaattgttttaattctttgtatttggtgaacaaaaactttattagcacatcaatctctgtaaagccaactgagatcttagttgaaaaagaaagaaaaaataaacagttggaaagagtactgcagctgattttagttatgtcatcgccttttgttttttattgtagaaatgaatataatatgttttagttctttgtattttttaactaatacagttcatagtaggaacgttttctctctgataataagagtgaaagaaataggaaactgtttttttttttctgtgacggtcgtgaaatgaatagaaaatagataagagaagcaatgagctgtttggaatttgattgatggttccatgtgctctctggtatataattggctcaatccatttctcccccaattattgctcaatattcgatgaaacaagaacttataaacgtaagtctccattttataagagaacataaagatgaattaggtattttctaacaaaagtatttatcattttttgtacttctacattttgaaatttatctgttattctttaagttttagaactacgaagtgctatcatttaatcataaatagtttcgtcacgctatcaaacttagttccactatatttctctgattagcaggtacaagctcatgttattgcctattgcccatacacagtactggccatacaagactttcattcaaaccaaaagaaataaagaaatgaagaaccgtgaaactctcccatttacactagccttttttcttggaagacaagaaaccaaaaactcaccacaccaaacctagagacccaagaaagttagcttaaaaacaaacaccgtccttgatcttagagttgattatatctggatacaaatccataacgattgagacttgctattaaatgaaaaatgaagatatctgtctctcgcagagcgctcaaggagtacagacattttaacaccaataccgaggtagctactttcaataccacttaaaccggatgattaactcaaaacctcttgatctttactcatttttttccccagaagttatgaacgaacacaaaacaaatctaagacagcaacatttgtcttaaacatctcgaggtaaaaccgaaatgatggtctaatcatcaatgactatacttcaaaaaaaaaaaaaaaaatctagacatattcacatggatacaaactgtaatcaagaaacgagattcaattttcggcaaatcgcaagaactacattaagaacagagagaaaaaagaggaattttacaaaaggaaaaaaaaatgaaaaactttacaatgaagataacattatcgagtttgatgattttgatcactcaaaatgcagacgaaagtgatgctgatatgtagcgatggaagaagaagaggaaccataaacataaacgtgatcacgatcgtcttccgcagtttcaggatagagcaaacctggagaaggaagacatagacaagtcaagagacataaagccaatcgacctaattgctggagcggaaagaagcagactagctcaagcatctctcggctgcttatacgatcggacggtgggatcaatcgtaaacgctgccaaatctcagccgacaaatgggctacagacataaccgtctggccgttgaacaccatgttcatacacacacagaaaaaaaaactgtaactgaatgatgattccgtgattttcgttcaatttgtctgtgtatgtgtatacaatgtacagaggtcgggggcttttctagatcttgccacgttgacttccatgtttagtcatcatcattgatcgaatagttcctaatccatttttaaaagtattttattgattaaacaactaggaaataatcaaatatgaagccttttttgagttagtatttgaacaaaattaaaggattctacactatatttcgtttcgattcttcaacaataagaattcttgcaaattattagaagtaaacctaccggagatctgttaatattagttcctttttaatgtatttttgggttatgttctttagtgaattgatgaaatattatgttaacttctagttgaagtgagaatgatgagactcgcaagctaatgtgtctatagaattcaccttaacccattgagctacattctctataggtttcacctaaattgcaagttaccactctttgttctaagtaaaactctacaaaggaacattcctaagctacttattgatcctaacaatttgttatagcgttgatgataaaagttaagctatacataacaaatggagacatctttcaaaacaggcctactgttagaggaattagacgatctagctattaacaagtttagacctaaaagtgagaatgatgtggctcgcgagcctatgtcttgttgagtttgtcacaatgattgattatatattattaatataagcttgagtttgaattagttataagagtgtgagtgatttgtagcagcaatatgtgtcaaactagatctttctccggccgtataacatcaatggaacgacttcttggttggatctttcttgctcttacattactacttcactcatcaattcaagcaacaacatcaatttctcatgtaaatcactaatcattaatcctgtgcatgaatataccttttcatttgcagaatttctttatgtttggatttggcatgtcttccaggtttacgttgtatatttaggtgctaaccggctaaaaaacgctgctttggcttcaagccaccaccttcatcttctttctaaagtcttcacaaggttaccttcttcaaaactcatctcttctacagtcctttttttcttgtcagtcaatgatctcgtccatgaatttttggagatgtcgttgtagcaaagacgatgcggaacaatccatgttgtacagttacaacaatggcttcttaggcttctcagcaaaactcaactcaacacaagctgcttctttagcaagtaatacttccatctttatattttggcggcaatatagttctcatcattaaagaaatcggtttggttttggttatccttgaataacgaactttttatcggaaccaataaacatgtaatctaatcgaaccagttccatttcgttcagttacactaagaccggtttggttaaccgggaaactattgtagaattgaaccaggtcataacggttttcaagagcaaaagcttgaagttgcacacaacaaggagctgggatttcttaggtctcgccgttgacaatgcccgtcgtactcctccgccgcagctcgcctatggatccgacattgtcgtcggaatcttcgatactggtctcttgtttattcccgactcttctttgtttcagggctctcattttgagcatttcattgaaacttttgttactttcaattttaggaatctggccggaatcggagagtttcagggaaacgccggaggcgaaacctataccttcgtcatggaacggaaaatgcgtcggaggggaagactttgatccatctgtacattgcaatcgtaaattgatcggtgctcgattttacctcagaggattcgaagagacgtacggaacaattgactttacgcgagatcctgaataccgatcgccgcgagattacctcggtcacggcacacacacagcttccaccgccgtcggatccgttgttcgcaatgtctccggcttcttcggtcttggacgcggcactgctcgcggcggagctccattggctaggctagctgtgttcaagacgtgttgggggaaggatctggaaggtgtttgcacggaggctgatatcttagcagcttttgacgacgccatccacgacggcgtccacgtgatttcggcctcttttggctattcgccgccgttatctccgtttttcgagtcgagcgcagacatcggggcttttcacgcagcggagagaggaatcagcgtggtgttctctaccggaaacgatggccctgatcctggtgttgttcagaatgtcgctccttgggcggtttctgtcgcagcttcgacagttgatcggagttttcccaccagaattgttatcgacggtagtttcactctcacggtactccccttaaatcctgtagtcagagtcaaattactgaaagattgattcttgttagcctcagaattagaaagaacaaaactttgaataattcaatctttcagggtcagagcttgatttctcaggagatcactggtacattagctcttgcaacaacgtatttcaatggagggtaattgctcaaaaatcttctaaaatgttgtattcgaattcaattcgtgtcactttctatacatttttagaagacacttgcaaatccgtagcttattagcagcattggtgtataactgtaaggactgatatgtgcagggtttgcaaatgggaaaactggatgaagaaattggccaatgagacaataattctgtgcttttctactttgggtccggttcagttcattgaagaagcacaagctgctgctattagagcgaacgcattagcgctaatatttgcagcctcaccaaccagacagctcgctgaagaagtagacatgatcccaacagttcgtgttgatattcttcatgggactaggattaggaactatcttgctcgttcgcctacgtaagccacattattcggttatacattttgtttccatgcgctgagctaaaaaacggttagagaaaagaaactcataagaattcttttggtaaaaatgaagagtgccaatggtgaaaattggaccgagcaaaacggttatcggagagactacagcaccctccgttgcatatttctcttcaagaggacctagctcactatcacctgatattctcaaggtacaatcatctactttttggttcattcagtctgttgcatcaagttgtatgtttgagaatgcaattgtgttgaagtatttgagatatagtgagtttaaaccagaaccaaatttgtcactttactgaatattgtttttttggtgtatcgatggtttatgcagccagatattacagctcctggcattgggatattagcagcatggcctcctagaactccacctactctgttaccaggagaccaccgatctattgagtggaatttccagtcgggaacttcaatgtcatgtccccatgtggctggagttatggcgcttctccagtcagctcaccctgactggtcaccttctgctatcagaagcgctatcatgaccacaggttctatttctaataggccctcctcatatgttgttcttacaaacccaagtctgatattgttatatcttatttccgtttccagcgtatacaagagacacaagctatgacttgatcctctctggtggttcgatgaagtccactgacccgtttgatattggtgccgggcatataaaccctttgaaagccatggacccaggtctggtttacaataccagaaccgacgactatgtgctcttcatgtgcaacattggctacacggaccaagaaattaagtccatggttctccacccagagccttcgacaacatgtcttccgtctcactcgtaccgaacaaatgcagatttcaactatccgtctattaccataccgagcttgagattaaccaggacaataaaacgtactgtaagcaacgtcggtccaaacaaaaacacagtttatttcgtggacatcattagacccgtgggagtggaagttttgatctggccgcggattctggtgttctcgaagtgccaacaagaacactcatattatgttacattcaagcccactgagattttctctggtcggtatgtatttggggaaatcatgtggacaaatgggttacatcgagttagaagtccggtggttgtgttcttgagcaacgctggttttcttgcaagcagttaaattagacggaaagtcactaccgtagggctcaagttgaaagagctatggtttgtttcttttgtttgagatttcccgggcacactttataaataggaactataaaaaattgccacaactggtgaaacttgtttagtgtatttaagcatttttaccaagcacaatttacgattaatgatgatctttagtcttctttaccatcaataatccaaagcctaatgttaattacagtgacaacggtttggtttccgtttaagtttggtgttggttccccctgaagaatttgggtcggtttatttctggttccgaatcaaattggttctcgtcaaatcaacatgttttatgataatctaggattctagggtttcttggctcctctgttaaatcctctcatgaaaattgaagattggagtttgtacgacttggccaaaatcttatgattaaaacagttcaacgagtcagcttctgaatcatctggtctcatccaggaagcactaaggaacgagctacgacggtaactcccgaacaaatcaacttgtataagtttttgtgataactataaatgtaagcttttgttttgttttatgaacttctttaggttctctaatccaatcgtagacttgtcctttggccactagctgaaagtttgggaatcgagagcattggttcacatggaccgtattagtcaactttcggatgatttgctcttgcaaatattgtcgtttattccgggaaaagatgttgtggccacaagtcttttgtccaaaaggtggcagtctctttggatgttagtttcggaacttgagtacgatgatagctaccacactggtgattataagagcttctctcagtttgtttacaggtctttgctatcaaacaatgcacctgttataaaacatttgcatctgaatcttggccctgactgtcccgctatagatattggactatggattggttttgctcttactcgccgtctgcgccagctgaaaattaatattcgtacttcttccaacgatgcgtctttcagtttgccgagtagcctatatacctctgatacattagagaccttgagactcatcaatttcgttctattggatgttccttcttcagtttgtctcccgtctctcaaagttctacaccttaagactgttgattacgaagacgacgcatctcttccaagtcttttatttggttgtccaaatcttgaagagttgtttgtggagcgacatgatcaagacttagaaatggatgtcactttcgtggtgccttccttacgacggttatccatgatcgacaaaaattatggacaatgtgatcgatatgtgatagatgtcccttctttgaagtaccttaacattacagatgacgcagtttacgacgtccgtcaaattgagaacatgcctgagttggtcgaggcacatgttgacattactcaaggagttactcacaagtttctgagggctcttacttctgtccgacaactttctctatgtttatcactctcagaggtaatattattgaatctgttttacatattattattcctctcaatatttactttgtgttgttgttgtgtatattaaaaaaaacaggttatgtgtccttctggtataatcttcagtcagcttgttcatctgaacttgtctacagttgttaaaggttggtgggatcttcttacttctatgctccaagattcccccaaactccaatctctcaaactcatcgatgtatgtgatctctataatatgcttttatctggtttagtttcccaatataatttgacttataactctgtctgatatgttggtcttagaaacaacatgagtcgggtctttgtgggatagaaaccccaattggttggaagctgccgagttctgttcccgagtgtttgttgtttagtctagaggcatttgagtggattggatacaaagggaggcgaggagatagagaggtggcaacatatgtcctaaagaatgctgcttgtttgaggacagcaaagttctctccagagtctactgatgtgggagagaagtatcatatgctcaaggagttggcatcagtacctacagcttcaacttcgtctaagcttctattcgactgagaatagtaatatttaggtttcttggtatctctcgtttatgatttgtgtttagtttttgccaagactggtttaacaaaaaaaaacgcttgatgaaccatgtcaaacccagtttgcttctcttatgtaactcaaaactcaaaaagtgtgacttggcgtctaatagttttggtaatgtatatctcaaacgaggcatgaccatctctgtttttagattgtgtcaatgacacacagcttctgatctgattccctgaaacattgcacagctttaccatcttctcatctatgtttgacccagcatattaacgttcgcaaatgattggtgacttcaaaattagcacaatctgtatgtaacttaattacaaaatggtaatttggcattgcaccaacacagtattttgcccctatatctctgattagggttttacttttcactgaaacaggcctattccttataaacggcgaaagaaagagaggttttcgaccagggtggacacgaaacgaatattcgggattttggtagtatttgtggtccaatttgctacgtccgaatagttaattttctgttttgtatttgcttcgaaagtaaccgaatatcctgctgcccagctatccgttaaaatctgagctatttgtcggatattcgattttttatatttcattaatatatatatattaaaaaatattaaaagaaatcataaatttaatccaaaataagtaatatttcattgattttttattttattttaaaaactaaaagtttaatttgatgaaaataaacttatatataaaaagtgtaacattattaatatatatatgtaattatctataaacatatatatatttataatggatcggagcggatatccacctatttaaattttattatttgttatttgctctgcttttaacgaatattacttttcaatatttaatttacctcatacacttacggatatccagatttttcgaatcaaatcgaaccgaataacggatcaaatcgaaactaacaaatattttgccaagcacgaatctttagttcgcgaatttaagctcctggttactttcttctagggttttctataattatgattcctctcgtctattctagtccttaattagtcgccgacgacaaaaagaaaaaaaaaaacctagaaagcttgacaaacaaggaacgacgcatatctccaaacaatcagtgtaatttctgtgattctctgtttccttttgttgtgtctttgattcggatatttgtttatcctcaagtctttcatcgtttggttttgtagtgttgacatggacatcatcagtcaatgtccggatcacttgctcttgcgaatactgtcatttattccgacaaaagatgtcatcgtcacgagtcttttgtccaaaagatggggatctctttggagatgggtgccaaaacttgaatatgattttacaagacaaaacatgagattcgtgaagtttgtttacaggtctttgctacagaataacgctccagttctcgagagcttgcatctcaagaatattatcctttatgctgaatgtcgtaccgtagatattggaggatggattgatattgcagttagtcggcgtgtgcgtgagctggaaatttctattaattgttcggatgaaaaattcagattgcctagtagcctatatacatgtggaacgcttgagagcttcatactcaccattaaacattgccatcttgtggatgttcctttagcggtctgtctcccttccctcaaaaaactacaccttaggtgtattggttgggcatacaacgcaactcttcttaggcttatatccggttgcactaatcttgaagagttgcgtttagcacgacctgatgatgatggcgactatattatgatacatgaggcaggcagtactatagattatatgtccatctttgaaagaaggtatatgtttgagtttatgtttgatcaaatgtttggaaagggtagtagtaatgggatcaatgctcctttgaaatacttttctatttctaataattatcgtatccacaacttccgtgggattgagaaaatgcctgactgggtcgaggcacgtattgcggttactggtggaagtcacaagtatctgaaagagattacttatgccaaaggcctttatgtatgcttatcagtctcagaggtaataacaaatcttgtgatttatttacatatatatatattactgttcctcagtaataatatgactgatgttgaaacaggttatgaatccttacgacatgatcttccacatgcttgttgaccttacgatatgtacatgtactcaaggttggtgggatcttcttactcatatgctccaaggttcccccaaactacggtttctcacactcaccaatgtatgtattctttttatttacttttagtttggaaaatatgattttgagaaatgataactaagtctaagttgttcttaattggtattaggaccattgccgagaacttcctagtttagagaccccggcctgctggaaacggccgagttctgttcccgcgtgtttgttgtccagtcttcaagctttcacgtggagtgggtataaagggagacaaggagataaagaagtggtaaaatatgtcctgaggaatgctactggcttgaagaaaaggattttcatttcaaaatcaaatgattttggagagaagttttgtatgctccaggagttagcatccgtaccaacgccttcgccatcatgtcagcttctgttcgaccgaatattttagtctggagatcagagatcttgttgattcttagatatttgctttcttgctctccaaaaccaagtattaaagaatgattataatggctcggtttacttgtggtttggttcaatttgtgtgtttttaacctataacattttagttcggcttactaattcaaacttgtttggcctgagttatctgagaatcgataatacaatcagatatctgatcagtagataatgttttcagatggagatcatcagtcaactgccggatgatttgctcttccgaacatcttgtctttctctactagaagtatagaagagaccttttttttttttttttgctaaaaatgttaattttcattatatgaataagaggcttttacaaaaacgaaaggcctatacaagagtagccgaggcaaaaaataaaacaaggctacaatagagattttgggaagatataaggttagcgaatccaaagcaccatgaggttgcgccatctctttctgtggtaacgagaggagatgatgttacgaatctcgcggtcgacaatcttgaagatgataagaggtgcgatcctaagattgttatggaggacattgttgcgctgacgccaaatgttgtagatgatagcatgggctgagacttttctgaggagggaaggcgccgaagtagaggaagaacgcatccaagagaggagctctgcccaagagcaaaacagcctctgtcgcggacataagcgagaaaacgctaatctccaaacctgagccgcaaattcacaggaaaaaaggagatggtctctggactcagtctcaatagtgcataagcaacaatcgaaagactggatatggccccaagaggcaagcctttgacgagttgggagtctatccaactgactaatccacatgttgaaggcatgcttaggaacagcacccttgaaccaaacagcctttgcccagtccaattccggtgctcttggtctaatagcatcccaagtccttgccgaagagaaccttgacaaacaacaccgccaacaacccaatcaaaggagtcttcaattgtagcaggagagggggtcatgatggtagagatgtgttcatggatggcttgagctggagcagaccgagatagggggagcttccagccattaacaccaagagcctcaaccaccctagcgttaagagggatgcgaagtgatctggagccataatcacccataacctttatcagcgggccaagggaagtccaactgtcatgccagaagtgagctatgcggccattacccaagttgcatttaacaaactgctccgccaaaggtctaaggaacaagagcatacgccaagaccatggatctgatggggaaggagccacatcccaaaaagacctgcttctaagatggtgatgagagtgccaagaaacccaaagcgaaccttgatgattaaagagaagccaaataagacgcaaacaaagcgttttgttccactcggagaatcttctaaggccaagcccaccttcattttttgggaggcaaagagcagaccaagagacctttgctcctctactaccatcaatgtttcccgctcaaaggaacctagcacaaaggctttcaatcttcttaatgcaaccctttggcagcaagaaagtggacatccaaaagttgacgataccatagataacggaagcaataagttgaactctacctgcgtaagataaacaatttgttgcccatgatctgaattttttggagatttttccaggagaggctcatattcagcgatgcgcaacttcctacacataagcggaagcccaagataccggatagggaggcagccttgcggaaaaccataggccgccaaagagtttctctcagcctgctctagaccagcacaaaaaaaatgacttttgtcgttgttcacctttagtccagaccaagaagcaaagtcctcaagagtctcacaaataccgtgcaaggaagaactaccaccatcaaagaatatcataacatcgtcggcgaacatcaaatgagagatggagagatcagaagctttcgggtggtagcgaatgtaacctgagtcaaaccgagaattgagcaactttgagaagacttccattgcaagaacgaaaaggtagggagaaagagggtcaccctgtcgcagccctttagcactcttgaaaaaaccaccacaacaaccatttacagagacagtgaaagttggtgtggaaatgcattggtgaatccaattaatgaacttagtagggaccccaagagcaagcaaagctgcaatgataaattcccaacgcaccgaatcaaaagcttttcgaagatctacctttaacatacctctcagagagatgttcctccaattgtatccgtgaaccatctcagtggcaagcaagacattctcagcgaggagccttccagggagaaaagctgattgagaaggagagataacacaagagagcagcttctgaagacgatctgtgagaagcctagcaatgactttgtacagggtattcatgcaagagataggtctaaaatctgaagtacaagaggcattaggaaacttgggaatgagaacaatggtagttgcattccattgcttaagcaagttacccgaaataaaaaattctctcacagcagcggtgacctaagcaccaatgcaactccaagctgccttaaagaactcaaccggaaagccatccgggccacaagctttgttactagggagaccaaagaaagcagccttgatatcttcatcagagaacatggcttccaaatcagccacctgagaatagggacatctgtaagtaagcagcaaattcatgtcatcttgctccaacgaataagggtcgttatcatcactcaggagattttcaaaataaagagcacagtggtcagcgatgccttgttgcgagtcaatttgggtccctgaatcatccaccaaagtagtgatagtgttaacagatttcctggaatcagccattctgtgaaaataacgtgtgttgccatcaccctccgcaaaccaagtcactcgggaacgttgacgaaaaaagctctcttcagcagtggcaaggatctgccatttacgttgagcctctaattcatgagcagcattttccagggagggattatcaagagtaagattttgaaaactcaaaagagtctcatgagcctcctcagttcttttttcaaggtttgaataattcagcctactaaagtctttgattggtttcttcagagccttaagcttctttgacacccggaacatagacgatcccaccacattagtcgagtaccaaacatcccacaccaaatttaaaaactccgggtttttcaacaaaaagttaaagaacttgaagggccgcttcgctttgatcgggtctaattccagcacaacaccacaagatgcatgatctgaaaaatctggcggaccaaacaaaccaaaagaggatgggaataagttggaccagctctcattgactaagatgcgatcaatcttctttgcaaccggtctagttttacttttattccaccaagtgaaagagctgcctttgtaaacaagatcagacagttcagcatccaacaaacattctctaaagtctcttatcctcctatccacattgagtgaaacatgcctagagtgctcatgaggatgaagaacctggttaaaatctcctagcaagatccaaggtctattaaaagtgaccggagaagctaccaaagcagtgatctctctccataactcttttctcttatcatcttcgttggccgcatataccacagagataacaatccaagtgcgagaattagggaaaagaacctcgcaagtgatcatctgcaacgatttggcaacaataacaacctcaacagatgggtcccataacacccatatcttccctaaatctgagaaaccatagttctcatcaaaaaaccaaccaggcagcagagcattaataaacttcttgtcctttggttgcttcacgtgcttctctatgacgcctccaaaaataggcctattgaccttaaaccattttttaaagccgttacgatgactaggaatgttaaaaccacaggacattccaacaaaaaatttgtgtacacatattaatgaccttaaaccattctttatagaagagaccttgattttacttactcttgctccaagattcaccaaaactacactttctcaatactagtcattttatactcattaaagaactttcccgactaagattgtctgtttggtcaatctatttagatgattggattccacgacatatgtaccagcgagtgatgctctttttttggtacctggtggttctatttacttccggttatgttaagaattttgtgaactaatcatgttttttttgggttagctcgcctctgccgtgctcgaagtctgactggtttggctagagttactgaaacagagtttatttgctattgtttaaaatgtttaggctcatctaagattaatttaggttgaactaatatatcctggagagtttatggatgaactaatttaataatgagtatcaaatatgagttggtagataaacagtagaaaactaaggcctcagagatcttggtggtaaaccaatcatcaactgaaagaacaaagttcttcatcaagagtagcaaatatttttattacatcactggcctcattcaaaaacaattcaaaagtggaacttattttgggaaatctatatcgatgatggtaaaatcagaagtagctggtttgtgatcacatctttcccgagggaattcaaagggaatccgaacgatttttttcgtcatcttttaccatcaaaaaaatttatcaaagaaaatgtcataaaagacctcaaaaaacgttttctaaatcggcgaaaaacaaaaaaggtgttatgatgatgatgatgagtcagaagtagctgattatataatcacatgtttcccggaggaattcaaagggaatccgaatgattttttcgtcatcctcaccatcaatatcaatactgctccacaaaagttccaatattcaaccaaaaaataaacacaaaacattcaaatctacgactaagaagaaaactacagataaggctttgctaatgagatcactaaaatcgaatttcgcagaaaagataagagatctaagaaagaaaacgctaatctagaaaagagagaacgaataagccgtgaagttgtttgataaatcaagaagaagagagaaaaaagttatatatatacgccgcgacgaagaggtttgactacgagaagaagccctaataatctctatgcttgacgaaacgctgccgtatcctcattagctctcttgggctttttgtttttttggatgggcccattactttatttattccacttttctcttattagtaccgtgagggggcaaaacaaccctgttcatgaattggaaccataagcggaaaaaaacatctatacgaaaaacctgattatacagctttgtttgttctcaaatatgggacacaagtgaaggaggaggatacaaagacagaaacatgaaaactactacataaattaatactatcttatgggcaatatattaatacagacatgagtatgctgtgttcttagcaataatcatgttgacctgcaatggatagattcagtctcaggtatcaaaagcttcggaccagaagcggtctgtcaagacagagagcgactttgtcgaatatataagatcatcggatcaacactttgcctactagcgacttccgacgaccaacatcttgaggttgcctgcctcctaacgaagatgcgggttttgttctaatttaaaccgacacttcttgcttcaattctaaagcttgaggtgttgatgttgttgctctatccttgacaaatgtccttaggcatccgttgattatgcgtggtgctgatccatcgcagaaccgttttgcaagatcaacagccttttatcacatcatagttgttagttagttcactacacaatcaaggtcatcatattgcaaagctgaccgaagatggatctacatttaaagaagacagatacctcgttaatgacaatcgggtgtcgggtttcaaggactgccacttcagacattgccaagtgaagaatcgaaaactccaatattcttccagctggtgcactctgtgaatagatccagcaacatctataaggcatttattgatagtaagagatgaaaaaatatgtagacaatcacacagccaaaataagaagctgcttctagaaactcaagctaattctaaagcaactgttgagctcaggctgcaaacagctaatattaatgagagacaatggaagaaactgatcagcattgaggctttgagtttggtggttcattatttttcaactatccagtatttgaccggagttgaagttcaaatgttcaatttataccttccaatctggcggggaaattttctcgatgataacgacatgactatcccatttatcaactaccgcagccaagagtttctttgcaaacctttggaaaaacacatagtgggaataaggtggtattcacaatttatttccgaatagcagcaattactacacattatatattttatagattaccgtaaaacaagtttgctgtacaccagctttgggggagctgaaagcacttcggcttctgcaggaaaaggagaataaacaacagttcacatgttacaagatgggaaattcccatgagcccatccaaacaagagtctctttgccatatatgagtaaagcagaagagaaaacttattttaagaataagagacctaccgattttcgattctttttcatcatggcgcacaagctcatcttcttcttcttttgtttctgttttaactgggggtcctccaaagctcatgtggttgtattccaacaaagaactcttgtcaaactcgtatccaggctctgtacaaaccgaacaatatgcattgaagttatatcacaagcagttaaatcacgaagaatcaagcaaatgatccacagaagttacaatgagattcctacattcatgactgtgttgcagatggaaacagaacatgataacaaaaaatacgtttggttgatacttacctcttcttgcgtttattctcttctcaaagagacgaattgggtcagagccttctaagcatgcggcataaagtattacactgtcaatatcatccagcaacatgatcagagagggtagatacatcattcatattgataggagataatcatatcaaagttcaattttttggctgaaatcaagtaaaaagagagaactaatggcttaatacttctaccctcgagaaaaattgactgttgagtgaggcaaggttctgggtttagggttttaggttaaaccttaaaacccagacaatggaacactaagttgagacttattcttgtcacaccaagccgcatagatgactgaatcgtttccaattctagtaaaggcgaattttcatttgcagctaaaatttccaatttttttcaaatcaacgaaacgattacgatttcagaaacgcttaaagtgagaaaacgaagcttacagagcgagctcgcgtgcggctcgaggactgcttaatcggccgctcttatcaatcttcggcatcgggacatctttcacctcctccgcggaaatagtcggcgtacggagagcgcttctagtcggagagagaaatagccgtagtgaagacgatgacgaacgtttatttcccgttcgcagggaaaccaagttcgttggccggagcgaatcaaccaatgtaaatcctatagaacggtgagaatctggtgaaacattactggagaagtaacagaggttcgaagaagaacgtaagcaaagcggcgagaaggttccctccatttttgtttcgagctctttttctgcttcgccgtgttagtgtgagaagcagataacgatatccgtaaaattgaaaaaaaaaacaaaatatctccggaaaaaaggattaaaaaaaaaaaaaaaaaaaaaaagaagctgaaacacacgacaacgttttagtctgatcaaaatgaaagccaaaaaatgtggcctatacagggatcgaacctgtgaccttcgcgttattagcacgacgctctaaccaactgagctaataggccactacgtttctaagtggtgcacttagatatttctctcggaatttcgtagattgtgattctgtgacagttttctttcaagacaagtatcaagtgcaacaaaaaaacatcggatatgggactcgtactcgtgttcatgaagataataaactctcatataactacttgactaaaacgatatattcgtatgcattagaaaaaacaattgtatataactaataaacatcacatgattaagttttaactgcaaataacgattttgttaccactgttaacgctcgttaattcggatgtctgattttgtcaaaaaaaataaaaaataaaaatatttaaaagacataaaaactaatttaggtattttggacaaatttagtagcacggatattaaataggcaaattaaaattaaatggagatttttcagcttttttcccataaaccgacctaaataactcgaatataaattgtcatgaccttttaacatcgtttaggtttctaatctttaaatccttcattgactttgcgctcgcctgtaaactttaagatgatctcatgcttttggttttagtaatcatctcaaattaagcattacaccaagacaaaatccacaagctacgggaacaatattatagaactcaaaagttgatatatgcgattgaacaaatatcaagtattcctccacttggaagattattgtttaatgtttactaaagaaccgttttaaaattaacacttgtcgcgtattagtcacgaaactgctgtaattctacacattgtggttgttgaaagtggttttgatttggtctttcgttagatgaagtcaatgtctactgttaactaattatttcaaacctttgttgagctgtttctttaccacataatcagattccatgatctttaatatcactagcagaaatcgacatgcaaaagtgtttgtttgacgatttctctactttaccgctggttcactgtaactgcttgatcaaacatattagtattatcctttgttaatgatatatattaccatttcgttaatcataacttcttcaataaaaatgtgaaaggtgcacaggccgacctaacggtaatatacgtatgagcttaattaatgtagtctagaaactcgaaaaatataaattgttaattagaggatctttatctctaaaaatcgatcattgacttttcgttcgaacgacgtgactaaattgtaatgccgtactgcttcaattatttccagttatgtataataaagaaagacccgcaagctacgttcggtaaaaaaatagacctatgtcacactatgtggaaaaccctaagtttaacgttcatgacgctatcaaaattcagagtttatcgtttaaatgatttgaccaaaactaaaaacagtacacgatcattaataaggcaatcctgttttcgaataaaatatgaaataagataggcccaccttgcctcacatctgatgctaaatttctagtcgttatataattgagatattattatctctctataaattgatggcttgacttagtattcggacagctttgaggttttgtcacgtgatccgacaagctacgagttctatatatacatacagagagcagtaagtttcttatactcaaaataatcatctctcataccactcatcaatattcaaacaatccctttctctatggattccgagtcggagctcatgatatctcttatttctcaactgttatctatcttaggcggtggggaagacacacatacaccacagctgaagtcaaagttgatagcacttacttgtcaactaatctctctggtcaactctctggatttggattcgcagccggagccggagtcgaagctcaaatcactaattaagcagataatttatgtcagcaactctgtttcagaaccaggaccagagtcgcagtcggtatcagtggtgactaaaatgatctctatcatcggctctatagattttgatctcaaggagtcagagccggagctcatgtcactcacttctcaaatattcgctctcatcatggcaatggacgaggaatcggagctcttttcactcctttctgaggtggccagtctcgtccagacggaggaacagaagctcatcaataaccaacaagtgccgcctctcaccaccgaagaagaagaaaaagatgatcttatctacggctatacagatgatatgaattgggagtcggagctcatgttctatatcatttctaaaatgatatctacattaagaggtgaggatatgtgtcaagaggtggcaagagatttcatagcatacgctaatcaacttattcctctcatcgaatcactggatatggattcgaattcagagccgaagcaggagccgaagatcacatcactcgttaggcaaataatctctctcagcaaggttgtttctggaccagagtcacagttggtatcactcgtgactcgaattatctctatcaccagctctacagacttggatcccacggagtcacaatggaggctcacgtcagtcacttataaaatatctcgtatcctcaaggaaataaaggattcggaggattcggagatggcatcactcattaatcaaatacacgacctcgttgacgcagaggagggacgaaagccagagtcaaggctcatatcaagcatcactcaactaatgtctcacatcaactcttggagtttttattcaggaatggaccccaagatcatatctctcattattcgaatcatctatctggtcagatcaatggatttggattcgcagacaaagcccaagtcggagctaatgtcactcgttactcaaactatcgctgtctacaactctatggatttggattctcagccgcggccgctaaggaaggtcgtatcagttttttctcagtatggttttgacgtaaattctacagtttcggattcagaatcggattcaagtgagaattacgtgtcacacattaaagattcattaaaacttgagccggagcccgagcttatttccttcatccatcgaataggctccctcgtcatctctatgaatccaaactgggagaagcttatttccttttgccctcaatttgaagtaatactgagcgatgatggaaagtttcaagtggaagaaggacgtctaagcaaaaatcagttatccgacgatatcccaatgaagtggaattgtctccaggtaaactggaatttattgaagttacatgcaggagaaaaagactttactcattttcgctgtcgaggttgcaatggtgacaaccataaagaaaatgaaaaggctccacttgaagtcaaacaccctcttcatcctaaacatcctcttcagcttgttttgtcgcaatcttctggtggtagaacgagggaatgctattgttgtgatgaagatttgctgcatatattctattgttgcttggcttgcaatttttctatgaatgtagcttgtactaagaagccagctgtcttatatagaaaccatccgaggtggcacgagcatacacttgctctgtttccaaggcaggcttccttaacttgcaacctttgtgccttggccgattcaagctccccgatctatatgtgtcccccttgcgactttgtcgtccatcttagatgtaccggcttaccacgtgtcataaagatatcccgccatctccaccgtatatcatttacattttcttttgaccgaggagatttgtcttgtagtgtttgtcgcagaaaaatagacgaagattacgggggctatacttgcatcaaggacggctgttcgtatgcggctcattcgaaatgtgcaacacaaaaaaatgtgtgggatggcatcgaacttgagggagagcctgaagaagttgaagaagaagtagttgacccgtttgtgacaataagcgacggagtcatacaacatttcggtcacccacaacatcatttgagacttgacgagaacacgagcagagattacgacgaggataagttgtgtcaagcttgcgtcatgccaatctattttggtaacttctactcctgtacgcaatgcaattatatactccacgaagcatgtgccaatttctctcgcaaaatgcatcatccggtacatccacatgtgctcactttagtgaactctgacggtgctatcaacgttagaaaagaatgtgcagcttgtccttggatgtgcacaactggtttcttctatgaatgcagtaaagaagattttcagctacatgtgcagtgcgccaacctgtctgagccactagtccatgaaagtcatatgcatcctttattcctaacatccaaaccaggagagaggagattatgttccgcttgcaaagagtcgtattttagtgtgacaagagaaacattcaactgcatagagtgtgattttgctttgtgctttagatgtgctactttacctcaaaaggtgaggtataagcacgacaaacatatgctcactctttcgtatggggaagaaacaagtaccatgacatattggtgtgaagtttgcgagagaaatttaaatccaaaggagcgattttataagtgtgatgagtactgctctatcacgctacacattgaatgtatgttgggggtggctttatacatcaggcctggttcatcgtggatctgcttcaacaataaaaagatgtatgttctacccaacaatcatcatatgtctcgacctcgttgcttcatgtgtaagaagcgttgtccacagaaaatagttttcaagtacgacgaagtaatattttgtacccaaaagtgtagggggaaatatagatactagaagagtgagcaagtagcttgatggtcattgctaacatgttttagtgagtattcctttgcattgagataattgtgcaaagataaagtgaaagtatatgacctgtaaaatctgtctgttataaacactgcaaagattggtatcgaatagaaacggaattttaactttttaagagtcaaatctctttttgcatcacatttctccttgttctgtaaaatgtatacacatggaatgtgtgtttaatcttctaaaacttttagaaaatcatcgctctctctctctctatgacgttttagtttgatcaaaatgaaagccaaaaaagtggcctatacagggatcgaacctgtgaccttcgcgttattagcacgacgctctaaccaactgagctaataggccactgcggttataaacggtacattaaatatttctcgcggaattgcctagattgtgattctgtgacagttttctttcaagacaagtaagtatcaagtgctacaaattggcaagtataatttattcaagagttgaaaatatcaagtgttcagaaaattttcagattttttttttgggtttattcgatttatattttgttttctttttattctacaaaatcttagaaaatactagattgatattttccttcttccacaaataataaaaacgaaaataattgttgttcatagtataaaagtatttattttcctaataaaatcttaatgatttactctacatttatttttgtatgttaagtgtatttattttcattattggttatctcaactcacagaattaattaattacttaacacaattcttcattttagtccccaagtaatttgttgcagcaacctgcgtttaggttttgcatctgcaccaccaccaccaaccaaaggccttgcatttccacatcaaacgttacgaagagatttgtctctgccttgtcctcttaaccagatctctctgacgcagtatctgatcacactccgtgatcgtcttttgttatcattttgtgtatcgagatctgttagtctactgcgatggctatggaacagaggcctaagacgaagatcgtgtgcacactcgggccggcgtccagatctgtcccaatggtcgagaagcttcttatggcggggatgagcgtggctcgcttcaacttttctcatggatcttacgaatatcaccaggagactctcgacaatcttcgtcaggccatgcttaacactggcatgctatgtgctgtcatgctcgacaccaaggtcaatcttataaaacttgtcatatgtgcatttttatgtctgtataacaatgccatcgaggcgttttcttttgatttgggctctgttcacgcatgattctgatcgtttctctatcattttacaagtgattcatgtcttatctgattggttattcccctgctgatctgaggacactcgttttggctatgtttaagtcctgtgaactttggtataatttgtggcatggtacgttgtttccagttcgagcatgaattagacaatatctgtggtacatgtttgctggttacagaaaccaaatggagaactgatgttgtttgttagaccagaatattaatacaaagttgatgcatcatggatgattagactcttacctttgtcgtcttgaaaatgaagattacaatctcattaaagtatttgcttcaaattctcactctctggtctgttacttggctttctggtaatgaaagttaataaaaatgtggaatgtataatgtggcttaaagttagctgagacactcttcttagtggtcttattgctaataatctcatgaacgtgatagatttatatgttttgggggacccttttggtttctgaataattatgggaatgatttttgtatttgtctggcagggaccagagattcgaaccgggttcttaaaggatgggaaacctatccagctcaaacaaggccaagaaatcaccatttcaactgactatgacttgaagggtgatgagaaaactatttgcatgagctacaagaagttggcgcaagatgtgaatccaggcatggtcatactctgtgccgatggtaccatctcgttaaaggtcctttcttgtgacaaagaaaagggcactgtccgttgtcgttgtgagaacacttcaatgcttggtgaaagaaagaacgttaatctccctggtgttgtggttgatctcccaactctaactgaaaaagacaagcaagacattcttgaatggggagttcccaatcaaatcgacatgattgctctgtcttttgtcagaaaaggttcggacttggtacaagttaggaagctacttggaaaacatgctaaaaccatacttctcatgtcaaaggtacatatatacatacatcactcaaactaatataaatcacatatccatactcagattcttatgatatgttacttttgatattgtcaggttgaaaaccaagaaggtgtagcgaattttgatgatatcttgataaactcggatgcgtttatgatcgcaagaggtgaccttggaatggagattccaattgagaagatattcttagctcagaaagtgatgatctacaagtgcaatttcatggggaagccagtggttacagcgactcagatgcttgagtctatgatcaaatccccacgaccaacaagagcagaagctactgatgttgcaaatgctgtcctcgatggcacagactgtgtcatgcttagtggtgaaaccgcagctggagcatacccagagcttgctgttcgtacaatggccaagatatgtgtggaagcagagagcacacttgactatggagacatcttcaagaggataatgcttcacgctgcggtccctatgagcccgatggagtcacttgcttcatctgcggtcagaaccgctacttcctcaagagccactcttatgatggtcttgaccagaggaggcagcacggcgaggctggtggctaagtatagaccagggatacccattttgtccgtggtggttcctgaaatcacgtctgactcttttgattgggcgtgtagcaacgaggcaccggcaagacacagtctcatctaccgtggtttagtcccggtgctgtatgctggatcggctagagcctcgatcgacgagtcaacagaagaaactctcgagttcgcgtcagagtatggtaaaaagaagcaactctgcaagaccggagactctgttgtggctctcttccgtacaggtaacgctattgttatcaagatcttgaccgtcaagtgatcccatttgcgtttgagttttgccggtgtttcttagcgttttggatgtttattcatcatggtgactaatcttgagatgaaactcaaagtctcttttgtttctttttttgtgtgtggctcccacacactacataatgttcttggatcatactctggttacaagtacattagtttggtacgagtgcaattgcataaacaaagactattttttgaatatattttacaaaaatgtgtgatcacatttggctcgtgatcacacaactttgggattcgtatttggagataatgcgattcatgcagtcaacaaccatactcacagtcacatgcctctccctctcaacataaatacctgtgttcatctttttatattttactaaattaaaagggatacttttaacggaaacccaaatgatcatcagatattataatacaaataaagaaaagattccattcctcgaaagtgtttatttgttatgcagtattcaacaatctgagtgaacaagattttatgtactataagctgaggaatagcagtttacgagttctcaccgagatgagatgaccccgaggccgatgcggatgacgaagaggatgaagagaataatccgctgaacggccatggaaaagagaaccttctctcgctcacattactgttccttgcatcatcttccacattctcattacttacgttgatctctagagttcttgttctcggtcttacaggattaaccttggtctcatcatcaggagggagttcatatcggcacacgggacatgaactgtgaagctcgagccacggtactatacaccggatgtgaaacttgtgcttacacggcatctctttagcttcacttcctttgtcaaaatcatccaaacaaatcgagcactgcaatgattcacttatcttaaccgttgggagattatccacaacttctttacgtgctggaagactcccgtgcctgattgaatcattatcagctagatgttcaagcaaatggtctaaactggatccaacaaagtaatctccaattgcagaaagagaagtattgttccggttttgattcaaactcgttgaaccctgaacaacagctgattgatttaacaggtctcgatccgagctctcatactcagaagcaatccctgcacgaataccctgaagcaactgcaatatagtagctgagcttctccgtctcctcctaaggatagactcaaactctctgtctaaatcaatctctctaccttgttgcctgtggcgatgacgacgatgatgatgtcgatcaatatcgacgctgtcatttccatcaacatcatcagatacattgacctcatcattatccacaccaaactctgtcctcctaaaccttctacgtctacgag

SEQ ID NO: 631 - DNA, 80677 bp, Arabidopsis thaliana
ttacaaagttgatctgagaaaccatctatacaatttatctgatgttgacatgctacatgtaacccatgaaatatcactaacagttaccgggaacattgttttgcagtttcgtttcagctatatgatcttaagcagcaaggtttcatagagaggcaagaggtgaagcaaatggtggtggctactcttgctgagtccggcatgaacctgtcagacgaaatcatagagagtataatcgacaaggtgtggttccttcctaccctgctcgatactatattcttgttccactgttgtatagccaactcatgatagcagttgagaataaagtaaagagtggtttctaagtttcttctttcacagacatttgaggaagctgatacaaaacatgacgggaggatcgataaggaagagtggagaacccttgttctcaggcatccttcccttctaaagaatatgactctccagtatcttaagtgagttcctaaaccaagacttatccgaggtttaggcaatgcaacttccaattttttctgtgttattattaacaccgatctctgatattgtgtgcagggatataacaactacatttccgagctttgtgttccactcgcaggtggaagatacctgagaaaaacaatagcatattagcagaggagacaatttgggaattgtgtttgttttctgattatgtatcatgtctatttgtttcaatctctctgaacattttcaagattttgttgttacttgtgtgaattaaaagtaaagaaaacaaatctgtatttttgctactcctgattttgattgctgattttctcctcgcatctgtagatatactactaaccttgagacatgaatcctattaataaagagcaaactgatgaagtgataatagagagcaaaaaagagagaacccaacaccaaatgatcgggtatgctctagtctgaattctgaagtcaaaattgaaatcaccgatttgatcgaaccggatgcaacattacaacaatcggatttgttagtcttgtggttgactttgtcagttagagttgacaaagtaattagcaaagttagtgacgattgtgttctgcataaacacgtttactttgaggaataaattacttactctttcggtctttcctaatatatatgttttccctgtctcaaagatctgaataggtatcagagcgcgttgacaatctctttttttgatcatcgatttgttctctctttcttggctaaaaagtttctatctacacgactctccatggattcaacaagaaattcagcttcttccaactccacgggatgctttacggatcagaaaaagcgaaaggcactctatgaggtgtttaagaaactcagcggtgttgattgccaaagaaacgaggttcgtataaattatatgtaactttcttgctaagtacgcatatgatataaatctgtgtttcttcgttcagggtaacgttgtagaaggcgtaacgtgttattatggtgaaatgaacaaggtatttggaattatatataaatatatatgtctttcttgccacgcactccttcttttcaacaagtcttacagattttccataacgtgtcctgttgtatttctgttgtatcaggaacagtttcatgtagccatattccagactgacaaaaatgagagcttgttttcagagagggtattttatttttgttctcaacaaaaaaagtctttgtaatccatttgcaaacaatgacattaccctatcacacaggtcttcgatttgttcgacacaaatcatgatggattacttgggtttgaggagtttgcccgagctctctctgtctttcatccatctgctcctatagatgataaaattgaccgtacgtctctgatctcaaaaactagacccgatatattaaccatctacaaacaaactgttcacatgctacctatatatattccatgaaagcttattaacggttacctggaacattatttggcagtttcgtttcagctatatgatcttaagcagcaaggttttatcgaaaggcagggggtgaaacaactggtggtggctactcttgctgcgtccggcatgagccagtcagacgaaatcgtagagagtataatcgacaaggtgtgttttccttccttctattttttggttcgactctagtctatagtatagccaactaagtttaagcagctgatgaatatgaagtgaagagtgatttttgagtttatgaggcagacatttgtgcaagctgacacaaaacatgaagggatgatcgatgaggaagagtggatggacctagtttttagacatcctcttcttctgaagaacatgactctccagtatctcaagtgagctcctaaaccaaagactaacccgaggtttagccaatgcaacttcaaatttttctgcatcacgtattattaacaccatgatatctgatattgtgtgcagggatatcacaactacatttccgagctttgtgttacactcgcaagtggaagatacctgagaaaaacaatagcatattagcagaggagactgtttgggaattgtgtttgttttctgattatgtatcatgtttatttgttttcaatctctctcaacattttcaagattttgttgttcctttgtgtggaaaaaaaacaaatccgttgatgattttctcctcgcatctgtagatctactactaatcttgagacatgtaaaagcaaactgctagagcattgaaagggcaaactgctagaaaaaaaagagagaagaactcaacaccaatgatcggctatgctctaatctgaattctcaagtcaaaattgaaatcgccggtttgatcgaaccggatgtatttaacaaaataaacaaaataaacaaaaaaagaaggaaaaatagatcctcacgcgttaccgtagcgcgtatttttttcacaacaaaattcataagcagtgtgggtcccacaggtccactaagtttagtggtgggttgctccgtagctaatctcatctctcactctttttcttatccactatccatagaagaagaagaagaagactgttgacgacgacggcgatggcgatggctatggagatttctcttcctttcgttggatcatccatggccttaaggtagattcgtatgttttggaatctcataattttctatctccgtcgatttgagagtatggtcgctggagattgaaccttttttattttatttatcagcgcgggaaaatcaaggaacagcgtttctaggattagtcgtgttggattctcttcggtctcggctgtacatgtacccagaaggatgtttatgcagctgtctggatttggttcggtcttgacgcttctggattttcctagtttagcggcgccggttcctcagatgaaggaacctgaagtgatcaggtaaaattggtacttctctgagctatctaaactcctttttcattttgattttgattcaggaaattgcgttagaacgtcgatgataattgtagatgctagcattgaggaaaatttgtagttgtgtccatgtttgaaatgattttgtgattatatttctggtctgcttttcaaataatcttttactagtttatgaattgcaatattttatggcttcctgtttaatgtgcttgtttattgcattgataagccatgtacacaaagaagtgaggaatatgtgaaagcttctttgagcttattggattgttctacttgttgcatggacttagttcctcatcctagtttttaattgtttttttggttggcgatcgaagaatgcaggacattgaaactcccgagtggcgtgaggtatcaaggtactaatctttcgctagaattctgtctgttgttccttctgatgataacattcaaaaacttgtaatattgttcgttttatttgctaatcatggaagtcttgttttagagataattgaaggtgaaggacgagaagctcatgaaggggacctggtcgaactaaactatgtgtgtcggcgtgcaaatggatatttcgttcataggttagatttcatgcaaaactttagatgccttgatagtttctttcatccaaatctgatcctctttttaactctcatagtttcttgattcagcacggtggatcaattcagtggtgaaagctctcctgtcaaacttattctcgatgaaaacgacgtactttgatttgcactcaaccttgcatataacatagcgttccaatcatggcctgtactaacaaactgcttcgcatgacaggtaattgagggcttgaaagaagtcttggtgggcatgaaagctggaggtaaaaacttgaaacaacaaataagattttggtcttttgatgtaatctcatatttctaatgactcgcacataatggtcttttgcggatgaagggaagcgtagggcactgatacctccatcagtagggtacataaacgagacattgaagccaatccccgaggaggtagtcagatctttactcttcatcttccacaatgaacttgctacatacgtatgtctcaaatgatctctcatatgtgtttgtggatgcagtttggaccacgacgcagccttctatcgcatgcgaacgagcctctggtctttgaaatccagctcttgaaagtattatgatatttgtcctgtcactgactgttaatgaagtattttggctgtgagattatttattttctattgtaaatctgtaacaacaactgcttggaactacatatcttgatgagttctgctttaaggcttggattaataagggaattaccataccagtatttttaaattcactcaagaagtttccaaattactcgttttactcggggaaaaaaatggtaaagctaagttacttaagaaacgacgccgttgacttctatcgacgttacagcatcggttctcccgtcttcttcttcccgagtaagtaattctttagctgcggcgtttaccaaaaaaccttaaaacgtcaacgaaaaatatccgatcgccggcgttctggtctatcattgtttgctttccttgaagatcccgaaacccaaaaaatgtcacaaggatggttttcgatgggcgggagtagcaccgtagatcagcagcagcaatcgggttcgtctctgcttgcggattggaattcttacgcagcctctagagatttcgaggaaagcggcggaagcttcggctttgatatcgaatccgccgttagatctgccaatgacactgtttcgggcaccttcagtgtgtaagtagattgcaattagtcatctcataatgtttattccgtgactgaatctaagaagatgaggtttattagtggtagtgagaagtgggtgttagtgaatctgagctattgagatttactttgttgattgtgagatttgatagtttgggaaatgcatttatgagttttgcataccaatggatttagagttagtgaataagtctattgagttatttatatttgtagttgttttcaggaatcttcttttgtttctctgataaaattcttgttcttctgttgtttttgcaatgtacctgaatttgatgactacagggtttcaaaaggagttagagatattccagggagcttgcagtcagcaacaagtagtatgccttcaggaaaagcgctcatgtatttcggtttacttctcgcaagtggtgttttcttcatcttcattgccttcacaatgtttcttccagtcatggtgcttatgccacagaaatttgccatttgtttcacccttggatgtggattcatcattggatccttcttcgcacttcgtggccctaaaaatcagctcgcacacatgtcttcgatggaggtatgttacactgttctattgtgtgtctgtcatgccttaaatccaagagtgatttccttcctctcttttgaatatcttgtgtacttctccagaggcttccttcaaccctaggtttcattgctaccatggttggtaccatatacgtatcaatggttctccacagctacattctctcggtgctcttctcagtgttacaggtactaaacatttcatcttccaattcttaggatattccctttaattatgagtttaagtttttcaaaatgagatattgctatgagcaagtggaaaacaatattggacctcaccaaagtatttaagatcatatagtaactcacctcattgttgaatcggtcttgagatggaacctttcgaatctccagagtttagcaacaaacattagactctcgaacaagtggtgatacttatctgggtcttcacccgttatctatttggactgtatgaaagatatacttgtagaggttttgagaacttctgctcgcaaaatccgcgcattctgctgaatctcataatctccagtatctgtttctttttgtgctaatggacaggttcttgcgctggtttactactgtatatcctacttccctggtggatcatcaggcatgaggttcctcagttctgctctcacctcatctgcgctaagagttttcgggagataagctttcgtagccaatctgggagagagaacaatacttgtcggtgtacaaagaaagatgtcgaagcgttttttggtatactctttaacatagatttgatgaaatccctcgaaaagataaatgatcgtgaaggaaatgtttagtgaagaacccaattgatgttcttttttttttagttgctggtgattcccgaaccaaaacgaaaaaatccattgtaccaagaaaatgtcaaaatgagtttcctaattcccacgcaggatggtgtcgactgattcgtttcccaaaatgtgttagcgaagttctgataggtgacaatgtgaaactctttagggtatagacattgtaacaaatacttaagctgattaggtcttgtttttgcaaaaaaaaaaaaacgtttagatcatgtcccgattaagatcatcaagtgatcacaatatcaataagacgtgtgtattttgctgtcctgtattactgctgagaaaagtatatgcaacataggttttggttggccaagtaaagcccgataaaagattgttcggctctttaaactgggaccatcagtcaaaagcagtgtgtttaggaccatctttagttaaagattatcaatgatgaataattatgtcttgatcattatttttatcaataacatataatatttagatctgaatttgagtggttacacatcgacgataatcaaatcaatggaaaaattataattctttttgtcatatgacaagataaacaatgaattttatcattcaagatgcgaaaatctaacaccatgccgcacataaacggttcatggttgtttcacgacgggtcgtcttacatgtacaaagattcatgatagacgtttctacgtactcacgctatatataccatagaaatgttgtacacttgtagtcttatcataattgaaatacaacgaaaggctctacatgtatatcacgctgaagatctttgacaagcattctaaataaacttccacttgaaaatggaaactccaagtgtttgtttgtttattttgtgtacgatagtggtaagaaaatattataattgttgatctatttgtttatcttgatgttggggtataatgcttagtgagcgggaaacccaaatcctgaaaatacggaaacaatggagcaggaacatttgaccttacattacacgtattgtttctgatatttatttgaaaacaaaagcttttgagcgagagataatattagttgaaagcaaaagctcatcttctccactaagcaatgttagttaaaaagacataaacattattgttttaatcagttcaaaatttagtactatgctttctctttctctaatctataaatctgtggtcgtgcaacgtttaaattagaaaactagaaaaaggccttttaattggctgaagtcttaatgaattctattcatggttagacaaaaaaactaaaagttaaaagaaaaaaggaggaattcaagcggaaagttgaaaaacaaagctgaaaaaataactaaaacattgataatttatttataattttgggcatttgatcattgcataaggcatatatgataatgtaatttttaaagttaataccaaattcgatatattaaaaccaggcaaaaatgcagaaggtaaactcctctatatagacaagatttacatccatattaaatctatatcatactaaatttttattcattggatcatgagataatatacacatatagatagttttggatgaaatgcccacttctgttcacacttctgcactactgccactacattcttggactgcttctgccgctatattcccaccacaagggaccattcttttattattagacaaaacaagttaaatccgattgaaaagtatacagacaaaaccttctactatagaaataaataacccatatcatattctagattagatccagcgtaacaccctttattaattctcacttaatataatttattggagcagatcaagccattcaacaaagcctctctctcatgtgatgagatctctgacctaattgaatcgtgattagatctagatcttgttacattgtcttcgtcaattatccgcacttaaacatttcttcgttattttacactattagtatacgttgtaacacatatttcatctttctgtactaataaagagtacccacccataaactactctttcataaacaaatgtcttcatcaacaaatgtcttatataacgtgaagtttcatatccaaaccactggttataaagtgttttgtaacgttaactttcactattagactcatcaatgtttgcctatgtaatcatacaacagtagtagttgtataaattataaattggtgtagagaatttaggaataatgtttggatgaaagggtgttgtcacccaacaaggagagggaccattaataaccgataatcataataagatttgtgaaagaaatgtttcactgatttggcagaagtacagttggaggttctttgtcttttctcttctgcaccttttgttctctttacttccttcttgtttgttggtttttgttcttttcttattttttttccctaccataaatggaccattaccattcatttctctctttttcttattatttgctgtatttagttgattttgttatatccgtttaaatttgtgtacatataaacaacgacgtctataagtttttataacaaaaaaaaggattatgttaggtgaaatttcgattcgttttacgtgtaggatcaacgtgaaagaaagtcgttgtaggtatgaaaaatatggaccgactacgatacggctgcttgagaaaattagatgtataacgtaaagtgaaatagtgaatgttaaggcaattagggaaactaaaattaaatattcaattggtatgtagggaaacgactttttatttattcacatgcacatgacctctctatgtcatgtgccttaagttgccgtgttcgatctttttataatttgttcgacccgttaccctaaatttaaaaatcatttctatttttttattattatgtccaaatctgatttctttttcatgtgtcatatatataaaactcattttaattaaattacaaatttgaaaaaatatttttttttgggaaatttaagaccgacaagatgagcaagggacatggttgtaaactaattatttctttaattaatcagtcacaaaaattcctagcttgcatgtgcaatttcactctccaagattccatgttttacttcaacttttatcactagtttatactatcaaagactcaaagtagatgatctgtattctacgctaatagtaaataattttaatataaccactatttacccacttctgttttctctcaaaataaaaacagaatccacattatatacatggtttcttgtggttactagttacacaatgtactagctacaagaagtgcttctgattaaaccatgtacagttttctagttcaaatacacatggttcctcgttactagttacacaattatgtcgacattcatgggaagttcaagggatttggatacttcaattcttactatgagaaaccctatttaaatgtaactactaaaacacaagcactttttgtcgtggatataattggttaaaattatcggtgcgtttaatgtgttgagaattcgttgaacactttattacctattattaaaccaaaaagaagcattaaagttcatcgtgccgctttaagatccacaagttttgtttcttcgattcttcgtggtgaacgttgcagccatctttgggctgtactattgtcattatatttaacgggtcttttcttttgtaagttagagctagtatatatgaattaatgatatagttaaatttaaataacttgtaatgctcggtctaactcttaaaaaaacgtttgaatgtgattgaacctttcgtaacagtttgatactagtttaatggtaaaactggccacatggaacaagacgtcaagacctataaatgatcgcaaccttttatcgaagtggagaacacttctcgttcacatgttataagatcatgatacgatgctctctgattagtggattggagtgaaatttcgacaaaattcgtacatgcaaatgtcgtaaaaggcaattacaatatagcagcggaaaagagaggaggactatttgacatgtcggtctcaaaaccatgaaagttggtgccattgtaagagggctattgttttgacatgtcattcttgattctcagatttcgattttcatataaattatagcatactatttttgttgcataatatttgattattttcttactttcaaaaattttggtggtcggccataatatgtttttccaataaataaataaaaaaggtttatctatgtaaggtatattccttgaagtcaaatccaaatttaattacaggattatgtttcaaaacgttatctaaaacttgatccagctatttcaagagtgaactactttgtaacttaattaggactatttagggtaattgttttttcaattttacaaaaatcaaaagcaaagattaaaataatactaaagggttagtgatagaaactttgttgggatcaaaaaccttcctttgctacttctctctctgctctgtgtttatttatatatttcctataaacaaaataaaaccaaaaccgatggattggttcttcgctttacaatcccaacgcacttctctcattcttcttcctcatcttcgtcttctccgatgccaccaaatatctatagactctccttcttctcatccctactctgtttcttcttcatcccctgtttctctctcgaccaacaaggtcaagctctcttgtcatggaagtctcaactgaacatctccggcgacgctttttcctcctggcacgtcgccgacacatctccctgcaattgggtcggcgtaaaatgtaaccgtagaggtgaagtttcggagatacagctcaaaggtatggacttgcaaggttctctgccggtgactagtctccggagcctcaagtctcttacttccctcactttatcttcactgaatctcaccggagtaatccccaaggagatcggagacttcacggagcttgagttactcgatttgtcggataattctctctccggtgatatccctgtggaaatcttcaggctcaagaaactcaagactctgtctctgaacactaacaatctagaaggtcatattccgatggagattgggaatctttcgggtctcgtagagcttatgcttttcgacaacaagctatccggagagatcccaaggagtatcggagagctcaagaatctacaagtcttacgtgctggtgggaacaagaatctaagaggtgagcttccttgggagataggtaactgcgagaatcttgtaatgcttggtctcgctgagactagtctctccgggaaacttccggcgtcgattggaaacctgaaacgtgttcagacaatagcaatttacacgtcactcttgtctggtccaattccggatgagattggatactgcacagagctccaaaacctctacttgtatcagaattcaatctcaggatcgatccctaccaccattggaggtttaaagaagctgcagagtctacttttatggcagaacaatctcgttgggaaaatcccaaccgagcttgggaactgtcccgagctctggcttatcgatttttccgagaatctcctcaccgggaccatcccaaggagcttcggaaaacttgagaatctacaagagcttcagctgagtgtaaaccagatctcaggaacaatccctgaagagctaacgaattgcacgaagctgacgcatttagagatcgacaataatctcatcacaggagagattccgtcattgatgagtaacctaagaagcttaaccatgttcttcgcatggcagaacaagttaactggaaacatccctcaaagtctctcccagtgtcgtgagcttcaagccatcgatctctcttacaacagtctctctggctccatcccaaaagagatattcgggttacgaaacctcacgaagcttcttcttctctccaatgatttgtcgggtttcatacctccggatattggaaactgtacgaatctttaccggttaagactcaacggtaacagactcgccggaagtatccgtcggaaatcgggaatctgaaaaatctcaactttgttgatataagtgagaaccgtctcgtcgggtcaatcctccggcgatctctggttgtgaaagcctcgagtttctcgatcttcacacgaatagtctctccggttcattgctcggtactacactcccaaagagcttgaagttcatcgatttctccgataatgctctgtccagtactctgcctccgggaataggattgttgacagagcttacaaagctcaatctcgccaagaacagattatccggcgaaatccctagagaaatctccacttgtcggagtctacagcttctcaatctcggcgaaaatgacttttctggtgaaatccctgacgaattgggtcaaatcccgtctctggcgatatctcttaatctcagctgcaataggttcgtcggagaaatcccgtctagattctccgacttgaaaaaccttggagtgctcgacgtatctcacaaccaactcaccggaaacttaaacgttttaacggatttgcaaaacctcgtctctctcaacatctcctacaacgatttctccggcgatttacccaacacgccctttttccggcgacttccactttctgatctcgcctcaaacagagggctttacatctcgaacgcaatctcgacccgacccgacccgacgaccaggaacagctccgtcgttagattgactattttaattctcgtcgtcgtcactgccgtacttgttctcatggcggtttacactctagtccgggcaagagccgccggaaaacaactcctcggagaagaaatagattcgtgggaagtgacgctttaccaaaaactcgatttttcaatcgacgacattgttaagaatctgacgtcagcaaacgtgatcggaaccggaagctccggtgtggtttaccgtataacgattccctccggcgagtcactcgcggtgaagaaaatgtggtcaaaggaagagagtggtgcgtttaactccgagattaaaactctaggatcgattcgtcacagaaacatcgttcgtcttcttggttggtgctctaatcggaatctgaaactcttgttctacgactatctccctaacggtagcttgagttctcggcttcacggcgccggaaaaggaggatgtgttgattgggaggcgcgatacgacgtcgttcttggtgtggcccatgcacttgcttatctccaccatgattgtctccccacaattatacatggtgacgttaaagctatgaatgtcttattgggtcctcactttgaaccctacttagctgatttcggtttagctagaaccatctccggttatccaaataccggaatcgatttagcgaaacccaccaatcggcctccgatggctggctccttatggttacatggctccaggtaagcttgagaaagtacttgtacacttaactaagtttggagttttgattttgatttgttttgtttgttgggttttacagaacatgcttcgatgcaacgtattaccgagaagagcgatgtttatagttacggggtggtattgttagaggttttaaccggaaagcatccgttagatccggatctaccaggaggtgcacatttggttaagtgggtgagagatcacttggctgagaaaaaagatcctagcaggcttcttgatccgagactcgatggacggactgactcgataatgcatgagatgcttcaaactcttgcggttgcgttcttgtgtgttagcaacaaggcaaacgaacgacctttaatgaaagatgttgtggcaatgctcacagaaataaggcatattgatgttggaagatcggagacagagaagatcaaagctggtggttgcggaagcaaagagccacaacaatttatgtcgaatgagaaaatcatcaattctcacggttcgtctaattgttcatttgcgttttcggatgactccgtttaaaaaaggaacaaggtaacaaatgtaaaccgtgagctattgtttacaaagctgtgtgaatatatatgcttttgttggagctttaaattttttggaagtttttgtataatcaattacaactacagttgcaatagattttagtgatttgttcctgtattcttgattcccaaataacgtcaatagcatacaacaagttaacggaaaaataatacatatataccaattttggtggttataaatctcattaaaatgtcgaacataaaatggaaaaatacttggtactaaaatcaagatttttcatttctctgtcatatttttcccctctttttttttgttttgttttgggttaacaactatttactatgttcttgtcctactcctatctaattgcctttcattttccctgttatcattggatttatggatgatttttcttcttctcaaactgattataaatatctttttgatatacagaaccatcttattccttatcaaagaaatgttcagtttccatccacaatttctagataaaaaagattagaacaagtcaaatagatgtgacgattccaatatacttagtcatttgtcctatatcgatagtaaattagttaatcgaaggtaattcgagaaacaagttgtatgcaagccatgtcaaaactcgaatatgacatgaaatatgtgagtataagatcttcgattgtgagcagataaaaggaagtttgaggtaattgaaattattgttttctaaagcttgtcatgccctcatgttaggctactgcgattttatctggatttttattgatgttttgtacctcattcctctggtccatgcatgtaggatatttccataacgactctatctgacgtactgtatgtattagaggttggttagagtatgtgagttttatcatttttttaatgttgtgattgtttattaacatacaactcgaatataatctattttataggataatgaccgattgggactggagcatttggagtcacacgcgataacgatgcgtgatttgttttgtgttttggttgtttgtttttatattaacgatttgtgaaattatgaagaagaataagaagaagagaggcttaagacagaagcgagtggatcacgtggacccttgagccaccctcatcacatgagcatgtgctgtctcaataacaatgacttcgactttccagcctaaataaacgcccttttttttgttctcttcgattattaacattaatattatgattgttattcggataacttttaagcataaatgtttcttcaattttgttcacataataagcaggataatgttgcacaagccctaatccattttgtaagagcatccgcctgatccctaattcatgaacaatgttatcaaaaatagttcaaagatttggatttataaccaaactagttttagatcattcttacaattataaaatatcaagtaaaaatatctctccttcggaaaatgacttcttttttttggtgattaagaagaagatagacttccttgtgggacccacttaggggatattaccgaacttttgaacgaaccgttatgtcatggcgcgaaaatattatagaaaccatcacaaaaaacacaacacagtttaagaacattacacagacgctaaaccaaatcgataaaaatttaaacagttaaacgcctacgaaacatttgacatatattcaaatcgtataaaaggcgacacccgtatttaaacgctcctaatacttgtatccttcctcatacaagctctcagaggcggccgagtcaccagaagccccgccggtgtatttcccgagggtagcgtccgagttacccttgcacctggtcaggaaagtggcctgagctttggctacattctctgtcttacctgcccaagccttgagagtgctttgttggagggctcggccaaatgagaaagtgagagtccatggcttcaacacatcgagcttgttcattgcgttcagatttagtgttgcttcctcttcactctgtccgcctgagaggaacacgattcctggaactgcaggtgggactgtgcggcgcagagcagtcactgtgtattccgctatcacttccggtgcaacctgttagaaatatagttttagagttatgtctctgtgattcatttgattgtggttccataaggagtagcatcaaacgatctataatccttaatttcgttacctttgggctgtcagagccgggagtgaccatgttcggtttaagcagagtgccttcgaggaggacatggtggtcgttcaaggccttgtacacggcagcaagaacggtctcggtcaccgctgcacatttcttgatgtcatggctcccgtcggtcagtacctctggctcgacgattgggacgagtccattctcctggcagatgatggcatagcgggctagccccttggcgttctcttggatagagagctcgcttggctcggtggccccaatcttgaggactgcacgccattttgcaaaccgagctcctgccttgtaatactcctggcaacgtgcaccaagtgaatctagaccctgagtagtggtctcgccattggttcctgctagatcaaccacacccttgtccactttgattccagggataactccgttttcctgatacaaaaaggaatcagaatccaaattgaaatagtaagttccattttgcaactcttgaacccaatgattaatgattaagactagtgctggagtttggtttttcagggacggaccatgaggagctcaacgaagggtttgccatccgtggttttctggtagagggtttcctcgaagaggataacaccggagaggcaagggaaagtgccaggggacgtgaagaggagctcacggagagcttggcggttggactcaatgttctcaacattgatgctggcgaatcgtttcccaatagttcccgtgctctcgtctgctgccaaaatgccctttcccggtgtggcaatgtacttagccgtctttatcagctcatctgaacacagaaagcgcattaaagagagagaacctaagttattcaacaagaagagtgcatgttaagtgtatgaatttacctgcgtatttgccgacaaaagcagacatggttgctttttggagtgcaagagagacgagttttgctgaagaggacgaggatgccaagacaaagccttaagtacctgcaactattgagaatatataggtaatatctacgaggaatatactattagaatttgtcatacgtgtcagaaggagaacccgaggaaatttatcaacctcggataaagcaaatgggtgattgcttctacacaaccaaatggcaaccaatgatctcagctttatccccaaagtcttggatatgtggagaagagaaagagataggtacaaaacaaaagcagagtgtattgtatagtacctctcacacacacttcaaccacacgagtgtgcaaccaaaacttacaaacacaagagatattttagataatgaacccaaatgtattttattttttttgcattttgtcatcattggcccagtggccatatacctcccactagggagagagagactaggtttgaacctggattcatgagatgacaacagaggtggtgatgttttatggagtatcaagggttccaaggataattctatatggtaaactgaaaaacgtgtcccgggttcgatcgacccctcacttgggcatttattagtaaacaaaactcttcatagtttgtgtagccgttgtagtagatagggtgatgaatccatcaataaaatgtaatgcaggacatggaagggacacctaatgctgcaggaccacagtggcctagtcctcgtctgtgccaaaatatctgtccccaaacccgcccataccaaggaataacacgaaactcttcgtctaatccattatcgatttcagatgtcactatctttatttttgggaatttttttgcagaccacatgaacaccttgaggcctgatttcaacaaagaagaaaatatctcaatccaactgcattcttgtggataaacatggataagtaatcacaaggggtgtgtgttagcttactgagacaaggtttaaaaatatgatgtttccctcaagtacgcccattgcttataagaaggttgatagcttcagccgctgtgtttccggacaagatcatattcaatttcagtgtcattaagcacttcaagtgtgtttgaattggctaacaatgtgcactagagcaaagcgaaaagaggagatatcttgtaatatgtccttaacaatttttagttttctaaatttattctcatacaataaaaacattattattagcttttcaaaacgtgaatttcacatggatagtttgacagtaaccggaaaataacaattattagcagtctgcaaaattgaacattcaaacagttaaaacacacacgaaacattagatatctactcaaaccgcatcaaaggcaaacgcccgttctcaaaggatcctagtacctgtatcctatcacaaccaagttctcgaaagcggccgagtcaccagaagcccagccggtgtatttcccgagggtagcgtccttgttagccttgcacctggtcaggaacttggcctgagctttggctacgttctcgggcttaccggcccaagccttgatagcactttgctggagggctccgccaaaagagaaagtgagcgtccatggcttcaacacatcaagcttgttcattgcgtttagatttagtgtcgcttgctcttcgcgctgtatgcctgagaggaacacgattcccggaatagctggtgggactgtgcggcgcagagcagtcaccgtgtattccgcaattagttccggtgcaacctgtaagaagaactattttagcgttttgtagcaaattaacgttgcatttcgaggtattgatgtctctgtgattcatttgattgtggttacgtaaggaccgggcatgtaaatttaaataaaatagcatcacaccgatacagtttggttgtggtttcagtttcaaaatataagaccaataaaacaacgactccaaaacaaaaccggattgcaacatctagtttggatacctttgggctgtcggagccgggagtgaccatgttaggtttaagcagagtgccttcgaggaggacatggtggtagttcaaggccttgaacacggcagcaagaaccgtctcagtcaccgccgcacatttcttgatgtcgtggctcccacctgtcagcacctctggctcgacgatcgggacaagtccattctcctggcagatgatggcatagcgggctagcaccctggcgtcctcttggatggagagaacgcttggctcggtggccccaatcttgaagaatgcacgccatttagcaaaccgggctcctgcctcgtaatactgctgacaccgtgcaccaagcgagtctagaccttgagtagtggtctcgccgttggtccctgctagatcaaccaaacccttgtccactttgattccggggataacaccgttctcctgatccaaagaaaaatcagatccaaactgaaacagtaagttccatttgggtcatgtcaagagcttcaactctgcaactcttggacccaatgactaagactagagctggagtttgctttttccgagacggaccatgaggagatcgacgaagggtttgccatcagaggttttctggtagagggtttcctcgaagagtataacaccagagaggcaagggtaactgccaggggaagtgaagaggagctcacggtaagcttggcggttggactcagtgttctcaacattgattccggcgaatcgtttcccaatggtttctgtgctctcatctgccgccaaaatgccccttcccggcgttgcaatgtacttggccgtcttgatcagctcatctgaactcagaaagcacataaaatggagaactgaagattactggaacacgaagagaagagtgcatattaagtgtacttaccttcgtatttgctgacaaaagcagacatggtaataattcttccaagacagatgagttcctgctgaagaggacgaggatgccaagacaaaggcctttagggtaatattttctaggaatgcagttagaaaggagagcccgaggaatgattgcttcgacactaccaaatgctagccaaggataccagcattatctccaaagtcttggatatgtggaggagaacgagcagagtattttctataatacctctctcacacttcaaccaacataagtcaccaccaaacttagatatattggacattgaagccaaatataattttctttccttttgtcataattgggccgttcatatacctcccacttgggagagagagagaccaggtccgaacctgaattcatgagatgacaacagaggtggtgcaaccattggcccacatgttcctttcgaagccaaatgtattatgcttatggagtatcaagggttccaaggatatttatatatggtacacaagagttgtagatgaattatcaagagttccaagggtaattatatatggtacaccgaatcccaagtcccgggatcgatcaacccctcacttgggcatttataagtaaacaaaactgttcccaacaccttgagggggtttaaatgggaaaaccaacaaagttaaaggtgattcctttgatagtttgtgtagccgttgtagagaataggatggtgaatgcatcagtaaactgctatgcaggacatggatgggacaactaatgctgcaggaacacagtggcctagtcatcgtctgtgccaaaatatctgtccccaaactcccccataccaggaataacacgaaactcttcgtttaacccattatcgatttcagatgtcactatctttattcttgggaattttttgcagaccacatgaacaccttgaggtgcctgattgaacaaagaaaaaaaatatctcaatccagctgcattcttgtggataaacatggataaggagtaatcacaaggggtgtataaatgatacgcaaagggtgtgtgttagcttactgagataaggtttagaaatatgatgtttccctcaggtacgcccttgcttataaggaggttgatagcttcaaccgctgagtttcctgacaagatgtataatttcagtgtcactaggcacttcaagtgtgttgaattggctaacaaatgtgtattacagcaaagagaaatatgaaataaaatgttttcagtaaaaagtgatgaagaaagacgggttaattacctgtcccgagaataggatccaacaataggacatgcctctctgagatatcatttggcaatttctcataaacaagctgcacagtgatacagacatcaacagtgatgaaacagaacacctggaatgaaataggagtgactcgtttacctgttgaccattgtcaccttctctgtgaattaggatcttcccgatcttgatacctttgcaacatgctcgtaacgcattctccatgctctcaccactagcattatttcaaaacaccatcaagttggtgagagagtgggatatgaaaggatggggaagttcctattgtataaactaaagctaagatataggaaagtacctcctaatcaccgagacaccacataaccgtttacagaaatccacaccagaatacacacatcctgagacaggtaaccgggatatctatgacctattagtcacgagtttaacctctaaatatatacataataatcttgtgaattcacgaacaacactgcaaaaacaaaaatcaccaagcttaccggttggagtaatcacttgcttttcagtaaaaggcagatgtccaagaccatgttctacaacctgataaatataagaaaaaaactcagacaacagaaatgagacgtgataggagaatttggtcagccatttaaatgagctttaataatcctaccagcctaatcaatcgatcagaatagaagacaaaatcatgtttggttgtctgagaatctcgtataagggtgtgcatccctcttatctgcaagagaaatcaattttctggatcttgtttggtagttaagagaatgttactcgtatgtagatgagattgatatatcaattacctgaaatgtcgagtgtataacgtagagattaggatatattttacagagatcatgttgacccagcttggtgcaaatatgttgcacaattaagtcaatagctacatgattatccccaccacgagggattataatatctgcatatttcttcgttggaagaatgaagtcatcaaaagcaggcttcacaaactttgagtactgcatcaaaaggttgacatcatataaaatatgggtagaaacatatagatttgaaaacgccgaactaatatgagaaaaaaacatacagatcagagcaatgtaatatttaaaatgcaagaggtaaaccatttcttgttgttcttgatgataatatatacagtaacaatactaagacgggctaacctggtcaagtactgtgccgatatctctaccattctcgacagtatctctttttatccttcttgccaaacgaacgtcagcatctacgcagaaaacaaaataagcaatgtgaaacagcaaaatcttaaagcataagaagttgttccatcatgtgaaattttgtagaaaaaaaaagccaagtgaatctacaaaagggaaatggaatgtagtcgaaacaagagtttacaataattataacgggaagaggcaacaaattacctgtgcaaacaaaaatcttcatgttcatcaactttcggacgcgtggatcatggaacaaaagtatcccttcaagaattattacatctgtaggatttacctgcagaatgtttttcaaaatcctagcatcaaataagattaaattgatctccccttaaatccccaaccagataaaagccagtggtgacatctaagaaattgctattgttacagaaagaggcagtgagaaaatgaaaaaggaatctcaaatttataaacatcaagtaacaatatgataatgagtgatgctgagagggaaggtggtacccttctgaaaacactgctcctgtaagttttaaaatcatattttggaatatctacagcttgcccttgcctcaatttctccatacaagacaataaatgctctgtgtcaaatgcgtctacagaaacaacaacaattcattagaatcctggataaaaagaaattaacggtggatgacaaagagtaatgcacaagactttttctcataactcccagcaactagtaatgtgctgtcagggatgaaattgctttaataaaagagaatacatcaattagtaagatatcactgaataatatggctgttagttatgccttaattatcccaaagaagtattataaaaaaaaaaaaaatggccaaagaagctaggaaagattttttactcctgatgacactatgtattgacaagagtagattacagaaagcaattacactccaaatatattctcacctggatgatcaaagttgtattcatgaactctagcaagttcttcttcagtcagattatgatagaacgagtcctgccaaaaatcattatcataggatattaagtcgagcaatttgtggtttatcatgatgccaaaggaatttgagaattagataaatagactgacataaatatctaaacaatggtgacaaggttgaacaatgttaaacttcagccatatataagttattagctggtaatattctccttttagatctctaaattgtgtggaattcaattgacttcatatacattcgaaacacaaatcaaaccggtggttatcacttagctctatgaaactttattagcaaaacaaaattaccaggttaataagtacaacacgctgatcgtgcagttgctggattatcatatcacaaacagtagtctttcccgatgtgcgcctccagcaacacctaaccaattcaagtcacaacatatcaatcaagaccattcgtcaagctttttttatccacgaccatatattaatcaaaaatgaaagcaaaagcagaactcacctattacaaaaggctgtctttggatatcttctgatgcagaagtggtttccttaagtgcacttggttccaacccattcatgtgcccattcacgtgtaaaccagaaaaatgtgcccgcgaggcagcttcgatcatgtcaacaacggacttagaacccatcccgacgacaattctggacattgtacattggtaaaataacttaaatctttatcacaatcatgcataagcaaacacaatacaaggaatcttacaacttcatctagattctaaacaacaatgtgaatcaaatccaactttatccagcaaaacagagaagaaaagagtgaaaaatttcagctgcaaccaaaaactgtaaatccaaactcttttgataaccatagatcaacaaatgcgagaacaatccaaaagaaacaaaaccctcaagttataacatttaatcaaacatggaagaaccagaagagcaatgatcgatcatctcgaggtgaaatcgtacttacatgaaaaaacagatcgttcaaaagagataagtcgtaaaaatgagatttttaaaattacccagattcagttttgctctcaaggatctaaggaaagcctcaaatcagaaaaaaaaacggagatgcagtttctttctgtggaagtagacagaaacaatagaatctcagataagaaagggacagttttttaatttgattaaatttgataaaagtgtttttatttaatttaatttaattgcttacattggtaaaagctggattcggacatgattgatttgatatataataatggcggacgtgtttgaggtgacgaacgcaagagaacgaagaaccaggaagacgatgcttcaaaacaaaacaaaaaaaatctagatatctttttcttttccttatttatgaaaagagtcgtatactttctaattattcataatcaaccccacaattgattttacatctaatttttggattttggtacattcccggtttaattcccggttactacctaattggcggtattggtttttgactcagaaaaagtgaagaaggagagctttcatcatcatctcagtctctctcgaagtttcaagttcgcgactatggcagcagcgatgtcttcttcttgttgcgcttcctcgcttcgtttaatcccattcaaacggaccttgttttcttcaatccattatccggccaaaacccttcttctacgaccactaaaaccgtcggaagttccttcctttcgccggacgatcatcactttccagaaaatttcaaccgggattgttcctccaccatcggcttcatcatctccgtcgagctatggagaccttcaaccaatcgaagagcttccaccgaagctacaagagatcgtcaagcttttccaatcggtacaagagccaaaggctaaatacgagcagcttatgttctacgggaagaatctgacacctctcgattctcaattcaagacgagggagaataaagtagaaggatgtgtttctcaggtttgggttagggctttctttgatgaggaacgtaatgttgtgtatgaagctgattctgattcggttctcactaaagggttagctgctctattagtcaagggtttatctggaagacctgtccctgagattttgaggataacacctgatttcgctgttcttctcgggttgcagcagagtctgtctccttctagaaacaatggattacttaatatgcttaagctgatgcagaaaaaggctcttcatttggaagtcaaaggtgaggaagattcaagttctggagagagttcagaatccagctttgtgtctattcctgagactaaggacgaagctaatgttccggaggtggatttggagtctaaacctgatctagttgaggatttgggaacagaaaagattgatgattctgagagtgggtcaaatgttgttgctttagggagtagagggatgaggataagagagaaattggagaaggagctagatcctgttgagttagaagttgaagatgtttcttaccagcacgcaggacatgccgctgttagaggtagtgctggtgatgatggggaaacacatttcaacttgcgaatcgtttcggatgctttccaaggtaaaagcttggtcaagagacataggctgatatatgacttgttgcaagatgagttgaagagcgggttacatgctctctctattgtggcaaagactcctgctgaggtttgagggtgtaacattggaagaagtcaggtcctgattcttttacttcttttggtccatttgctttggatattgttctctggaccttctaataatgttaagagctcgatcaggattgtgttaaatgagagatagatattgaaggatataaataatgttttcgccaatcgccacatgattcaccattttcaaactgatttccctttatcttatgagggtcaaggtcttttttgttttgatatggtttcctgatattaagttttgtacctacgctttgagagatgaatagagagaatgctcaaggttgttgtccatttggctaagtttgaatcgttagaaagatcacagcacctagggaaagcgaaaaaggaatttggggagaaaaatggtactatattcatgccaccattagacatgcgaagtttcttgttcattttttaattcttctagaatctagatactcaaagttggtattgtctaatcaagtgatgcaagttggtttgagggactacagaaaaaaagaaagagatttggttgctttacttctttctgataaaataagtaaaaaatgtgaaaggagtttcagatgatccctgtttcagtctaccgttagacatgtgatgtttcttaaagccccattagctgagacttgtggggttttatatacaatcagctttacatacctgtctagtgaaaccagctgtggttttagccaaccaatttctgcaacttttctttcctgagaccattgtatcttttttttttttttttttttgatcaaagttgagattttgaatattaaaatcctctgtgttggtatatgctaaaaaatggttaagcttcttcttgtgtgttttactgattttgattactttaagtcctaaagggaaccaacataggcatctaatgcttgtacctcttttgcttttggtcttaattcttttctctggtggttcaggtatgttgaactgtattaaaatacaacattggtcttggcactgtgtcttgtggatcaattatggatctgcttcatagaaagataatatctttccagtttctttatcttggaaatagtacaaactccgatctcggttcttggatagagttcactaggtctttttcttttatacaagttgtgggtaagcaaatagaaatatagttgaataaacatgccaaagctaaagactttgaagatgactactgactcagagaactgtaccgtattctttttcatttcttcgtcgtgcaattacgagaaatcaggattccggttggtggaccggtcatctgaagttggcacctcccgtgcagctgataagagtaatgaatcattccaaaatgagctttgactttgaaggtacctctaatctcatattctatcttgttgttttccagctgtctcctgagttccaccgcgtggtttacaggcaagcctaccaaactagagatcaaacggattggttccaacctcgtctcatgctttttctgcaagaatggctggaccacttgcgctgcaatcaatctattgaagaagaagagctcaatccgaagcttctcaaacttcacttctatcttcttattagggttagtgaaattcaccagcatggacaaatcgccgttgaaaaactccggcgtgtcgaagtagatcgtgtgtaggtttgcgtttgggatgtcgaaaacaggtattcttggtctaatcgcaagaaacactatcaaagtggcaatcgcaaaaaagataagcaaaaggctgaacacaaaacagaaaccggcaacacaccatatccagagactggtcctgctactccttggctgacggagaatcaccctatctttcctcggctctgcatcaagaccgttgaatctaaccgttgctggctttgttaagaccatttggccaactggtgtggattgtgtgctctgtggtgttctccatggtgtggttcttggagtataccatacagacgatggtgtttcccatgatggcgtttcgggcggttgcaactgcggtggaggaggaagatgaggtagatttggcatgagttatgtgatcaatgaaaggaaaattggaaatgtgtaatggttatggattaaataggaaaataacagaacttttgttttttgttgtgtgtaaaaaagggaaagcgagagtttgggcaaaagaagagagcttttgcataatggggtttggtttttgtaatgagtgggaccatgcgtgtcgttttgaagaactagtaaagcaaatctcggtggattaaagtttgaaaactacatgcgttttcgtttaatattccttcttcttaacaagtggcttttcctaattaaatctgagataaaaggttttgattgattacaggggacagatacttgttaattgaacaaacttaaaagtcttatgtattttaggaaaaggatataaaaattagtataccattaaaaaatatttcaatataggacttatttgacattttaagaataaaaaatttcattaaaaattctagttaatgcctatctaaacaatatcgttagaagcatcatgcatgataaaacactatgataaaacaatgtgttttttttcctgtctattttatgtctagtatgataaaacaacgatgttagataaaaaaaattttttgattaacctaattttattttattttcgattgaaaaactattgtgagtagaaaagaaaaaaataaaaaaataaaaaaaagtaaatgaatacaaaattattctttaagttgcttttaggttttgtctaaggtttgaaaaaacatttttgggctttatctttggttgtgaagataatcaaaatgagtttgttccttgggtaattgtgcttcttttttcttctcactttttgtggtagttgtaatgtgtggttagttgcggatccataaaacacttcagcactaagaaaaagctttttacctatgaaaaagttataataattccatttttgtcttttaacaatgatcatgctttccatagtaatttgataattccaaactcctggattttattaagagtaatggcagtaagttaggttttgttcacaaataaatacaacgataactgcgaaagagactcttattacaactgaaaaacttgttgaaagttgactacctttgattgatcctacaattgagacagacaagaatgagcagatgaagcacaaaaaaagttaacaagaagattgttttgcttttgggttaagaagttttattggggcattaacttggtcaggcccaaataataagcaaaatgctgtattttgctttggtaaagagttagctaattaagagttgttggagtctacgcataagtagtgctgcttgtgtaggtgagtcagtctagtgtctggaggtaaaatgaaagtatgtgtgcaagtgtgtgtagtagatgaaagtctactataagtatgagtgtaagagttgtagtaagattgcataaaagtatgaaggaaaagtttaagtgaaaacgattctaaacaaagagaagaaagttagagataagcataagagctaacctgaaacaaatatgagaataacaacaaaacttcatatttaatcagtaatatactaatatcttgataaaacctcacgtgttttaatattggcaataatttggtttaaccatagaatgaccaagatattttattttacagtgagtaaactagttttctataccgaattaaaggtaataatttgaagtttcaaatacgatatttaagatcctaattatgagtagaattgaatgtgaaacggttttattagtacaagaaaagggtatatgaaagggttaagcaattaggttcgaaatataaacacgcacagaactcgaagagccgaatttaacaatgaacccaaaattaaacgacactgaagcaacctttgtgttgtgactctatatgagtgtatatatatatggtttatagaatacaaagtcttcagatatgtaatggagatttcagaaaaatggataagacactatagtagcacacacaaaatccttctagttggagaaggaaacttctcattctcactatgtctagcttcagcttttggctcggccatgaacataactgcgacctctctcgattctgaaggtatgtaaaacccattttatatgaacatttataatatacatctatcgatcactagtcgtaactaatgtattgacttaaatcaataaaattttacatgtagatgaactgagcataaaatatatggatgcggtggataacataaacatattgaagagatacgggtgtgatattcagcacgaggttgacgtgcacacaatgagcttcgataatagtttgagtctgcaacgttatgaccgcattgtcttcaattttcctcacgcagggtctcgtttctttggtcgtgaattgtcctctagggccatcgagtaacgaaatatattctttcattttcttactataatatatagtttatgatttggactgatgtaatgataaaatgctgtgttttggatcaggagccacaaagagttagtgagaggatttcttgagaacgctaaggagatgttggaagaggacggagagatccatattacacacaagacaacgtatccatttagcgattgggggataaagaagctgggtaaaggagaaggtttgaagctgcttaagaaatcgaagttcgagctgagtcattatccgggttatatcaccaagagagggagtggtggacgtaggagtgatgattatttccctgttggtgaatgttctacttacatgtttacccaatcctaactttgggaaatcttgcttaatttttttttggtattatgataactaaaaaaaagaattgggcattacaacatcaacaaggtaacaataatttggtccgactggacacgttcattcagttccttctgaaaactcaaaagcaattggtatataaaaagatcaaaaagttatatgaactatgtactttgaaaaagaaaaaaaagaagaagttatatgaactatgttaataataaagatctttaaactttttaatctcatttttgtttataatacatcgatttttattgagcttatacaagttcccgtaactgactttatatatagtttcatgtattaatttatacataattggccaataagtaggccttttttttgttgttttctcatgtaagtataattaagtgtgtaatcatatgaatctctataatctatatgcatacatacatgtatatagaatatatctatttttcgccaacaagaaaaaggacgaggaaactaaattggttgagattaacactttagtttattggttggtccaagagttggtagatttctttgtcgtttctctatagttggaacatgcatttatgtgaacttcgattatgacgatatgcatccatactacatgtaaaatttattgttgttttccgccaacaaaagaaaaacgaaaaagctaattaaattacgtacgagtaaattgaacacttggagaatcacatggatcctggagctctgctcatgcttaggagtgctcgaggccttagatctttcctatatgtagacgttgatccttgtgatctaaaaggtttcgaggtcttggaaatctatcacccgtccatgtctgatggctttgtgaactcggtaatggtcgcacgcaaactcactgatcgattaattaagtacgagtggtgtactggaactcgatcactaaattcattaaaaaaaacaaggcaagtgatgattccctaagaaattaggtcaagattggagccatacttgtggaacaaggcagatgatgatttccctaatgaggctctctgactctcccttactagttcaatattagttctgtcttttgtcaacgtgttgacgaaatcaaatctatattattagttgttgttttctctctatgcttattgtgattatgatgtcactagatcaaatactcggtttgaatgtttccttataaatgtatcagcatgaccatttttctcatattttacgaaatatttagcctgacaagcattaagcagttctgttaaacataaaacatacaatatccatgaaagaaaatcctcaatgtacatgagtcattaccaaatgcaagccatttgatcagaagtaagctgtggctgaaacacaatgtacagatgagtcatctttttgtttgtttgcttgaatagaaacgcagcgtttttgactaatcgagtaaccaattttttttttacaagaccgaaccggatcaattcaacaaacgtgaaataaatcgaagcgggccaggtcaagtaggtagccctctcaatgattaagagggaaccagctgtatccagagaccctctgagtcagtaagaagcttctaagagggacaggaaacggtaaaaaaaacacgagttatgtccggtaatatcaaaatggcaaaaatcattcatttcaagaaagaaaagagtagagagagtctcacacagctataaaggcccaaaaacaccaatccaccgacgagtattgtagatttagaggtctacaactaaaagcctttgtgtgtgccagattagctccctactaatccgccgccgcacctcctcgatctccgcccagctcccttcttttctatctatctattcagttgtttctccggtaacaaccagctgaggaagaagaagaagtagtagccgtgatgatgatgatgacgtcacttggtggtggtgctggaggcggcggaggaggtggtggtagtggtggtgggagatttgtgacgtatccgccgcctctatctgtgcctccgtcggctcctcagtcacctaacttctctggtggtctccgatcacagccttctttcctcgttgagcaagagaagtaattatatcaatctctatgtttttcgctttgtcttatagttgacttgtttcttgatctctgttatactgatttggatctcaaagtcttaatttttatcgcaaatcttaaaactttttttttgtttttcgtatcgtatttttcatttctggttctggtttctcatactgagatctatgctttctacttctgatgcccccgtcgattttcaaatatatatggatgagttcttacctacctaccactgcaaattaagctccttttgagctcaatatacttcaattgtggattggtttctataaaatatccaacttttaaatttcaaaacaatttatctaaatctatcaacttagtttgtgtttgtatcgacagggtaatggattgttagtgccacaggtgttataaaatcgtatgttgtgttcatttcgtgtttgttgacttgtgttcatgaagctatgaattctccactctgcctagatgctgatgtttggagacggatttgctaaatgaatttgaatacattaatctactgacattcatattccgcttattaaacgtgattattaagtgaaaatgagtggatcttcttgtatgctcaaggtcatactaatctggataatctgcaatttctcttcttttttttcaggtatctttctgagttacttgcagagcgtcacaagcttactccatttttgcctgtgcttccacatgtttgccggctcatgaaccaaggtgagccatactgttcatcatatgatcttctgtaattttcgtttcttgcttcagaacttctatctttgtacagttgaaaagcattttcagtggtgcttctaagagagattagttatatcttagcaaaagacatatgatagagtagttgtacaaacccataagtaagatatcttactatccaaagagacacttagtcctccttctcttactatgaattagaatattcaacgatagtgcggagtaatttagtttaattgtggtataatagactttacaattgacttttctctgatgtagatttggttttcaaatcctattaataagacttttacttgaaatctaatttcttgaaatccttgttctgagttgtttcgtagggaagtgatattgaacagatcacatttgtgacatttgtagatcatagcaaaattagggtattgtcattgtttgcagtctgtttcaatctattttaactagagtgtcaacgttaatattcactaacttagttgagactatgatgtctctccattccactatcattggtgatggatttgttgactaattctaactggtccgtcttactcttgaaaattgacattttttgaaacagaaattttgcgtgtaaccacgctgttggagaatgccttaagtcagagtaggtttgatcaccctagccctctggcttctggagggatatttcagaattcaagagctgacatgaacggatgggcctcacaatttccatcagaagtatgactactaaccattaacataactcttttcatctaattccatactactgcagttaaagcttttgttgacttaagttgttctgacataacttgctttgacttaattgtaatcatagtcttcattacaggtagcctttgctaacactgaatatcagtaatgacaatgtttttgacttaaggtcaatgcactaactaattccattgccttgaagagccatataattgttaggtgaacgataggatagaaataacatgctctaatatttggaaccattctttgaatattataattaggataagcaattacgggttgctagcatgcaacagcgcgatacattgtcccttttccatggaagaaacgtttgataagatatttatttcatgttattcttggttttgatgctgcaatcatatgtatgtattgaggttgacatggcttctaacaggttttgttggtttatcttttgatttgtagagatcggtttcatcatccccagcaccaaattggcttaactctcctggtagctcgtccggtctcatcgtcaagcgaacaataagggtggatattccagtcgacaaatacccaaacgtatgaatctttattcccttgatgagttcctttattatcttgtcaaagtataaacaataatttcataatttgcagtacaattttgtcggtcgtctcttgggtcctagaggaaactccctcaaacgagttgaagcgagtactgattgtcgtgttctaataaggggtagaggcagcattaaagatccgattaaggtaatcacatttttcatttgttcagtctaataataccttaactccaattgtatcttcattaatatagcgttattgtttgcaggaggatatgatgagaggtaaacctggttatgagcacctcaatgaaccactccacatcttagtcgaggcagaattacccattgaaatagtggacgcacgtctcatgcaagcccgtgaaatactcgacgatctacttactcccgtggtttgttcttagctcttaaaagatcttaaaccagagatacatgtagtatttgtttgtcaatataaccgtacttgttttgtgtactgttttaggaggaaacccatgatttctacaagaaacaacagctacgggaattggcccttctcaacggcagtcttcgagaagaaggatctccaatgtctggttccatctcaccttacaatagcctcggcatgaagagagctaagacaaggggctaaaaacacgtctaaatttcatatttttgcttgcctctctcacctttccaagaaggtatatatccaccgtaacagcttccttcaaacaagaaggatttggagattctgtctccatcccattcctcctcttcctcgggctaccggtactgtctctaatccctggaataaaaaaacaaaaagaacagcgtcgtatatgaatctgtgtcttgtcttatttatcatgtcccggagagagttcagacgacagaactaggggcaatacaaagggatggtgagtctctctgtcgctgtcgctgtctctttccgagactatttttggcttgcttgctcttttttttttttttgttttaataatttggttcagtggagactactaataagttttgttgcttgaagccagtttttgggtaaaacatcatggttttgtgtttggtaatgaattattatgtttgcgttaacataaacatcaactaattaatatcttttgttactactagattctgcaaacacaaaacacatatttagacttagaaactcataacatttaagctttctcattgttgtcttcttcttcttcttcttcattctcatctatcccaacccactgcgtaaatgcgaagagaaactctttgaagttcaccattccgttcttgtcccagtccatttcctctgcagacacaggaatcaaaatcaatattcttggttcagtgaagaagaaagcttgagaagaagagggagggagtttaagaataaaccaaatctcttcattgcaatccgcccggaggatcgttctcctgattcatcaatggctcggaccatctcctcgcggctaacatatccgtccttgttctcgtctaggaacacaaatgtgtcaacaagcgtctcgaatgttggttccagctttggcattcccattgtccatttctattcatcacacaaaaatagctttaaaaccattgaataaccaatcaaaatctaaaacgaaatatcaaaccgagcataggagatcgataaaagtattttgcgggtaccttttggagagtggatgaatcgtctttaagaagatagacgaggcaaagaagaacaatgaattctgtaaatgtaattcccatatcctcgttaatatcgcaagccttgaacaaatcattaatctcttcttcatcgaacgagatctctagcttcctgatacaattctttagctccgtgtgatctattgacccgtttgaatcctcatctgcccaaaaccaaacaagtaaacaacctcaaatcgtgcgaaaacccgcaatttagaatctgccctatatgcactcaccgaattcttggaaaatggctttgcagtttcgaagaccatcatcgatctttgggaacttgagaacaatactgttgaaagatttcattgtggtgcccctcgatgccctgcgttgcacggcttctatgatcttagcctccaactttgtctctggaacccattctttttgcagagtttcagatttcgtcactgcacctcccatgtctctgttaatttctctctgtttggagataagatcgaccccgagacaaaatctagtttcttgtaagacaaggcagctttttaacgtcttgtttgtccgaaatatacaaacactgtctgattccaagattatcaaaaccagatctagattcaatatatgagggggaaataaaaataaaaatcgaggcataatagataaaggacaagtttcacatcagacaataaatgtcacaagaatcaggacgaaagcaaacaaaaaggtaaaagaagagaagaagaacctgttttagtttcttgtttgtctcgagatcaaaagtcaaaacacaaaatcacacagatctgtttattgttataatttttaatcagatgtttgagaagaagaaagcttttgtaatgggcgtgaagaatgctgaagcttccacgtaattgcgcatctttttaaaaaacgctaattcatttgtcatctatttattattttaacccaaactctccatcttcatttgacttttctccattttactacttcttttgtttttaaaagtttaattttctagatttttttttccttgtttcataaatattgtatctttatgtttgttatataatttttgtaattaatattcatgaattgtaaacttaaaaaactattaaatgaaaatggttaaatgtatatttataactaaatatgaattatttcttaattgtgtgaaaactttaagaatatcaaatatttagaaacacaagtagtaatattatttcaatgtacaaaggtattagctactagtactaatcttatctattattactttattggcataatgcattagtatatagtattcataattccgtatttccgttctagatgtcagtactattgggtattattatcattcataatttttagatgatttaaggcaatatcttaaagtcttttttctcacttctttttttcatatctcactaattttttttttctcacttctttaatatatttaaggcaataattatctttatcaaactttattaattatttttatatttttatatatagatactatattttggatattataaatatatatatatatatatattaaatttttattaactactaaaattatgttttattttattaacatcattataccgtttgaatggtaacacaataatgatactaacacaatttacaaaattacacattataatcaacctaattttttttattttttttggcatatttttattctaaattattttttaagttttgcttaagattttcgtaatttattattaaactttgaacatgaaaatatttttttgttatgtatacattattttattaaactattaaaccatattttttcgcctatggcatcaaaattcctcggcacggctctgccaaaaagtcgactaagtccttgtccgcttgctccgcgtaacgcatcaacacttgtcgatcagatccttctatccacgccttccttttgttccacccattctctactactttctccggtacctatatcatatatagccgacaatgatattataacccagatttatacagaacataaatttattttatgttaataccttagagagtatgtgcaaaaccctcgagctcactgcgacatggaggtaagacatcgggaacatgggaccaaatatattgcgaggtaaaggtgcatgcctatataatacacggtaagccgcttccattgtcgccttgatttggtccgccgtcttgtcacttgtgccgttgttaaccgtgcctatacacaattccatgatctgtgagtcatcctttcgaggaaatcggatgaaaaaatccaatgcgtaaattagcatatttaatttgggaaatttttatagaatatgtttgagtaagtatatgttgagatatatgagaaggatgagctctctttatatagtagaatagcaatctaaataccgtgtgctctgtctgcattaccaataccaggttgattattaactttaagcattttgagaaagtacttcgtggagaagcttaaaactatcttattttcttcaaaatgaattaacctaaactgcccactacttagaaaccacgcacacatgcacctaagtagggttactcttgtgtgtaaatgtcgtcatatttactttttcgtcatcagtcattttaatttgttgcattttttggaagttaattttgggaccatgggttcaattcagtgtattgatcaaatccatgactttgttaatcacgggtgtacacagaaatctatccatccttttcttctaacttgagaattcgaaaatttaaagatttcattttagaatctctttaaattttcattattgcactatcgaccttaggctaaatttgtcaatttatacataaatcgttataataatcctctttatatcaaacaattatctatggtcttactactctagtagctaggaaagacctttgtcttagataagtcttttaattctttatacaaagccagttttagagtacgaagatattatggtctcaaaatttaaggggccttttgaaaattactagatgtttggggttcttaattacgaaacaaacatatattattgaatggttattttatattttagttatttaattatttggcgtttttgaaacgactaccgttgaaattttttgtaagacattaatttcgccataactcttttccttatgtattcttctttgaaaatgttacaagcttctttaacaacaatttcatggagctgatattattattcttctttctgatggcactgttggtatctctctcctcttcaagttccatatcgggtatgtctttttgttgtcttccttctccaccctccatctttaatttgtttctaatgggtcgtcgctttctgtagatggtgtgtttgaatcacaaacctcggttagtggaaggaaccttcgtcatgccaagaaaagtaaaagcatcctcatccttttaatttgttaatccgatttgttaatttacttctgcttttcattttatgtttacgtcaatgtgtgaatatagactcatgtacatatttatgatatgtatgatatattgatatatagcttggtatggtgaggattatgacgtaacgtcggaactaggaacatttgtactcttacatgaattttggtcctgtctataagctagagatgtttaatttatagatttcggttatgtttcagaactttttcatctttggttttaatttaaaatcaaattgtatcattagtgttcttatataatatttgtattattggatcagtgtatcaagtttgtgtatagataagtatatataagtggtgtgacactaactcttgttttttgtttggttggaaacagaatgtgaagtgaactttgagtatatggactacaaggtcttgacaaagaggtgcaaaggtccagcgtttccagccaaagaatgttgctctgcttttaaagaatttgcatgtccttacgtgagtcagatcaacgacatgaatagtgattgtgcacagacaatgttcagctacatgaatatttatggaaactaccctactggccttttcgctaacgagtgcagagaaaggaaagatgggcttgtttgccctttaccacctctctattcacataacctaaacgcctcaactgctgattcgactcctcgttttatctcgctgttgatctctgctgcaaccgctgtttttgctttgttagtgttgacttgatcaatcaaaggaaattgaaagagccaaagagtgattacattttgataccatattagctaacaaactagatagaattatcaaattgttctgttactgaccaagtgtccaagtgtaaagaatacttgacctccaaaataaacaaaagaagaagcgagacttacttgattaattttattaccagaggcaaaacttatagccgaattgttaacaagaaaagccaaaagccaaaacaaaactcagtttacatcaaaaatcaaaagtcatgtgggtacaacagtatctggctccggcaacaattgagacaggagcaacaaaactactgttgacagcaatactaactgtataagaacgtatgaagtgatcttacatgctctcttcttgatggtcccggtgatttctatgcaatcgttttgcaggtcttgagctctgtttgtaaaatttgcagccttcgtttgtactcttcctagcttattcagcgtctcatgggtttgctcttctgccaatgactcttgttcatcaattaacttcatctgactgtttaagttatcgatagatcttgaatatatcagatattcaatctcggcctcaatcttctgccggaagatgtcttcaaccacaatctctgttcctccccacgagtgtttgctttggttcgtggtggattcaaggtcacggatgtgtgattctttcacctcaagcatggaccttgtttcttctagcatgttctccagttgttcaacattgtttaccagggttacaatctcggggtgaggtgaatttgcttcgctgacttgttcatgatgctgtggcattggttcattcccgatctcctggaattgctgaacctctgcaaatgaaatttcataaagagtcacattaaacatcataatcattgttcatgtgatgttattagttgattccaacatgataatgcaggctcataacaagaaatagttatgtaacagcagtaaaaataatgcaagtttagatacaatccgcagcaaaaaaataatcagaatggctacctttttcaagagcatcttgcaaggccaagaaaccgttgatggcctctgttaatggatccatttcatctgagtaacgattgtccgtgtttatcgactctccgccttctcctcccgcatcatcttttctcattgacgtttccccattttcaccattgtagtccatcattcttccactctgctttcttgagtcagattccaagctggaataagagttttccttctcgaaatcgacactttctcctctatgtttcttactattctctacacgaatgtttcctccctgacctgaactaatcattggcttctcatacctaataaccttgggagctcttgcaaccgtggaagacttactactccgatcatcatctatctctaaatccataccagctgaaaaaccaacccctgccacaaacctagaatcgtaaccactactcccaagtatatcaaaaccatcaccgctacttttcaacatattaacagacccaacagatccctgactctcttgttcaacttccggtgactgaaactgcatctgtttaccatgtgaatgagcaacacctgacaaccctctcttcagagctttactattctccatattcgcagacgtgtccttaacaagatctctcctaatcctcctccattttctcaagccttgtcctttcaaaaccggagaataagcaccaccaccatcacctggtgaatcaaaactcataggtttaccgagttcaacagaattagaagtcgaaagcagtttcacactctcatcagagcaagacccgttatccaaactcctaccatcatcacaaacgttgctggcactttgttgaatcaaaacattatcatcaacagactcaagtgcagagctttcactctccaaatccattgactccacaaaaaaatctatcccccaccaaattcacatcggtttcagaagtaacaggagctcagatcaataacccaaaacccgaaatgaggatcccaaattcgatcatacacaatcaaaaagtcaactcaacaagctatacaaattcattggttccttgacggttaaatagaaatataaaggtctaaaatttcctaccatgccaccatctatcggatcaaagaagagaagaaatgattccaaaaatgaaaatccagctcaatggaagaacacagatttcgaattgaatcgcaaagttttggtctttttggagaaaggaagggtatacagcagagagatggaaaaaggagggtgaaaagtgaaaaccctaatccaatgatcggattcgcagatctataattctctcgttcaatgtggaaagtttctttgtgggaaaaagtttattcttttttccctcatgatcaattttgttcctttttgaaaattacgtgtgggtggttggaatataacacgtgtcggaatcgcctgacctctcagcatcaccttcttcatttttgaccgtgagattggacacgacatatatataccgttaataattatcattttggttattacaatttcagaaaattgttgaactgacctaaaacatggggacagtgtgagaataaacagagaattacaaagggtacatacaaccataaaacaccacaagtcacattcttacatcatctgagaggattgagattagcacaaacgaaattgggctactacacactcattacacagactgaagaaacataacaaaaaaaaagagaatcagaaaggcttctcgtagcctcgagctggaggttggtcccaagcttgcaagaatgctgcacaattgcaaagacataatgaatctcagctctttaagaagctaaaatagaaaagagaaagaatttgatattggtcttactcaatggtatttctccgagtgacatgaagatcgaatcatcgtctgtattatttggtacttggtcatttccaatagctccctgagacgttttcaggatctgttagcaacaacaaacattctatgtgacataaaacttgacaagtagagtaggtacctctcggtcttgaaggctaactgtgttgttattctgtgggacactactggttccctggtttattggagtaaaggaatcaagatactctaccatcatgagtctttcattgtagtctgggacgtcatcgatgcccatatatggagcagcttcttgcctgttagatatgaaaacccattagccaaaatgtaataggtgtgtgtatatataagtgttaagagtaggacttggccgtactttcttcctggatcattgctggactttaccacttcttgatcatcatccaaattaatcacttctatctctttaccattgctcatccgagtactcgtaccaaactcgagagacttactagaactgctgattgagagatcaaaatcaacagcttgacgagattcctttatcccatcattcacatccgacgctccccctagatttaggtcacacatcttaaacgaagcaggaaacagctgatgttcttcagcataccctggacctgttctgccagtgtgtgtcctattgtatgtagagttattaaccagactttcatggctgaccctttttccagcagcaccgtcaatcagtcttttgttgaacgagcttgtctttccttcttcttccggatcgcattggtttccgcttgttttaaacatgttgaagcgttcattagcttcagaaactgccacccaatctctctgtctttttgatccctcctccaagtcactgccttcaccaggccttttctcacctactttccccaccgaatgtgatctgtgcagattaggcaattctaatcctgattctttctcactgttatccctgagaatgctactgggaaaagaattagacctatgacatttactgttctcaatatattgaacaagagcaaaatcttcaacttggtcattttcatcaccagtactatcggcctttccagatgattggcctcgagtctcacatcgattttcggtttgatcttcttcttcaagtccagaattatgagaggtatccttgatattatgactcaaataaagctttgggccttttgcagtcagagaagagcgtgtcctcgtaggcaccttctcaaatttacacagcgttgccaaatcaataccactcttggtgaatgattcatcagccccacactgttgatcaatagatgcatcttcacaacgttgatggatagatccatcttcgatagcagtctggttctcatcctctccaccattaccaccagacctacctttcatctctcctgatccagcactcaagctagaagagccttcggatactttagagatttcacaatcctgtactatatctttcccggcactcgaggaacctgtcttagactgtgcctcatcctggagattgtacttgtccaacacagactcggaatcacctgctccttcacattttctcataaattcaccagaggctgaccgctgaaccgagctagcaatatcttcagcaagcggctgctcttcttgatgcccagacacagagtcgtcaccagtctcagtctcaaaagctttacttctctctgaccaagatccgctcctcccaaaatccgagtcataacggtgggatctccttcctttcaagctattcctggatccagctgagctatagccatcaatatacctccttttctctgcagctggagctgaaacatccattcgggcttcttcttgagacctggaactctgaaactctccagcttgcttcctaaaattaccattctgccatttactggaaagcacagtttgtggtagaacaccttgagaaaccaagtactctgttgctagacgacctgcctccatgaaaacgtcaccgccactgcttctacgctgcaccggtggaggaggcagaggcggaggcagctgattgtggtatgatttagagcgtccccttccacgtccatatccacggttaaagccacggtgttggtgttcagaaccatagaacccatgtcctctcataggacgctcaggagaaattctagaaccagacatacccatcccaatagaaccagatctgtacccattcccaacattgcgttgcctagcatgcatctttgtccctaaatatacaaaaaaaactaataacagttctgatttccaggaattcacaagagtagtgaaaccatttagtctcaaaataccaagaagcttaagttatttcagaaaaagtaacaacttttgaagtttttgcagcagctcaaataagtttcaccggacagaacacaacagcttctaacttgaacttgttcttctcagaccaatccttgtgcgaaagaatagaaaatcgaacaaaacgatggatctcgagttccagattcggtgaagatctaaccttctctcttacagaatatgacgatcattcgattccgttgtccgatttcgaagaatgaacggacacaatcatctcatgggagattttaatggtcattttcacttcagttcttcttcatcaaacaagaaccctagaattccccaccacaaaacaacagtcaaatgttacggcaacggcaatcaaatcgaggttaaattttccgatctagtgtctctccgatgaagaacacgacgaacaagtttgtaataatcagtctccagatttcagcggcgaaaatctcgatcgctgctgattacgattttggggttttcgcatttttatttgcgtctcaaaagttttttctaccatatattattagcacaaagacggaaagcatgaaaacgccacgtcagcttctttggtaaactagcactaagttcatctgtaagacgcgtgacttctactctcctgcttgtacactataactgtatacacttcatgtccaaataatatcatgcttatgagattagaattttaaaaatggcatgttggaaatgttttattttgaggatagaaagtgagatggtctgacgttgcaacccgaatgtttacaatcaagaaattttttgtgcaatattgtcaagagttacaataaataatccgtaactgatcatatcctagtggaacatcggtgttggatcccaaattttaacaagtagtatgtatagcttttgaggcccaaacggtaaaaaaaatttatatatagatcatgaagcccccaaaaccgaaattgtttgtggcctcataaatctcagtgtcagccattgatacgcaaataaaaatgcgatgcaaattctatatacaatgtaaattatttgtgcaataacaatcagtcatgtctaataataatattatcataaacgatcaaatatttatgacgaacaaatgaaaaataaaaatttgtaaatcatcgttttgtcatgatcatatctacatgctacatgcatcaattttagatgagaatttaatgggattgaagcctaaactattttgtttggtttccaaagacatatattttttataatcacttatcgttagtttattaattcttttataaaagaaaaattattttcatatttatgtttattttcatattcatatttattgtttatatttagacattatgagaatatataaaattatttagtacattttgaaagaaagtgaccacaagaataagtaaattaaaaagttggtgaaccccattccatttgaactttcagtttattgtatagtatattttaactccacgacttgttgaccgaaacataaactaaaaatctacgacatgaacggaaagaataaaatgtggatacaattctacaatttagtctttcacaaaaaatcagaaatattgcaaacattaacgaaaattcataaacaagataggtaacccaactggcttgagtttcttctatatataaacaaaaacaaataagctatactgctagttcgtttaacaaactagcgaaaccaagtttatctgccaaaatgatagaaattggttttttctgtggttggaatattattgaaaaaagtatttctattaattgattattgtaacttaatcacttatatactaaatatagtttgcaaattagattttttgctcatgtttttctaacaactagctttaattagtactaattacattagctatagtaaaaccactatagactatgctggttgtgatataataggtatatatggtagaacatcaatttgccagtttaatattcagctcctgttgtgaatagttggaggaaggctcatgcatggtattattgatggacatgcactgattagactatatgaaagatatagcttaccatatacataagaagactaaacacaaataaatggtatttcatatcttataggtgtctgtttagagaaaagaaagtataatgtatatttctaagggttttgtgtaaaaatatcttcaaaatcatctatttttgtaacttcaacatttacgtcattgggcacagcactgtctacttttaccaaaaaaataaaaataaaaaataatttgaaaacgtttataaagttgaaggttgttttgcacaaaactctatttctaaaaatagttaaactgttggtgatttttgtggaactgattaattaacacaattggagaaaacaaattgaaacttttttgtttgttagagagttaaggagaaattttatctaaccaagctgtgtaaatctcttgtagtttttctgccgatatacattttcattgtgttgagggtaaacgataatcaagaacgagagagagagagagcaagagcaagagatttctactacagaagatttattatattgatcattttgtgtgatcaacccataaaaacagagagacatagacaagtccatgtttcgatgtttcgatctctcttactgtctaaacggcgaaataaaaagtctgatgggtgtcacttattgcatgtatattagtaaatcaggtattaagcactcttttatcttcattgttataaggtattaatcactcttgtatctccatcaaaagacttattgcatataaaaaaaactgctctgtttccattttaattacaataattttttaagattttagttccatgttaactgctctgtgtcatatatgtaacacctaatcacgtttcagcttgagcccaagttaaagctgaaacttgggtttgcaatggctggtattgataataaagctgctgtaatgggagaatggttcgactgtagtactactaaccacaggaagagatcgaaagcggaacttggtagagagttttctttaaattacatcaagaatgaggattctttgcaaaccacctttcaagaaagttcacgaggagctcttcgtgaaaggattgctgcgagatccgggtttaatgcaccgtggttaaacactgaggatattcttcagtcgaaatctttaaccatctcttctcctggtcttagtcctgcaactctgttagagtctcctgttttcctctcaaaccctttggtaactttttcttttcaacatttcattatggtctctctctttcgtgaatcagtgctctaaaatctcttatcatttgtaagctcagctatctccaacaaccgggaagctctcatcagtaccttctgataaggctaaagctgagttatttgacgacattaccacatccttagccttccaaaccatttcaggaagtggccttgatcctactaacatcgctttagaacccgatgattcccaagactatgaagaaagacagctcggcggtttaggagactcgatggcttgttgtgcacctgcagatgatggatacaactggagaaaatatggacaaaagctagttaaaggaagtgagtatccgcggagctattacaagtgcacgcacccgaattgtgaggccaagaagaaggttgaacggtctcgggaaggtcatattatagagatcatatacacaggagatcatatacacagcaaacctccacctaaccgccggtcagggattggatcatccggtactggccaagacatgcaaatagatgcaaccgaatacgaaggttttgctggaaccaatgagaacatagaatggacatcacctgtatctgcagagctcgaatacggaagccattcaggatcaatgcaggttcaaaacgggactcatcagttcgggtatggtgatgcagcagctgatgccttatatagagatgaaaacgaagatgatcgcacgtcccacatgagtgtttccctgacttacgatggagaggtagaagagtccgaatcaaagagaaggtataaaaagttgctctagtaaccattataatacttagaaagacaagacgttctgacttctgagctctgatggcattcccgtatcaggaaactagaagcttatgcaacagaaacgagtggatcaaccagagccagccgtgagccaagagttgtggtgcagaccacaagtgacattgacatcctcgatgatggttatcgctggcgcaagtatgggcaaaaagtcgttaaaggaaacccgaatccaaggttcttgtatccaaatgctctgttctgctgctatccctttgttgaatttaataaaatcagttttctatgttttcaggagctactataaatgcacagctaatggatgtaccgtaacgaagcatgtagagagagcctctgatgacttcaagagcgtactaacaacttatataggcaagcacacccacgttgtaccagcagcacgcaacagcagccacgtcggtgcaggcagttcagggactctccaaggcagtttagcgactcagacccacaaccacaatgtgcactatccaatgccacacagtagatctgagggactggccacagccaactcatctctatttgacttccagtcacacctgaggcatcctacaggtttctccgtttacataggccaatctgagctttctgatctttcaatgcctggtctaactattgggcaagagaagcttaccagcctgcaggcgcctgacattggggatccaactggcctaatgttgcagttagcagcacagccgaaggtggaaccagtgtcaccacaacagggacttgatttgtcagcgagctcattgatatgcagagagatgttgagtagattacgacagatatgaaacaaatctctttgttcactgattgctcaaatttttgaataaatgaaaaattgagagaaggtaaaagctgttttgtttttacagtcttgtcgcaaaatttagttaggcctaaacttagcttctgtctagacaaagcttaaacagaagaaaagcttcctagctgtttgtttggttccgaaaagtgaaatgccttaaaagagttctaaattttcacttagggaccagaccaccaaaagaaagaaaaggtttttttacattgaaactaatctttacatgaacgcagtcctaccacctcttcggctgtgtttgtcgtatgcagtgttgaatttgtcaaccacctcgttcatgttgctgcattttggggggaaaaaggagagtaagagatcaaatatacaaaggattctttcaggacatttcgttggaatgaaattgacatatggattggtcaaggtgtagcacaagattagattttttttttaaaaagaagcttatattcccttagctactacaggctcagtatcttaattataacaaggataattgagcaaggtcctagatttagttcttaatctaaataaaacaaactatctcaatgtcagcctcaaccaagtactggtgatttcatctgtcttggtatcgtaaaacattgcattgtatcaagcaaaagatttgcatgcatgtccatcattcttttattcaaatagttaaatggaatagcgtgtcgagcacatacctggtacaattcgtgatcattgctaggtaagacatcagcaatttgtcgttgtactcctgcaaaagaagagaacatcatatttataaagatatcattcacaacaacaagctacattaagaatttaagagattcgaaggccactttatttaaccaacattgctagaaaaaggtaaggtactacttaccatcaagaaattttcattgaacttctctgattctgcggcaggcaaacttctgagcagactagatacttgtctcagaactgagttctcacaaggtttatcacctagatgcagaatcacataagtcattagtaccacattactcttgctcaaaatcatcttctaacacccttttaattctttcttccccgtaggaaaacacatagaaatattctaagatcaagggacaggtcacaaaagcttgattaacaaattgaagagggaccgagagtggggacttgagcaagaatatacctttctgcatagcgacaatatgctggtatagcactctgattctgctattaagcatcttgatggcactatgtattccagtaagatgagcagccactgcacaaaatcgaggaatcaacctaaaattccatgcagatgaaaaagaaagaacagattatgataaatatgaagtgataataaagcttacactgagtcgcagctgagcctccatcagatggcttaagatgtgcaacatgatcaacagatattctttcagcttcaactgtctgcacgcgtttacaatcattgcaatgttattgaaagtccactctcatatcacatagatagattacagatcaagtggcctaaacacatacctcaattgtgtagctggtatgcacgaaaatcgactgaggaattccatcaatgacatgaaattcttcaaattttgaaaacaatcaaaaagacaggattagcaagattataatctataaaacaataagacaatcagtgatgcaaataaccaatttttaccgctttcgtagatagtcacaggaagatccttctgtgcatgattgatagcaggatttaaaagaacatacacaggagattcattaatgtccatcagctgtagatgaaaacctcaacaaatcagtacaatgagaatcctaaattcaattaaatttatattaaacattaaagctacactactcacagctttgtggatatgcatatcagattcggtagcgtcacttcccgtagaataccatcccaatacgtagaagtcagggaacaccttcttatctaaaaaataacaaaactcacaaattagcaagagtatcaaacaatcgacaacaaaagtgagcgagtgtaagtaaacttacagagttcttgcttcttctcgaggaaggatctgtcgagagtatcaagagcaggatcgaatatcagctcgaaactgttgaagatctcaaccgtacgacctctctggagaccgatgacgcagccataaaccctagggttttgcagtaacatcgcgtcggcgttgttggagccattcccggtggcgcaagaagcggcgggaggattaagctgagttttaaccctagtgaagtgatcggatatgttaagcatcaccagaggatgtagcttgaacgtgagaccgctcgacgaagaaggcgccattgttgtcgctctcgattttttcccggcgcttgtcgttgtcctcctttagtcccaaattctgaaatcggatcttaaactcgggtcatgaatctttatatagtcttggcctcttgggctttccttctaagtttagcccatatataactttcttttgttagaaaaataatggaaaagattatagcatgtacttaattttttagcgttttagtatatatttataatttgaatataaatctttgaaagaaatatctatttttttaatatgaaatttcttgtattttaatgaatttgaaaaataattatgattggattttgaatcatttacttctttttttttggtttgagtatatagaaataacataaagatcataatgaattaattttatttaatattattggatatgtttgtaagtgttactattaaaattttattatgtgtgtagtctgttttaattcttcttttcgtaatatatatatatatatatatatatattgatattttaaactatttttagtttatataacatatctttaaatatgtttcctatgttgtaagtagtacctatcaatattttacagaatattacagttttgtattctgaatgcaatcttttaaattaaatttcatttaaatttcataaaaatagttaaggctacatttaaatctgtattattgttatttcattaattaaaaatataactgtatatagtttatgagaaatcccacattaaaagtggaaatagaatatgagtaatatacagtatataaaccaaatctactcataaacaattagttttgagtttggaaccataaaacttaatatagtaaattgataaatatgttattttagattctatatataccatatataactcctagtctcctatgatatatctgtcattacatcgtaaattgcttatcactagccagtagccaccagccgcagcctctgcacccttactcatatcattaacacattgctggcttgcaaggtacaatctttagttatgtcattcaagtcttcatattacggtagatttttccaaccgtattgttcaaacaattgtatccgacaatataatcatgcatgggatctcgtcaaactctaacgacatgctttttgacttatgataactttttttcttttcttcagtcaatcttatcaagtcatcgtctacgcttttttccaccatcgccttcactttgaagaagcgtgagtgtaggtagtgctatatacttgtgggaaatttgggaatatgctcatttacatttttacatgtatagacataaatctttaggttggatatgtgacatattatttatgattcttttttcaatttatataaactagtagaccacgatttagttttctcactgattagcaaatgatggatttggtccgtattgaaaataaaagacatatatatatatatatgtgtgttccgttttcctgaaatcaactgcaaaaagttttcaacaaacgattaagaaaaatgaaagtgacacattaacacgttagataatgcattaacaaaatattctttcttttcttttttcttcattctttttaccttcgtttataggagggaagaaaatgaaccagaattttgttgatattgaaaaaccaatccgaataaagaatctacgaaatgacactatactaaactcgttctatggtagaatgtctttgcacccgatagcaaaagttattgtagaaaactattttatacctaaacaattcacaaacctcggagaaatgatattgttgtatatttagaaatgtatatcaaaagaagaaaatagtctttagtggacactgacagacaacgactagttttatatgtaaccatcagttcatctttctagataaaaccaatgttaaacgcaactgctaatctcttcttcttttcttttgtcaaccaccaaggcaccaactgctaatctctttagactctagagatagcgaaatatcttcattatttcataatatacataacaattttattaatccttaattcaaaattgcttggaaaacactgatgaaattaagcatctactaacagaaagttttgtaaattttcaaaaactttctcctaacgttcctctcggaaattggggttatctattctttaatgctttctgctgttgcttaaagtagatgtttctttttttcacgctataacccatataagtataatcatataccaattaactaattctccatggagactaacattattaaaaaccaatggacagcaaaatatggaaaatctcagctcagcagtttcactaattcaagtaacttaatatccaacttgatccacacttgtgcaagtttcaatggttaccactaccaattaacagattctcttctattttcggttttaggaagagtttcgaaactctattaatgacacaaacaactaattaagttatatgtggaaattccagctagaattttaggattttggtggtaatttttttttatacaaaagttataatatttttgtaggatctttcataaattgtattctaagttatttgaaggacatgtaaacatgttaaactgaagttaaaacgacgacgcactagcctttgactgcacactgttaccgagtgtatatatagagacatttgatcctcgttgagccatcaaggtctaaaaccaaatcaatccttctttaatttacttattcttagtataacgttcacaccttttcttacacatttacaactatatatggagtcgtcacggagcctcgagcacgtgctctccatgcaaggtggcgaggatgacgcgagctacgtcaaaaactgttacggtccagcggcacgtttagccttgagcaaaccaatgctgacgacagccatcaactccataaagctcaccgaaggttgctcctctcacctgaaaatagccgatttaggttgcgcaatcggagacaacacgttttccacggtggaaacggtggttgaggtgttagggaagaagctagccgtgattgacggtggaaccgagccggagatggagttcgaggtcttcttctctgacttgtcttccaacgatttcaacgcgttgtttcggtcgttggatgagaaagtgaacggttcgagccgaaagtacttcgcggctggcgttcccggctcgttctataagcgtctgtttccgaaaggagagctccatgtcgttgtgactatgtctgctttacaatggctctctcaggtataaatgtatcatccattaattaattcaatatcttttgaatgaagtttactttataaacttgaaggtgatgaacatttgactatataatttaatttgtatcggccaaaaaatgatttgaagattactagactagtaaaactaaacaaaaagttaaattatcgtttcttctaatgttaatgaacaatatgtcaaaaaatttataaagttctattatgatattcttcaaaaacatttttgttccatgaccgaaccaacttaatttatataactgattattgttttaatgtatatatatcttatgggtacagaaatgtttcaatttacgttttttgttttttaaatgtttcatttctttgtattggatatgataggtacctgaaaaagtgatggagaaaggatcgaagtcatggaacaagggaggggtgtggattgaaggagcagaaaaagaagtcgtggaggcatacgcggagcaagcagacaaggacttagtcgagttcttgaaatgtcgcaaagaggagattgtggtaggaggagtgttgtttatgctgatgggtggtcgaccttctggctccgtgaaccaaatcggtgatcctgattcgagtctcaaacaccctttcacaactttgatggatcaagcttggcaagatctagtagatgaggtataatctcttgtaattacgtcatgatgttacatttatttatggaattgacaaaacgtccctttttatattggtgagcttgtaaaagggtttaatagaagaggagaagagagatggtttcaacattccggtgtactttagaaccaccgaagagattgcggcggcgattgatcgttgtggtggttttaagatagagaaaacggagaatctgataatagctgaccacatgaatggtaagcaggaagagttgatgaaagatccggattcgtacggtcgagatagggctaactatgctcaagccggtttaaagccgatcgttcaggcctatcttggtcctgacctaactcataagctcttcaaacggtacgcagttagagcagctgccgacaaagaaattctcaacaactgtttctatcatatgatcgctgtttcagcgttagggtttaatgttatcgatatatgtacataacatgcgtagtattataaaaagtatttcgacgacgaaatggtttgatgcatggtaaaataagtaattatcatttatcacactaggtttcttatatttcagataaaattattgtgtttcccataacttttgaaatcttacacctttctcctatttattgaactggataaaacaataatatttgagaaaagaaaattattcaaagaattgatcggaaaagtgaaacaaaccatttacaatatcacacagtacgtgaaatatgagaaaaagagaacctcgtgaccaccaatgacactttcccacgtgacactcattaaaacgtcaatataaacttaaaaactttttacaacccaattaaacttgaggaaactaactccccaccacccctgtattcattcctctcacaacacacaacaccatatggcttcttctcattcactatcaatttcaaatctttaagacagtattatcctaaacaagacaatgaaagatctttctttcttcttcctcaaaaaatactccctcgcctcgagaatgcgaggacgaggtccacgtagcggctttgctagctcttgtggtggtgatggctcaactttgacactaaaccaacatcaaaagaacgatgtggggccttctgttacacctgaaaacactcctttcggtggaggatctccgagaactctagaggagatgatacttcagctagaggttgaagaagatattgttcgaagagcgagactccgtgaatcttactacggtacttacgataattgtgatgaccataatgatgttgatgatgataagttatatcatcagcccgcccggatgtcatgcgttaacagttccgatattttgaggtgcgtcatgcttatttttatatgtacttaagtaaatattctcattagggactcatgagctcttacatatagttaactttttttgacatgccacgttagtaattaagatgaatattgaataatgaatataacgtattcaagaggagaaataacgttggtttcatgattgataatatgatattcaccggtgtagatttgaatgtacgaaacaagttatatgactacattttaaagtgtttttttttttttttttttttgaattttctagatttcgtatactggtgaaatctgtagtgatatttaaggaattaccggaagaaacagaaataattttattgtgtatgatactatgatcaatactaatatcaacttctgtttgtctgccgttaaggtcagcaaggaacgcgttgaatcagtacccacgtttctcactggacggtaaggacgctatgtaccggtcatccttccggcgccatcttggcaccagtgctgacatgacgatacagggtgggcggagatcccactgcggggatcaacggacatcaaagagatcgagccagatgagcttggagacaaaacgcctgccacggacagtggccggagagagtgtggtatggtgcaagacgggggttgttgcaaagctgatgggtctggagatgatacctgttccggacaagggaaaatcgggaaaagataagttagggactctgctcaagagggagcgtctaaggaggagagaacggactctggacgttaatggtcggaccggtccgacgactgaagcttcttgctcgtctggagggtttaacattactagaccaatcggagcagttgggtcgcctagtcgcatgggtggatggcccacagcccgtctcccatagacttacgatgcaaaactagcccattaaaaaccttcatgttatctataaattttcattactgattgattcagtaactttctatgtttctcataaatcttctagactacataattaaggatttccaaaccaagcacacacatttttgtgactcaattaattctctctgagcgagaaatcttaggaagcaggcaaaaacacagtatacaagttctgtctcaagctcagattttggtttcagacagagttggatgttcgatggacgagagtacactgcgattcaattggaaaatacctaacaaactttggttgcgaaaacccaagaaattgtggatttgtgttggatatatcagacggaaactcctaggtccgacatacccatgatccttttgttcaatgcaatcctcttctgtctcaaaagcgaagtcatggaagccacctaatgatttacgacaaaagaatttaatgagacgttcatagcaatgaagctcaaacaatgggcgagaagaaaaaagtcagactcacttcagctctaagcttgatagcatcccttccaggaatttgccgaagtccgtccatcaaatctgcagcgaatagaactctttgtgtaagttgaaatctgacgtagtggcattatcaaagataccatttgaagggagaagggagaagtgagtaaaaataaatcttgttcaagattaccagcagcttcacattcagctttgtggacggacttagcaagacgatgtatatcgtttccagagttcctatagatataacagtagtacccatattaacataaatgatgtcaataacttaataaaagaagtgggagcgtccatgttggggcatacatgagctcagagagaccacgtttcatatccttctctgctaaagccgtcctctcaagcaatttcctgctctcctttttcatcaagtctacagacatgtttaactcctgaacatgcttctcagctttcaagaattgtgcctgaagcgacgatgattttgaagtggatgtaaaaataagggaagggacacagaccagggcaactaagcataacaacgttaagaaataaatttgaagctggtatagtatatacctcttcgctctgaaatcggcctagtgtattacgaaacaagaatcttcttgggcctgtaagtcgaacaatagaaaaccaaattcatacaagacacatataagtaaaacagatgtaataccatttggatgctcctacgggaaggaatcttgtaagttgtaaaagtgataagagagtagaggttatacctcgcatcagaacgagactagcagcgacaccaatcccaatagcagcagccggatgctcttttgcgtatatcaattcgtctgcgaggataacaaaagcagcagaggatacgaggattgattaatcggaatgacatgaagattctagtttcagaacactataagatgcactacaagtatatataaaagttttgtggcagctatctgttatatctcagtttgatctaaaatactcgttcctaagcattacagtagtctaccagtataactttttcacgaaaattggctgcaagatacctgtaactttactgaagaaagcattctcataggtcttatactgagtcaaagcatgtggaatgaaatcctgcaatttcagaatcaaatgtaagattgtatgagagaagacgaagacatatacatacatctaatggaactgtgatttcagccagatagggtctactccatatcacacatcattaagctacatgaatatctgatatcatataaaaacattgtttagagaataatcaagaatgcctcagcgatacattacagtcttctaaacaaccatttgaagcagaatcagaacccaggaagagactaagatcattgccaataagttataatggtatgattcaacaagattttacccatatgaacaaaaactagcaccattcaatacataaaactgctaattggagaaatatctgttctgaatcgagctcatttctagaaattatagcttacgagatactaaattccaccatatccatggtttgaaatcctgaaaatgttttttggtaaacaatctcgattcgcaaaaattgtttggtgaacaaaagagagattaactaacctgtatagagcggaactgagaggtagaattttcacggagggaacgagcagaacgcattgcggtatccttcgattccttcaccgtccgttgcaaatcacccacccatttctctgctccttctatggctccttccaccgattcaaccactccgatcgctgtatgctccatcgcatcagaaacagtttcagtctcaatcgctggagccgaatcatcggtaacgccggttgcttcggtttcgctcatcgtctccgatttgcctttctcgcacggagacaacgccttttctccttctttcaacttcaaccggttcgattcggttcaatttgattccaaattagaagttggttttaaatggttaagatagacccggctcctttatatatcagtttgcggttaatgggctttaagattgggtctgcgaactatacattacattcccttttcttcgtcttcatcttcgtcttcctttcctccttcattcctcttttcttcgtctcccaccatttctgcagaagaagacaaataaaaaagctctcatttatcttcgtggagatctaaaagaaggaggaagacatttcttccctctggatctccaaaagtaagaacatttacaaggtttgtttttgtatttgttttgttttaattactccatgagaattgagagttttcttttcatggattagccctgatttctattgttatctctttatagaggcaaattttggttgatctgtttattcgcatttgcatagaaagcttgcgttttgttgtctgaaacttgagctaatgatgttggtgaagatgatattatcctctttttagtgaaacttttgggaataccattctctttatttagatctgatgaaacaaaggtcgaaactttataggtttgcttcttcatgtttttttttttgttgttcttctggttgtttcagaaacgagaggtttgggtggggaaggaaagaaggaggaagaggcaatgtcagctaggtattggtgtcacatgtgttcacaaatggtgaatccagttattggtgccgagatcaaatgccccttttgccaaagcgggtttgtcgaggaaatgagccgtgagattaatggcggcagcagtagcagtctaagggaggttcaagaccctgagattgattttggtacagaccgtgcattgtctctatggggtccaatcttgcttggaatgatgagtaatcctcgtagacgtagaaggtttaggaggacagagtttggtgtggataatgatgaggtcaatgtatctgatgatgttgatggaaatgacagcgtcgatattgatcgacatcatcatcgtcgtcatcgccacaggcaacaaggtagagagattgatttagacagagagtttgagtctatccttaggaggagacggagaagctcagctactatattgcagttgcttcagggtattcgtgcagggattgcttctgagtatgagagctcggatcgagacctgttaaatcaatcagctgttgttcagggttcaacgagtttgaatcaaaaccggaacaatacttctctttctgcaattggagattactttgttggatccagtttagaccatttgcttgaacatctagctgataatgattcaatcaggcacgggagtcttccagcacgtaaagaagttgtggataatctcccaacggttaagataagtgaatcattgcagtgctcgatttgtttggatgattttgacaaaggaagtgaagctaaagagatgccgtgtaagcacaagtttcacatccggtgtatagtaccgtggctcgagcttcacagttcatgtcccgtgtgccgatatgaactccctcctgatgatgagaccaaggttaatcctgtaagaccgagaacaagaactctagagatcaacgtaagtaatgagaatgtggaagatgatgcaaggaacagtaatgtgagcgagagaaggttctcttttccatggccgttcagcggattattctcttcatcctcttcgtcatccgcatcggcctcggggtcatctcatctcggtgagaactcgtaaactgctattcctcagcttatagtacataaaatcttgttcactcagattgttgaatactgcataacaaataaacactttcgaggaatggaatcttttctttatttgtattataatatctgatgatcatttgggtttccgttaaaagtatcccttttaatttagtaaaatataaaaagatgaacacaggtatttatgttgagagggagaggcatgtgactgtgagtatggttgttgactgcatgaatcgcattatctccaaatacgaatcccaaagttgtgtgatcacgagccaaatgtgatcacacatttttgtaaaatatattcaaaaaatagtctttgtttatgcaattgcactcgtaccaaactaatgtacttgtaaccagagtatgatccaagaacattatgtagtgtgtgggagccacacacaaaaaaagaaacaaaagagactttgagtttcatctcaagattagtcaccatgatgaataaacatccaaaacgctaagaaacaccggcaaaactcaaacgcaaatgggatcacttgacggtcaagatcttgataacaatagcgttacctgtacggaagagagccacaacagagtctccggtcttgcagagttgcttctttttaccatactctgacgcgaactcgagagtttcttctgttgactcgtcgatcgaggctctagccgatccagcatacagcaccgggactaaaccacggtagatgagactgtgtcttgccggtgcctcgttgctacacgcccaatcaaaagagtcagacgtgatttcaggaaccaccacggacaaaatgggtatccctggtctatacttagccaccagcctcgccgtgctgcctcctctggtcaagaccatcataagagtggctcttgaggaagtagcggttctgaccgcagatgaagcaagtgactccatcgggctcatagggaccgcagcgtgaagcattatcctcttgaagatgtctccatagtcaagtgtgctctctgcttccacacatatcttggccattgtacgaacagcaagctctgggtatgctccagctgcggtttcaccactaagcatgacacagtctgtgccatcgaggacagcatttgcaacatcagtagcttctgctcttgttggtcgtggggatttgatcatagactcaagcatctgagtcgctgtaaccactggcttccccatgaaattgcacttgtagatcatcactttctgagctaagaatatcttctcaattggaatctccattccaaggtcacctcttgcgatcataaacgcatccgagtttatcaagatatcatcaaaattcgctacaccttcttggttttcaacctgacaatatcaaaagtaacatatcataagaatctgagtatggatatgtgatttatattagtttgagtgatgtatgtatatatgtacctttgacatgagaagtatggttttagcatgttttccaagtagcttcctaacttgtaccaagtccgaaccttttctgacaaaagacagagcaatcatgtcgatttgattgggaactccccattcaagaatgtcttgcttgtctttttcagttagagttgggagatcaaccacaacaccagggagattaacgttctttctttcaccaagcattgaagtgttctcacaacgacaacggacagtgcccttttctttgtcacaagaaaggacctttaacgagatggtaccatcggcacagagtatgaccatgcctggattcacatcttgcgccaacttcttgtagctcatgcaaatagttttctcatcacccttcaagtcatagtcagttgaaatggtgatttcttggccttgtttgagctggataggtttcccatcctttaagaacccggttcgaatctctggtccctgccagacaaatacaaaaatcattcccataattattcagaaaccaaaagggtcccccaaaacatataaatctatcacgttcatgagattattagcaataagaccactaagaagagtgtctcagctaactttaagccacattatacattccacatttttattaactttcattaccagaaagccaagtaacagaccagagagtgagaatttgaagcaaatactttaatgagattgtaatcttcattttcaagacgacaaaggtaagagtctaatcatccatgatgcatcaactttgtattaatattctggtctaacaaacaacatcagttctccatttggtttctgtaaccagcaaacatgtaccacagatattgtctaattcatgctcgaactggaaacaacgtaccatgccacaaattataccaaagttcacaggacttaaacatagccaaaacgagtgtcctcagatcagcaggggaataaccaatcagataagacatgaatcacttgtaaaatgatagagaaacgatcagaatcatgcgtgaacagagcccaaatcaaaagaaaacgcctcgatggcattgttatacagacataaaaatgcacatatgacaagttttataagattgaccttggtgtcgagcatgacagcacatagcatgccagtgttaagcatggcctgacgaagattgtcgagagtctcctggtgatattcgtaagatccatgagaaaagttgaagcgagccacgctcatccccgccataagaagcttctcgaccattgggacagatctggacgccggcccgagtgtgcacacgatcttcgtcttaggcctctgttccatagccatcgcagtagactaacagatctcgatacacaaaatgataacaaaagacgatcacggagtgtgatcagatactgcgtcagagagatctggttaagaggacaaggcagagacaaatctcttcgtaacgtttgatgtggaaatgcaaggcctttggttggtggtggtggtgcagatgcaaaacctaaacgcaggttgctgcaacaaattacttggggactaaaatgaagaattgtgttaagtaattaattaattctgtgagttgagataaccaataatgaaaataaatacacttaacatacaaaaataaatgtagagtaaatcattaagattttattaggaaaataaatacttttatactatgaacaacaattattttcgtttttattatttgtggaagaaggaaaatatcaatctagtattttctaagattttgtagaataaaaagaaaacaaaatataaatcgaataaacccaaaaaaaaaatctgaaaattttctgaacacttgatattttcaactcttgaataaattatacttgccaatttgtagcacttgatacttacttgtcttgaaagaaaactgtcacagaatcacaatctaggcaattccgcgagaaatatttaatgtaccgtttataaccgcagtggcctattagctcagttggttagagcgtcgtgctaataacgcgaaggtcacaggttcgatccctgtataggccacttttttggctttcattttgatcaaactaaaacgtcatagagagagagagagcgatgattttctaaaagttttagaagattaaacacacattccatgtgtatacattttacagaacaaggagaaatgtgatgcaaaaagagatttgactcttaaaaagttaaaattccgtttctattcgataccaatctttgcagtgtttataacagacagattttacaggtcatatactttcactttatctttgcacaattatctcaatgcaaaggaatactcactaaaacatgttagcaatgaccatcaagctacttgctcactcttctagtatctatatttccccctacacttttgggtacaaaatattacttcgtcgtacttgaaaactattttctgtggacaacgcttcttacacatgaagcaacgaggtcgagacatatgatgattgttgggtagaacatacatctttttattgttgaagcagatccacgatgaaccaggcctgatgtataaagccacccccaacatacattcaatgtgtagcgtgatagagcagtactcatcacacttataaaatcgctcctttggatttaaatttctctcgcaaacttcacaccaatatgtcatggtacttgtttcttccccatacgaaagagtgagcatatgtttgtcgtgcttatacctcaccttttgaggtaaagtagcacatctaaagcacaaagcaaaatcacactctatgcagttgaatgtttctcttgtcacactaaaatacgactctttgcaagcggaacataatctcctctctcctggtttggatgttaggaataaaggatgcatatgactttcatggactagtggctcagacaggttggcgcactgcacatgtagctgaaaatcttctttactgcattcatagaagaaaccagttgtgcacatccaaggacaagctgcacattcttttctaacgttgatagcaccgtcagagttcactaaagtgagcacatgtggatgtaccggatgatgcattttgcgagagaaattggcacatgcttcgtggagtatataattgcattgcgtacaggagtagaagttaccaaaatagattggcatgacgcaagcttgacacaacttatcctcgtcgtaatctctgctcgtgttctcgtcaagtctcaaatgatgttgtgggtgaccgaaatgttgtatgactccgtcgcttattgtcacaaacgggtcaactacttcttcttcaacttcttcaggctctccctcaagttcgatgccatcccacacatttttttgtgttgcacatttcgaatgagccgcatacgaacagccgtccttgatgcaagtatagcccccgtaatcttcgtctatttttctgcgacaaacactacaagacaaatctcctcggtcaaaagaaaatgtaaatgatatacggtggagatggcgggatatctttatgacacgtggtaagccggtacatctaagatggacgacaaagtcgcaagggggacacatatagatcggggagcttgaatcggccaaggcacaaaggttgcaagttaaggaagcctgccttggaaacagagcaagtgtatgctcgtgccacctcggatggtttctatataagacagctggcttcttagtacaagctacattcatagaaaaattgcaagccaagcaacaatagaatatatgcagcaaatcttcatcacaacaatagcattccctcgttctaccaccagaagattgcgacaaaacaagctgaagaggatgtttaggatgaagagggtgtttgacttcaagtggagccttttcattttctttatggttgtcaccattgcaacctcgacagcgaaaatgagtaaagtctttttctcctgcatgtaacttcaataaattccagtttacctggagacaattccacttcattgggatatcgtcggataactgatttttgcttagacgtccttcttccacttgaaactttccatcatcgctcagtattacttcaaattgagggcaaaaggaaataagcttctcccagtttggattcatagagatgacgagggagcctattcgatggatgaaggaaataagctcgggctccggctcaagttttaatgaatctttaatgtgtgacacgtaattctcacttgaatccgattctgaatccgaaactgtagaatttacgtcaaaaccatactgagaaaaaactgatacgaccttccttagcggccgcggctgagaatccaaatccatagagttgtagacagcgatagtttgagtaacgagtgacattagctccgacttgggctttgtctgcgaatccaaatccattgatctgaccagatagatgattcgaataatgagagatatgatcttggggtccattcctgaataaaaactccaagagttgatgtgagacattagttgagtgatgcttgatatgagccttgactctggctttcgtccctcctctgcgtcaacgaggtcgtgtatttgattaatgagtgatgccatctccgaatcctccgaatcctttatttccttgaggatacgagatattttataagtgactgacgtgagcctccattgtgactccgtgggatccaagtctgtagagctggtgatagagataattcgagtcacgagtgataccaactgtgactctggtccagaaacaaccttgctgagagagattatttgcctaacgagtgatgtgatcttcggctcctgcttcggctctgaattcgaatccatatccagtgattcgatgagaggaataagttgattagcgtatgctatgaaatctcttgccacctcttgacacatatcctcacctcttaatgtagatatcattttagaaatgatatagaacatgagctccgactcccaattcatatcatctgtatagccgtagataagatcatctttttcttcttcttcggtggtgagaggcggcacttgttggttattgatgagcttctgttcctccgtctggacgagactggccacctcagaaaggagtgaaaagagctccgattcctcgtccattgccatgatgagagcgaatatttgagaagtgagtgacatgagctccggctctgactccttgagatcaaaatctatagagccgatgatagagatcattttagtcaccactgataccgactgcgactctggtcctggttctgaaacagagttgctgacataaattatctgcttaattagtgatttgagcttcgactccggctccggctgcgaatccaaatccagagagttgaccagagagattagttgacaagtaagtgctatcaactttgacttcagctgtggtgtatgtgtgtcttccccaccgcctaagatagataacagttgagaaataagagatatcatgagctccgactcggaatccatagagaaagggattgtttgaatattgatgagtggtatgagagatgattattttgagtataagaaacttactgctctctgtatgtatatatagaactcgtagcttgtcggatcacgtgacaaaacctcaaagctgtccgaatactaagtcaagccatcaatttatagagagataataatatctcaattatataacgactagaaatttagcatcagatgtgaggcaaggtgggcctatcttatttcatattttattcgaaaacaggattgccttattaatgatcgtgtactgtttttagttttggtcaaatcatttaaacgataaactctgaattttgatagcgtcatgaacgttaaacttagggttttccacatagtgtgacataggtctatttttttaccgaacgtagcttgcgggtctttctttattatacataactggaaataattgaagcagtacggcattacaatttagtcacgtcgttcgaacgaaaagtcaatgatcgatttttagagataaagatcctctaattaacaatttatatttttcgagtttctagactacattaattaagctcatacgtatattaccgttaggtcggcctgtgcacctttcacatttttattgaagaagttatgattaacgaaatggtaatatatatcattaacaaaggataatactaatatgtttgatcaagcagttacagtgaaccagcggtaaagtagagaaatcgtcaaacaaacacttttgcatgtcgatttctgctagtgatattaaagatcatggaatctgattatgtggtaaagaaacagctcaacaaaggtttgaaataattagttaacagtagacattgacttcatctaacgaaagaccaaatcaaaaccactttcaacaaccacaatgtgtagaattacagcagtttcgtgactaatacgcgacaagtgttaattttaaaacggttctttagtaaacattaaacaataatcttccaagtggaggaatacttgatatttgttcaatcgcatatatcaacttttgagttctataatattgttcccgtagcttgtggattttgtcttggtgtaatgcttaatttgagatgattactaaaaccaaaagcatgagatcatcttaaagtttacaggcgagcgcaaagtcaatgaaggatttaaagattagaaacctaaacgatgttaaaaggtcatgacaatttatattcgagttatttaggtcggtttatgggaaaaaagctgaaaaatctccatttaattttaatttgcctatttaatatccgtgctactaaatttgtccaaaatacctaaattagtttttatgtcttttaaatatttttattttttattttttttgacaaaatcagacatccgaattaacgagcgttaacagtggtaacaaaatcgttatttgcagttaaaacttaatcatgtgatgtttattagttatatacaattgttttttctaatgcatacgaatatatcgttttagtcaagtagttatatgagagtttattatcttcatgaacacgagtacgagtcccatatccgatgtttttttgttgcacttgatacttgtcttgaaagaaaactgtcacagaatcacaatctacgaaattccgagagaaatatctaagtgcaccacttagaaacgtagtggcctattagctcagttggttagagcgtcgtgctaataacgcgaaggtcacaggttcgatccctgtataggccacattttttggctttcattttgatcagactaaaacgttgtcgtgtgtttcagcttctttttttttttttttttttttttaatccttttttccggagatattttgttttttttttcaattttacggatatcgttatctgcttctcacactaacacggcgaagcagaaaaagagctcgaaacaaaaatggagggaaccttctcgccgctttgcttacgttcttcttcgaacctctgttacttctccagtaatgtttcaccagattctcaccgttctataggatttacattggttgattcgctccggccaacgaacttggtttccctgcgaacgggaaataaacgttcgtcatcgtcttcactacggctatttctctctccgactagaagcgctctccgtacgccgactatttccgcggaggaggtgaaagatgtcccgatgccgaagattgataagagcggccgattaagcagtcctcgagccgcacgcgagctcgctctgtaagcttcgttttctcactttaagcgtttctgaaatcgtaatcgtttcgttgatttgaaaaaaattggaaattttagctgcaaatgaaaattcgcctttactagaattggaaacgattcagtcatctatgcggcttggtgtgacaagaataagtctcaacttagtgttccattgtctgggttttaaggtttaacctaaaaccctaaacccagaaccttgcctcactcaacagtcaatttttctcgagggtagaagtattaagccattagttctctctttttacttgatttcagccaaaaaattgaactttgatatgattatctcctatcaatatgaatgatgtatctaccctctctgatcatgttgctggatgatattgacagtgtaatactttatgccgcatgcttagaaggctctgacccaattcgtctctttgagaagagaataaacgcaagaagaggtaagtatcaaccaaacgtattttttgttatcatgttctgtttccatctgcaacacagtcatgaatgtaggaatctcattgtaacttctgtggatcatttgcttgattcttcgtgatttaactgcttgtgatataacttcaatgcatattgttcggtttgtacagagcctggatacgagtttgacaagagttctttgttggaatacaaccacatgagctttggaggacccccagttaaaacagaaacaaaagaagaagaagatgagcttgtgcgccatgatgaaaaagaatcgaaaatcggtaggtctcttattcttaaaataagttttctcttctgctttactcatatatggcaaagagactcttgtttggatgggctcatgggaatttcccatcttgtaacatgtgaactgttgtttattctccttttcctgcagaagccgaagtgctttcagctcccccaaagctggtgtacagcaaacttgttttacggtaatctataaaatatataatgtgtagtaattgctgctattcggaaataaattgtgaataccaccttattcccactatgtgtttttccaaaggtttgcaaagaaactcttggctgcggtagttgataaatgggatagtcatgtcgttatcatcgagaaaatttccccgccagattggaaggtataaattgaacatttgaacttcaactccggtcaaatactggatagttgaaaaataatgaaccaccaaactcaaagcctcaatgctgatcagtttcttccattgtctctcattaatattagctgtttgcagcctgagctcaacagttgctttagaattagcttgagtttctagaagcagcttcttattttggctgtgtgattgtctacatattttttcatctcttactatcaataaatgccttatagatgttgctggatctattcacagagtgcaccagctggaagaatattggagttttcgattcttcacttggcaatgtctgaagtggcagtccttgaaacccgacacccgattgtcattaacgaggtatctgtcttctttaaatgtagatccatcttcggtcagctttgcaatatgatgaccttgattgtgtagtgaactaactaacaactatgatgtgataaaaggctgttgatcttgcaaaacggttctgcgatggatcagcaccacgcataatcaacggatgcctaaggacatttgtcaaggatagagcaacaacatcaacacctcaagctttagaattgaagcaagaagtgtcggtttaaattagaacaaaacccgcatcttcgttaggaggcaggcaacctcaagatgttggtcgtcggaagtcgctagtaggcaaagtgttgatccgatgatcttatatattcgacaaagtcgctctctgtcttgacagaccgcttctggtccgaagcttttgatacctgagactgaatctatccattgcaggtcaacatgattattgctaagaacacagcatactcatgtctgtattaatatattgcccataagatagtattaatttatgtagtagttttcatgtttctgtctttgtatcctcctccttcacttgtgtcccatatttgagaacaaacaaagctgtataatcaggtttttcgtatagatgtttttttccgcttatggttccaattcatgaacagggttgttttgccccctcacggtactaataagagaaaagtggaataaataaagtaatgggcccatccaaaaaaacaaaaagcccaagagagctaatgaggatacggcagcgtttcgtcaagcatagagattattagggcttcttctcgtagtcaaacctcttcgtcgcggcgtatatatataacttttttctctcttcttcttgatttatcaaacaacttcacggcttattcgttctctcttttctagattagcgttttctttcttagatctcttatcttttctgcgaaattcgattttagtgatctcattagcaaagccttatctgtagttttcttcttagtcgtagatttgaatgttttgtgtttattttttggttgaatattggaacttttgtggagcagtattgatattgatggtgaggatgacgaaaaaatcattcggattccctttgaattcctccgggaaacatgtgattatataatcagctacttctgactcatcatcatcatcataacaccttttttgtttttcgccgatttagaaaacgttttttgaggtcttttatgacattttctttgataaatttttttgatggtaaaagatgacgaaaaaaatcgttcggattccctttgaattccctcgggaaagatgtgatcacaaaccagctacttctgattttaccatcatcgatatagatttcccaaaataagttccacttttgaattgtttttgaatgaggccagtgatgtaataaaaatatttgctactcttgatgaagaactttgttctttcagttgatgattggtttaccaccaagatctctgaggccttagttttctactgtttatctaccaactcatatttgatactcattattaaattagttcatccataaactctccaggatatattagttcaacctaaattaatcttagatgagcctaaacattttaaacaatagcaaataaactctgtttcagtaactctagccaaaccagtcagacttcgagcacggcagaggcgagctaacccaaaaaaaacatgattagttcacaaaattcttaacataaccggaagtaaatagaaccaccaggtaccaaaaaaagagcatcactcgctggtacatatgtcgtggaatccaatcatctaaatagattgaccaaacagacaatcttagtcgggaaagttctttaatgagtataaaatgactagtattgagaaagtgtagttttggtgaatcttggagcaagagtaagtaaaatcaaggtctcttctataaagaatggtttaaggtcattaatatgtgtacacaaattttttgttggaatgtcctgtggttttaacattcctagtcatcgtaacggctttaaaaaatggtttaaggtcaataggcctatttttggaggcgtcatagagaagcacgtgaagcaaccaaaggacaagaagtttattaatgctctgctgcctggttggttttttgatgagaactatggtttctcagatttagggaagatatgggtgttatgggacccatctgttgaggttgttattgttgccaaatcgttgcagatgatcacttgcgaggttcttttccctaattctcgcacttggattgttatctctgtggtatatgcggccaacgaagatgataagagaaaagagttatggagagagatcactgctttggtagcttctccggtcacttttaatagaccttggatcttgctaggagattttaaccaggttcttcatcctcatgagcactctaggcatgtttcactcaatgtggataggaggataagagactttagagaatgtttgttggatgctgaactgtctgatcttgtttacaaaggcagctctttcacttggtggaataaaagtaaaactagaccggttgcaaagaagattgatcgcatcttagtcaatgagagctggtccaacttattcccatcctcttttggtttgtttggtccgccagatttttcagatcatgcatcttgtggtgttgtgctggaattagacccgatcaaagcgaagcggcccttcaagttctttaactttttgttgaaaaacccggagtttttaaatttggtgtgggatgtttggtactcgactaatgtggtgggatcgtctatgttccgggtgtcaaagaagcttaaggctctgaagaaaccaatcaaagactttagtaggctgaattattcaaaccttgaaaaaagaactgaggaggctcatgagactcttttgagttttcaaaatcttactcttgataatccctccctggaaaatgctgctcatgaattagaggctcaacgtaaatggcagatccttgccactgctgaagagagcttttttcgtcaacgttcccgagtgacttggtttgcggagggtgatggcaacacacgttattttcacagaatggctgattccaggaaatctgttaacactatcactactttggtggatgattcagggacccaaattgactcgcaacaaggcatcgctgaccactgtgctctttattttgaaaatctcctgagtgatgataacgacccttattcgttggagcaagatgacatgaatttgctgcttacttacagatgtccctattctcaggtggctgatttggaagccatgttctctgatgaagatatcaaggctgctttctttggtctccctagtaacaaagcttgtggcccggatggctttccggttgagttctttaaggcagcttggagttgcattggtgcttaggtcaccgctgctgtgagagaattttttatttcgggtaacttgcttaagcaatggaatgcaactaccattgttctcattcccaagtttcctaatgcctcttgtacttcagattttagacctatctcttgcatgaataccctgtacaaagtcattgctaggcttctcacagatcgtcttcagaagctgctctcttgtgttatctctccttctcaatcagcttttctccctggaaggctcctcgctgagaatgtcttgcttgccactgagatggttcacggatacaattggaggaacatctctctgagaggtatgttaaaggtagatcttcgaaaagcttttgattcggtgcgttgggaatttatcattgcagctttgcttgctcttggggtccctactaagttcattaattggattcaccaatgcatttccacaccaactttcactgtctctgtaaatggttgttgtggtggttttttcaagagtgctaaagggctgcgacagggtgaccctctttctccctaccttttcgttcttgcaatggaagtcttctcaaagttgctcaattctcggtttgactcaggttacattcgctaccacccgaaagcttctgatctctccatctctcatttgatgttcgccgacgatgttatgatattctttgatggtggtagttcttccttgcacggtatttgtgagactcttgaggactttgcttcttggtctggactaaaggtgaacaacgacaaaagtcattttttttgtgctggtctagagcaggctgagagaaactctttggcggcctatggttttccgcaaggctgcctccctatccggtatcttgggcttccgcttatgtgtaggaagttgcgcatcgctgaatatgagcctctcctggaaaaatctccaaaaaattcagatcatgggcaacaaattgtttatcttacgcaggtagagttcaacttattgcttccgttatctatggtatcgtcaacttttggatgtccactttcttgctgccaaagggttgcattaagaagattgaaagcctttgtgctaggttcctttgagcgggaaacattgatggtagtagaggagcaaaggtctcttggtctgctctttgcctcccaaaaaatgaaggtgggcttggccttagaagattctccgagtggaacaaaacgctttgtttgcgtcttatttggcttctctttaatcatcaaggttcgctttgggtttcttggcactctcatcaccatcttagaagcaggtctttttgggatgtggctccttccccatcagatccatggtcttggcgtatgctcttgttccttagacctttggcggagcagtttgttaaatgcaacttgggtaatggccgcatagctcacttctggcatgacagttggacttcccttggcccgctgataaaggttatgggtgattatggctccagatcacttcgcatccctcttaacgctagggtggttgaggctcttggtgttaatggctggaagctccccctatctcggtctgctccagctcaagccatccatgaacacatctctaccatcatgaccccctctcctgctacaattgaagactcctttgattgggttgttggcggtgttgtttgtcaaggttctcttcggcaaggacttgggatgctattagaccaagagcaccggaattggactgggcaaaggctgtttggttcaagggtgctgttcctaagcatgccttcaacatgtggattagtcagttggatagactcccaactcgtcaaaggcttgcctcttggggccatatccagtctttcgattgttgcttatgcactattgagactgagtccagagaccatctccttttttcctgtgaatttgcggctcaggtttggagattagcgttttctcgcttatgtccgcgacagaggctgttttgctcttgggcagagctcctctcttggatgcgttcttcctctacttcggcgccttccctcctcagaaaagtctcagcccatgctatcatctacaacatttggcgtcagcgcaacaatgtcctccataacaatcttaggatcgcacctcttatcatcttcaagattgtcgaccgcgagattcgtaacatcatctcctctcgttaccacagaaagagatggcgcaacctcatggtgctttggattcgctaaccttatatcttcccaaaatctctattgtagccttgttttattttttgcctcggctactcttgtataggcctttcgtttttgtaaaagcctcttattcatataatgaaaattaacatttttagcaaaaaaaaaaaaaaaaggtctcttctatacttctagtagagaaagacaagatgttcggaagagcaaatcatccggcagttgactgat

SEQ ID NO: 632 - DNA, 92657 bp, Arabidopsis thaliana
aagcttcagcattcttcacgcccattacaaaagctttcttcttctcaaacatctgattaaaaattataacaataaacagatctgtgtgattttgtgttttgacttttgatctcgagacaaacaagaaactaaaacaggttcttcttctcttcttttacctttttgtttgctttcgtcctgattcttgtgacatttattgtctgatgtgaaacttgtcctttatctattatgcctcgatttttatttttatttccccctcatatattgaatctagatctggttttgataatcttggaatcagacagtgtttgtatatttcggacaaacaagacgttaaaaagctgccttgtcttacaagaaactagattttgtctcggggtcgatcttatctccaaacagagagaaattaacagagacatgggaggtgcagtgacgaaatctgaaactctgcaaaaagaatgggttccagagacaaagttggaggctaagatcatagaagccgtgcaacgcagggcatcgaggggcaccacaatgaaatctttcaacagtattgttctcaagttcccaaagatcgatgatggtcttcgaaactgcaaagccattttccaagaattcggtgagtgcatatagggcagattctaaattgcgggttttcgcacgatttgaggttgtttacttgtttggttttgggcagatgaggattcaaacgggtcaatagatcacacggagctaaagaattgtatcaggaagctagagatctcgttcgatgaagaagagattaatgatttgttcaaggcttgcgatattaacgaggatatgggaattacatttacagaattcattgttcttctttgcctcgtctatcttcttaaagacgattcatccactctccaaaaggtacccgcaaaatacttttatcgatctcctatgctcggtttgatatttcgttttagattttgattggttattcaatggttttaaagctatttttgtgtgatgaatagaaatggacaatgggaatgccaaagctggaaccaacattcgagacgcttgttgacacatttgtgttcctagacgagaacaaggacggatatgttagccgcgaggagatggtccgagccattgatgaatcaggagaacgatcctccgggcggattgcaatgaagagatttggtttattcttaaactccctccctcttcttctcaagctttcttcttcactgaaccaagaatattgattttgattcctgtgtctgcagaggaaatggactgggacaagaacggaatggtgaacttcaaagagtttctcttcgcatttacgcagtgggttgggatagatgagaatgaagaagaagaagaagaagacaacaatgagaaagcttaaatgttatgagtttctaagtctaaatatgtgttttgtgtttgcagaatctagtagtaacaaaagatattaattagttgatgtttatgttaacgcaaacataataattcattaccaaacacaaaaccatgatgttttacccaaaaactggcttcaagcaacaaaacttattagtagtctccactgaaccaaattattaaaacaaaaaaaaaaaaaagagcaagcaagccaaaaatagtctcggaaagagacagcgacagcgacagagagactcaccatccctttgtattgcccctagttctgtcgtctgaactctctccgggacatgataaataagacaagacacagattcatatacgacgctgttctttttgtttttttattccagggattagagacagtaccggtagcccgaggaagaggaggaatgggatggagacagaatctccaaatccttcttgtttgaaggaagctgttacggtggatatataccttcttggaaaggtgagagaggcaagcaaaaatatgaaatttagacgtgtttttagccccttgtcttagctctcttcatgccgaggctattgtaaggtgagatggaaccagacattggagatccttcttctcgaagactgccgttgagaagggccaattcccgtagctgttgtttcttgtagaaatcatgggtttcctcctaaaacagtacacaaaacaagtacggttatattgacaaacaaatactacatgtatctctggtttaagatcttttaagagctaagaacaaaccacgggagtaagtagatcgtcgagtatttcacgggcttgcatgagacgtgcgtccactatttcaatgggtaattctgcctcgactaagatgtggagtggttcattgaggtgctcataaccaggtttacctctcatcatatcctcctgcaaacaataacgctatattaatgaagatacaattggagttaaggtattattagactgaacaaatgaaaaatgtgattaccttaatcggatctttaatgctgcctctaccccttattagaacacgacaatcagtactcgcttcaactcgtttgagggagtttcctctaggacccaagagacgaccgacaaaattgtactgcaaattatgaaattattgtttatactttgacaagataataaaggaactcatcaagggaataaagattcatacgtttgggtatttgtcgactggaatatccacccttattgttcgcttgacgatgagaccggacgagctaccaggagagttaagccaatttggtgctggggatgatgaaaccgatctctacaaatcaaaagataaaccaacaaaacctgttagaagccatgtcaacctcaatacatacatatgattgcagcatcaaaaccaagaataacatgaaataaatatcttatcaaacgtttcttccatggaaaagggacaatgtatcgcgctgttgcatgctagcaacccgtaattgcttatcctaattataatattcaaagaatggttccaaatattagagcatgttatttctatcctatcgttcacctaacaattatatggctcttcaaggcaatggaattagttagtgcattgaccttaagtcaaaaacattgtcattactgatattcagtgttagcaaaggctacctgtaatgaagactatgattacaattaagtcaaagcaagttatgtcagaacaacttaagtcaacaaaagctttaactgcagtagtatggaattagatgaaaagagttatgttaatggttagtagtcatacttctgatggaaattgtgaggcccatccgttcatgtcagctcttgaattctgaaatatccctccagaagccagagggctagggtgatcaaacctactctgacttaaggcattctccaacagcgtggttacacgcaaaatttctgtttcaaaaaatgtcaattttcaagagtaagacggaccagttagaattagtcaacaaatccatcaccaatgatagtggaatggagagacatcatagtctcaactaagttagtgaatattaacgttgacactctagttaaaatagattgaaacagactgcaaacaatgacaataccctaattttgctatgatctacaaatgtcacaaatgtgatctgttcaatatcacttccctacgaaacaactcagaacaaggatttcaagaaattagatttcaagtaaaagtcttattaataggatttgaaaaccaaatctacatcagagaaaagtcaattgtaaagtctattataccacaattaaactaaattactccgcactatcgttgaatattctaattcatagtaagagaaggaggactaagtgtctctttggatagtaagatatcttacttatgggtttgtacaactactctatcatatgtcttttgctaagatataactaatctctcttagaagcaccactgaaaatgcttttcaactgtacaaagatagaagttctgaagcaagaaacgaaaattacagaagatcatatgatgaacagtatggctcaccttggttcatgagccggcaaacatgtggaagcacaggcaaaaatggagtaagcttgtgacgctctgcaagtaactcagaaagatacctgaaaaaaaagaagagaaattgcagattatccagattagtatgaccttgagcatacaagaagatccactcattttcacttaataatcacgtttaataagcggaatatgaatgtcagtagattaatgtattcaaattcatttagcaaatccgtctccaaacatcagcatctaggcagagtggagaattcatagcttcatgaacacaagtcaacaaacacgaaatgaacacaacatacgattttataacacctgtggcactaacaatccattaccctgtcgatacaaacacaaactaagttgatagatttagataaattgttttgaaatttaaaagttggatattttatagaaaccaatccacaattgaagtatattgagctcaaaaggagcttaatttgcagtggtaggtaggtaagaactcatccatatatatttgaaaatcgacgggggcatcagaagtagaaagcatagatctcagtatgagaaaccagaaccagaaatgaaaaatacgatacgaaaaacaaaaaaaaagttttaagatttgcgataaaaattaagactttgagatccaaatcagtataacagagatcaagaaacaagtcaactataagacaaagcgaaaaacatagagattgatataattacttctcttgctcaacgaggaaagaaggctgtgatcggagaccaccagagaagttaggtgactgaggagccgacggaggcacagatagaggcggcggatacgtcacaaatctcccaccaccactaccaccacctcctccgccgcctccagcaccaccaccaagtgacgtcatcatcatcatcacggctactacttcttcttcttcctcagctggttgttaccggagaaacaactgaatagatagatagaaaagaagggagctgggcggagatcgaggaggtgcggcggcggattagtagggagctaatctggcacacacaaaggcttttagttgtagacctctaaatctacaatactcgtcggtggattggtgtttttgggcctttatagctgtgtgagactctctctactcttttctttcttgaaatgaatgatttttgccattttgatattaccggacataactcgtgttttttttaccgtttcctgtccctcttagaagcttcttactgactcagagggtctctggatacagctggttccctcttaatcattgagagggctacctacttgacctggcccgcttcgatttatttcacgtttgttgaattgatccggttcggtcttgtaaaaaaaaaattggttactcgattagtcaaaaacgctgcgtttctattcaagcaaacaaacaaaaagatgactcatctgtacattgtgtttcagccacagcttacttctgatcaaatggcttgcatttggtaatgactcatgtacattgaggattttctttcatggatattgtatgttttatgtttaacagaactgcttaatgcttgtcaggctaaatatttcgtaaaatatgagaaaaatggtcatgctgatacatttataaggaaacattcaaaccgagtatttgatctagtgacatcataatcacaataagcatagagagaaaacaacaactaataatatagatttgatttcgtcaacacgttgacaaaagacagaactaatattgaactagtaagggagagtcagagagcctcattagggaaatcatcatctgccttgttccacaagtatggctccaatcttgacctaatttcttagggaatcatcacttgccttgttttttttaatgaatttagtgatcgagttccagtacaccactcgtacttaattaatcgatcagtgagtttgcgtgcgaccattaccgagttcacaaagccatcagacatggacgggtgatagatttccaagacctcgaaaccttttagatcacaaggatcaacgtctacatataggaaagatctaaggcctcgagcactcctaagcatgagcagagctccaggatccatgtgattctccaagtgttcaatttactcgtacgtaatttaattagctttttcgtttttcttttgttggcggaaaacaacaataaattttacatgtagtatggatgcatatcgtcataatcgaagttcacataaatgcatgttccaactatagagaaacgacaaagaaatctaccaactcttggaccaaccaataaactaaagtgttaatctcaaccaatttagtttcctcgtcctttttcttgttggcgaaaaatagatatattctatatacatgtatgtatgcatatagattatagagattcatatgattacacacttaattatacttacatgagaaaacaacaaaaaaaaggcctacttattggccaattatgtataaattaatacatgaaactatatataaagtcagttacgggaacttgtataagctcaataaaaatcgatgtattataaacaaaaatgagattaaaaagtttaaagatctttattattaacatagttcatataacttcttcttttttttctttttcaaagtacatagttcatataactttttgatctttttatataccaattgcttttgagttttcagaaggaactgaatgaacgtgtccagtcggaccaaattattgttaccttgttgatgttgtaatgcccaattcttttttttagttatcataataccaaaaaaaaattaagcaagatttcccaaagttaggattgggtaaacatgtaagtagaacattcaccaacagggaaataatcatcactcctacgtccaccactccctctcttggtgatataacccggataatgactcagctcgaacttcgatttcttaagcagcttcaaaccttctcctttacccagcttctttatcccccaatcgctaaatggatacgttgtcttgtgtgtaatatggatctctccgtcctcttccaacatctccttagcgttctcaagaaatcctctcactaactctttgtggctcctgatccaaaacacagcattttatcattacatcagtccaaatcataaactatatattatagtaagaaaatgaaagaatatatttcgttactcgatggccctagaggacaattcacgaccaaagaaacgagaccctgcgtgaggaaaattgaagacaatgcggtcataacgttgcagactcaaactattatcgaagctcattgtgtgcacgtcaacctcgtgctgaatatcacacccgtatctcttcaatatgtttatgttatccaccgcatccatatattttatgctcagttcatctacatgtaaaattttattgatttaagtcaatacattagttacgactagtgatcgatagatgtatattataaatgttcatataaaatgggttttacataccttcagaatcgagagaggtcgcagttatgttcatggccgagccaaaagctgaagctagacatagtgagaatgagaagtttccttctccaactagaaggattttgtgtgtgctactatagtgtcttatccatttttctgaaatctccattacatatctgaagactttgtattctataaaccatatatatatacactcatatagagtcacaacacaaaggttgcttcagtgtcgtttaattttgggttcattgttaaattcggctcttcgagttctgtgcgtgtttatatttcgaacctaattgcttaaccctttcatatacccttttcttgtactaataaaaccgtttcacattcaattctactcataattaggatcttaaatatcgtatttgaaacttcaaattattacctttaattcggtatagaaaactagtttactcactgtaaaataaaatatcttggtcattctatggttaaaccaaattattgccaatattaaaacacgtgaggttttatcaagatattagtatattactgattaaatatgaagttttgttgttattctcatatttgtttcaggttagctcttatgcttatctctaactttcttctctttgtttagaatcgttttcacttaaacttttccttcatacttttatgcaatcttactacaactcttacactcatacttatagtagactttcatctactacacacacttgcacacatactttcattttacctccagacactagactgactcacctacacaagcagcactacttatgcgtagactccaacaactcttaattagctaactctttaccaaagcaaaatacagcattttgcttattatttgggcctgaccaagttaatgccccaataaaacttcttaacccaaaagcaaaacaatcttcttgttaactttttttgtgcttcatctgctcattcttgtctgtctcaattgtaggatcaatcaaaggtagtcaactttcaacaagtttttcagttgtaataagagtctctttcgcagttatcgttgtatttatttgtgaacaaaacctaacttactgccattactcttaataaaatccaggagtttggaattatcaaattactatggaaagcatgatcattgttaaaagacaaaaatggaattattataactttttcataggtaaaaagctttttcttagtgctgaagtgttttatggatccgcaactaaccacacattacaactaccacaaaaagtgagaagaaaaaagaagcacaattacccaaggaacaaactcattttgattatcttcacaaccaaagataaagcccaaaaatgttttttcaaaccttagacaaaacctaaaagcaacttaaagaataattttgtattcatttacttttttttatttttttatttttttcttttctactcacaatagtttttcaatcgaaaataaaataaaattaggttaatcaaaaaattttttttatctaacatcgttgttttatcatactagacataaaatagacaggaaaaaaaacacattgttttatcatagtgttttatcatgcatgatgcttctaacgatattgtttagataggcattaactagaatttttaatgaaattttttattcttaaaatgtcaaataagtcctatattgaaatattttttaatggtatactaatttttatatccttttcctaaaatacataagacttttaagtttgttcaattaacaagtatctgtcccctgtaatcaatcaaaaccttttatctcagatttaattaggaaaagccacttgttaagaagaaggaatattaaacgaaaacgcatgtagttttcaaactttaaatccaccgagatttgctttactagttcttcaaaacgacacgcatggtcccactcattacaaaaaccaaaccccattatgcaaaagctctcttcttttgcccaaactctcgctttcccttttttacacacaacaaaaaacaaaagttctgttattttcctatttaatccataaccattacacatttccaattttcctttcattgatcacataactcatgccaaatctacctcatcttcctcctccaccgcagttgcaaccgcccgaaacgccatcatgggaaacaccatcgtctgtatggtatactccaagaaccacaccatggagaacaccacagagcacacaatccacaccagttggccaaatggtcttaacaaagccagcaacggttagattcaacggtcttgatgcagagccgaggaaagatagggtgattctccgtcagccaaggagtagcaggaccagtctctggatatggtgtgttgccggtttctgttttgtgttcagccttttgcttatcttttttgcgattgccactttgatagtgtttcttgcgattagaccaagaatacctgttttcgacatcccaaacgcaaacctacacacgatctacttcgacacgccggagtttttcaacggcgatttgtccatgctggtgaatttcactaaccctaataagaagatagaagtgaagtttgagaagcttcggattgagctcttcttcttcaatagattgattgcagcgcaagtggtccagccattcttgcagaaaaagcatgagacgaggttggaaccaatccgtttgatctctagtttggtaggcttgcctgtaaaccacgcggtggaactcaggagacagctggaaaacaacaagatagaatatgagattagaggtaccttcaaagtcaaagctcattttggaatgattcattactcttatcagctgcacgggaggtgccaacttcagatgaccggtccaccaaccggaatcctgatttctcgtaattgcacgacgaagaaatgaaaaagaatacggtacagttctctgagtcagtagtcatcttcaaagtctttagctttggcatgtttattcaactatatttctatttgcttacccacaacttgtataaaagaaaaagacctagtgaactctatccaagaaccgagatcggagtttgtactatttccaagataaagaaactggaaagatattatctttctatgaagcagatccataattgatccacaagacacagtgccaagaccaatgttgtattttaatacagttcaacatacctgaaccaccagagaaaagaattaagaccaaaagcaaaagaggtacaagcattagatgcctatgttggttccctttaggacttaaagtaatcaaaatcagtaaaacacacaagaagaagcttaaccattttttagcatataccaacacagaggattttaatattcaaaatctcaactttgatcaaaaaaaaaaaaaaaaaaaagatacaatggtctcaggaaagaaaagttgcagaaattggttggctaaaaccacagctggtttcactagacaggtatgtaaagctgattgtatataaaaccccacaagtctcagctaatggggctttaagaaacatcacatgtctaacggtagactgaaacagggatcatctgaaactcctttcacattttttacttattttatcagaaagaagtaaagcaaccaaatctctttctttttttctgtagtccctcaaaccaacttgcatcacttgattagacaataccaactttgagtatctagattctagaagaattaaaaaatgaacaagaaacttcgcatgtctaatggtggcatgaatatagtaccatttttctccccaaattcctttttcgctttccctaggtgctgtgatctttctaacgattcaaacttagccaaatggacaacaaccttgagcattctctctattcatctctcaaagcgtaggtacaaaacttaatatcaggaaaccatatcaaaacaaaaaagaccttgaccctcataagataaagggaaatcagtttgaaaatggtgaatcatgtggcgattggcgaaaacattatttatatccttcaatatctatctctcatttaacacaatcctgatcgagctcttaacattattagaaggtccagagaacaatatccaaagcaaatggaccaaaagaagtaaaagaatcaggacctgacttcttccaatgttacaccctcaaacctcagcaggagtctttgccacaatagagagagcatgtaacccgctcttcaactcatcttgcaacaagtcatatatcagcctatgtctcttgaccaagcttttaccttggaaagcatccgaaacgattcgcaagttgaaatgtgtttccccatcatcaccagcactacctctaacagcggcatgtcctgcgtgctggtaagaaacatcttcaacttctaactcaacaggatctagctccttctccaatttctctcttatcctcatccctctactccctaaagcaacaacatttgacccactctcagaatcatcaatcttttctgttcccaaatcctcaactagatcaggtttagactccaaatccacctccggaacattagcttcgtccttagtctcaggaatagacacaaagctggattctgaactctctccagaacttgaatcttcctcacctttgacttccaaatgaagagcctttttctgcatcagcttaagcatattaagtaatccattgtttctagaaggagacagactctgctgcaacccgagaagaacagcgaaatcaggtgttatcctcaaaatctcagggacaggtcttccagataaacccttgactaatagagcagctaaccctttagtgagaaccgaatcagaatcagcttcatacacaacattacgttcctcatcaaagaaagccctaacccaaacctgagaaacacatccttctactttattctccctcgtcttgaattgagaatcgagaggtgtcagattcttcccgtagaacataagctgctcgtatttagcctttggctcttgtaccgattggaaaagcttgacgatctcttgtagcttcggtggaagctcttcgattggttgaaggtctccatagctcgacggagatgatgaagccgatggtggaggaacaatcccggttgaaattttctggaaagtgatgatcgtccggcgaaaggaaggaacttccgacggttttagtggtcgtagaagaagggttttggccggataatggattgaagaaaacaaggtccgtttgaatgggattaaacgaagcgaggaagcgcaacaagaagaagacatcgctgctgccatagtcgcgaacttgaaacttcgagagagactgagatgatgatgaaagctctccttcttcactttttctgagtcaaaaaccaataccgccaattaggtagtaaccgggaattaaaccgggaatgtaccaaaatccaaaaattagatgtaaaatcaattgtggggttgattatgaataattagaaagtatacgactcttttcataaataaggaaaagaaaaagatatctagattttttttgttttgttttgaagcatcgtcttcctggttcttcgttctcttgcgttcgtcacctcaaacacgctccgccattattatatatcaaatcaatcatgtccgaatccagcttttaccaatgtaagcaattaaattaaattaaataaaaacacttttatcaaatttaatcaaattaaaaaactgtccctttcttatctgagattctattgtttctgtctacttccacagaaagaaactgcatctccgtttttttttctgatttgaggctttccttagatccttgagagcaaaactgaatctgggtaattttaaaaatctcatttttacgacttatctcttttgaacgatctgttttttcatgtaagtacgatttcacctcgagatgatcgatcattgctcttctggttcttccatgtttgattaaatgttataacttgagggttttgtttcttttggattgttctcgcatttgttgatctatggttatcaaaagagtttggatttacagtttttggttgcagctgaaatttttcactcttttcttctctgttttgctggataaagttggatttgattcacattgttgtttagaatctagatgaagttgtaagattccttgtattgtgtttgcttatgcatgattgtgataaagatttaagttattttaccaatgtacaatgtccagaattgtcgtcgggatgggttctaagtccgttgttgacatgatcgaagctgcctcgcgggcacatttttctggtttacacgtgaatgggcacatgaatgggttggaaccaagtgcacttaaggaaaccacttctgcatcagaagatatccaaagacagccttttgtaataggtgagttctgcttttgctttcatttttgattaatatatggtcgtggataaaaaaagcttgacgaatggtcttgattgatatgttgtgacttgaattggttaggtgttgctggaggcgcagcatcgggaaagactactgtttgtgatatgataatccagcaactgcacgatcagcgtgttgtacttattaacctggtaattttgttttgctaataaagtttcatagagctaagtgataaccaccggtttgatttgtgtttcgaatgtatatgaagtcaattgaattccacacaatttagagatctaaaaggagaatattaccagctaataacttatatatggctgaagtttaacattgttcaaccttgtcaccattgtttagatatttatgtcagtctatttatctaattctcaaattcctttggcatcatgataaaccacaaattgctcgacttaatatcctatgataatgatttttggcaggactcgttctatcataatctgactgaagaagaacttgctagagttcatgaatacaactttgatcatccaggtgagaatatatttggagtgtaattgctttctgtaatctactcttgtcaatacatagtgtcatcaggagtaaaaaatctttcctagcttctttggccattttttttttttttataatacttctttgggataattaaggcataactaacagccatattattcagtgatatcttactaattgatgtattctcttttattaaagcaatttcatccctgacagcacattactagttgctgggagttatgagaaaaagtcttgtgcattactctttgtcatccaccgttaatttctttttatccaggattctaatgaattgttgttgtttctgtagacgcatttgacacagagcatttattgtcttgtatggagaaattgaggcaagggcaagctgtagatattccaaaatatgattttaaaacttacaggagcagtgttttcagaagggtaccaccttccctctcagcatcactcattatcatattgttacttgatgtttataaatttgagattcctttttcattttctcactgcctctttctgtaacaatagcaatttcttagatgtcaccactggcttttatctggttggggatttaaggggagatcaatttaatcttatttgatgctaggattttgaaaaacattctgcaggtaaatcctacagatgtaataattcttgaagggatacttttgttccatgatccacgcgtccgaaagttgatgaacatgaagatttttgtttgcacaggtaatttgttgcctcttcccgttataattattgtaaactcttgtttcgactacattccatttcccttttgtagattcacttggctttttttttctacaaaatttcacatgatggaacaacttcttatgctttaagattttgctgtttcacattgcttattttgttttctgcgtagatgctgacgttcgtttggcaagaaggataaaaagagatactgtcgagaatggtagagatatcggcacagtacttgaccaggttagcccgtcttagtattgttactgtatatattatcatcaagaacaacaagaaatggtttacctcttgcattttaaatattacattgctctgatctgtatgtttttttctcatattagttcggcgttttcaaatctatatgtttctacccatattttatatgatgtcaaccttttgatgcagtactcaaagtttgtgaagcctgcttttgatgacttcattcttccaacgaagaaatatgcagatattataatccctcgtggtggggataatcatgtagctattgacttaattgtgcaacatatttgcaccaagctgggtcaacatgatctctgtaaaatatatcctaatctctacgttatacactcgacatttcaggtaattgatatatcaatctcatctacatacgagtaacattctcttaactaccaaacaagatccagaaaattgatttctcttgcagataagagggatgcacacccttatacgagattctcagacaaccaaacatgattttgtcttctattctgatcgattgattaggctggtaggattattaaagctcatttaaatggctgaccaaattctcctatcacgtctcatttctgttgtctgagtttttttcttatatttatcaggttgtagaacatggtcttggacatctgccttttactgaaaagcaagtgattactccaaccggtaagcttggtgatttttgtttttgcagtgttgttcgtgaattcacaagattattatgtatatatttagaggttaaactcgtgactaataggtcatagatatcccggttacctgtctcaggatgtgtgtattctggtgtggatttctgtaaacggttatgtggtgtctcggtgattaggaggtactttcctatatcttagctttagtttatacaataggaacttccccatcctttcatatcccactctctcaccaacttgatggtgttttgaaataatgctagtggtgagagcatggagaatgcgttacgagcatgttgcaaaggtatcaagatcgggaagatcctaattcacagagaaggtgacaatggtcaacaggtaaacgagtcactcctatttcattccaggtgttctgtttcatcactgttgatgtctgtatcactgtgcagcttgtttatgagaaattgccaaatgatatctcagagaggcatgtcctattgttggatcctattctcgggacaggtaattaacccgtctttcttcatcactttttactgaaaacattttatttcatatttctctttgctgtaatacacatttgttagccaattcaacacacttgaagtgcctagtgacactgaaattatacatcttgtcaggaaactcagcggttgaagctatcaacctccttataagcaagggcgtacctgagggaaacatcatatttctaaaccttatctcagtaagctaacacacaccctttgcgtatcatttatacaccccttgtgattactccttatccatgtttatccacaagaatgcagctggattgagatattttttttctttgttcaatcaggcacctcaaggtgttcatgtggtctgcaaaaaattcccaagaataaagatagtgacatctgaaatcgataatgggttaaacgaagagtttcgtgttattcctggtatgggggagtttggggacagatattttggcacagacgatgactaggccactgtgttcctgcagcattagttgtcccatccatgtcctgcatagcagtttactgatgcattcaccatcctattctctacaacggctacacaaactatcaaaggaatcacctttaactttgttggttttcccatttaaaccccctcaaggtgttgggaacagttttgtttacttataaatgcccaagtgaggggttgatcgatcccgggacttgggattcggtgtaccatatataattacccttggaactcttgataattcatctacaactcttgtgtaccatatataaatatccttggaacccttgatactccataagcataatacatttggcttcgaaaggaacatgtgggccaatggttgcaccacctctgttgtcatctcatgaattcaggttcggacctggtctctctctctcccaagtgggaggtatatgaacggcccaattatgacaaaaggaaagaaaattatatttggcttcaatgtccaatatatctaagtttggtggtgacttatgttggttgaagtgtgagagaggtattatagaaaatactctgctcgttctcctccacatatccaagactttggagataatgctggtatccttggctagcatttggtagtgtcgaagcaatcattcctcgggctctcctttctaactgcattcctagaaaatattaccctaaaggcctttgtcttggcatcctcgtcctcttcagcaggaactcatctgtcttggaagaattattaccatgtctgcttttgtcagcaaatacgaaggtaagtacacttaatatgcactcttctcttcgtgttccagtaatcttcagttctccattttatgtgctttctgagttcagatgagctgatcaagacggccaagtacattgcaacgccgggaaggggcattttggcggcagatgagagcacagaaaccattgggaaacgattcgccggaatcaatgttgagaacactgagtccaaccgccaagcttaccgtgagctcctcttcacttcccctggcagttacccttgcctctctggtgttatactcttcgaggaaaccctctaccagaaaacctctgatggcaaacccttcgtcgatctcctcatggtccgtctcggaaaaagcaaactccagctctagtcttagtcattgggtccaagagttgcagagttgaagctcttgacatgacccaaatggaacttactgtttcagtttggatctgatttttctttggatcaggagaacggtgttatccccggaatcaaagtggacaagggtttggttgatctagcagggaccaacggcgagaccactactcaaggtctagactcgcttggtgcacggtgtcagcagtattacgaggcaggagcccggtttgctaaatggcgtgcattcttcaagattggggccaccgagccaagcgttctctccatccaagaggacgccagggtgctagcccgctatgccatcatctgccaggagaatggacttgtcccgatcgtcgagccagaggtgctgacaggtgggagccacgacatcaagaaatgtgcggcggtgactgagacggttcttgctgccgtgttcaaggccttgaactaccaccatgtcctcctcgaaggcactctgcttaaacctaacatggtcactcccggctccgacagcccaaaggtatccaaactagatgttgcaatccggttttgttttggagtcgttgttttattggtcttatattttgaaactgaaaccacaaccaaactgtatcggtgtgatgctattttatttaaatttacatgcccggtccttacgtaaccacaatcaaatgaatcacagagacatcaatacctcgaaatgcaacgttaatttgctacaaaacgctaaaatagttcttcttacaggttgcaccggaactaattgcggaatacacggtgactgctctgcgccgcacagtcccaccagctattccgggaatcgtgttcctctcaggcatacagcgcgaagagcaagcgacactaaatctaaacgcaatgaacaagcttgatgtgttgaagccatggacgctcactttctcttttggcggagccctccagcaaagtgctatcaaggcttgggccggtaagcccgagaacgtagccaaagctcaggccaagttcctgaccaggtgcaaggctaacaaggacgctaccctcgggaaatacaccggctgggcttctggtgactcggccgctttcgagaacttggttgtgataggatacaggtactaggatcctttgagaacgggcgtttgcctttgatgcggtttgagtagatatctaatgtttcgtgtgtgttttaactgtttgaatgttcaattttgcagactgctaataattgttattttccggttactgtcaaactatccatgtgaaattcacgttttgaaaagctaataataatgtttttattgtatgagaataaatttagaaaactaaaaattgttaaggacatattacaagatatctcctcttttcgctttgctctagtgcacattgttagccaattcaaacacacttgaagtgcttaatgacactgaaattgaatatgatcttgtccggaaacacagcggctgaagctatcaaccttcttataagcaatgggcgtacttgagggaaacatcatatttttaaaccttgtctcagtaagctaacacacaccccttgtgattacttatccatgtttatccacaagaatgcagttggattgagatattttcttctttgttgaaatcaggcctcaaggtgttcatgtggtctgcaaaaaaattcccaaaaataaagatagtgacatctgaaatcgataatggattagacgaagagtttcgtgttattccttggtatgggcgggtttggggacagatattttggcacagacgaggactaggccactgtggtcctgcagcattaggtgtcccttccatgtcctgcattacattttattgatggattcatcaccctatctactacaacggctacacaaactatgaagagttttgtttactaataaatgcccaagtgaggggtcgatcgaacccgggacacgtttttcagtttaccatatagaattatccttggaacccttgatactccataaaacatcaccacctctgttgtcatctcatgaatccaggttcaaacctagtctctctctccctagtgggaggtatatggccactgggccaatgatgacaaaatgcaaaaaaaataaaatacatttgggttcattatctaaaatatctcttgtgtttgtaagttttggttgcacactcgtgtggttgaagtgtgtgtgagaggtactatacaatacactctgcttttgttttgtacctatctctttctcttctccacatatccaagactttggggataaagctgagatcattggttgccatttggttgtgtagaagcaatcacccatttgctttatccgaggttgataaatttcctcgggttctccttctgacacgtatgacaaattctaatagtatattcctcgtagatattacctatatattctcaatagttgcaggtacttaaggctttgtcttggcatcctcgtcctcttcagcaaaactcgtctctcttgcactccaaaaagcaaccatgtctgcttttgtcggcaaatacgcaggtaaattcatacacttaacatgcactcttcttgttgaataacttaggttctctctctttaatgcgctttctgtgttcagatgagctgataaagacggctaagtacattgccacaccgggaaagggcattttggcagcagacgagagcacgggaactattgggaaacgattcgccagcatcaatgttgagaacattgagtccaaccgccaagctctccgtgagctcctcttcacgtcccctggcactttcccttgcctctccggtgttatcctcttcgaggaaaccctctaccagaaaaccacggatggcaaacccttcgttgagctcctcatggtccgtccctgaaaaaccaaactccagcactagtcttaatcattaatcattgggttcaagagttgcaaaatggaacttactatttcaatttggattctgattcctttttgtatcaggaaaacggagttatccctggaatcaaagtggacaagggtgtggttgatctagcaggaaccaatggcgagaccactactcagggtctagattcacttggtgcacgttgccaggagtattacaaggcaggagctcggtttgcaaaatggcgtgcagtcctcaagattggggccaccgagccaagcgagctctctatccaagagaacgccaaggggctagcccgctatgccatcatctgccaggagaatggactcgtcccaatcgtcgagccagaggtactgaccgacgggagccatgacatcaagaaatgtgcagcggtgaccgagaccgttcttgctgccgtgtacaaggccttgaacgaccaccatgtcctcctcgaaggcactctgcttaaaccgaacatggtcactcccggctctgacagcccaaaggtaacgaaattaaggattatagatcgtttgatgctactccttatggaaccacaatcaaatgaatcacagagacataactctaaaactatatttctaacaggttgcaccggaagtgatagcggaatacacagtgactgctctgcgccgcacagtcccacctgcagttccaggaatcgtgttcctctcaggcggacagagtgaagaggaagcaacactaaatctgaacgcaatgaacaagctcgatgtgttgaagccatggactctcactttctcatttggccgagccctccaacaaagcactctcaaggcttgggcaggtaagacagagaatgtagccaaagctcaggccactttcctgaccaggtgcaagggtaactcggacgctaccctcgggaaatacaccggcggggcttctggtgactcggccgcctctgagagcttgtatgaggaaggatacaagtattaggagcgtttaaatacgggtgtcgccttttatacgatttgaatatatgtcaaatgtttcgtaggcgtttaactgtttaaatttttatcgatttggtttagcgtctgtgtaatgttcttaaactgtgttgtgttttttgtgatggtttctataatattttcgcgccatgacataacggttcgttcaaaagttcggtaatatcccctaagtgggtcccacaaggaagtctatcttcttcttaatcaccaaaaaaaagaagtcattttccgaaggagagatatttttacttgatattttataattgtaagaatgatctaaaactagtttggttataaatccaaatctttgaactatttttgataacattgttcatgaattagggatcaggcggatgctcttacaaaatggattagggcttgtgcaacattatcctgcttattatgtgaacaaaattgaagaaacatttatgcttaaaagttatccgaataacaatcataatattaatgttaataatcgaagagaacaaaaaaaagggcgtttatttaggctggaaagtcgaagtcattgttattgagacagcacatgctcatgtgatgagggtggctcaagggtccacgtgatccactcgcttctgtcttaagcctctcttcttcttattcttcttcataatttcacaaatcgttaatataaaaacaaacaaccaaaacacaaaacaaatcacgcatcgttatcgcgtgtgactccaaatgctccagtcccaatcggtcattatcctataaaatagattatattcgagttgtatgttaataaacaatcacaacattaaaaaaatgataaaactcacatactctaaccaacctctaatacatacagtacgtcagatagagtcgttatggaaatatcctacatgcatggaccagaggaatgaggtacaaaacatcaataaaaatccagataaaatcgcagtagcctaacatgagggcatgacaagctttagaaaacaataatttcaattacctcaaacttccttttatctgctcacaatcgaagatcttatactcacatatttcatgtcatattcgagttttgacatggcttgcatacaacttgtttctcgaattaccttcgattaactaatttactatcgatataggacaaatgactaagtatattggaatcgtcacatctatttgacttgttctaatcttttttatctagaaattgtggatggaaactgaacatttctttgataaggaataagatggttctgtatatcaaaaagatatttataatcagtttgagaagaagaaaaatcatccataaatccaatgataacagggaaaatgaaaggcaattagataggagtaggacaagaacatagtaaatagttgttaacccaaaacaaaacaaaaaaaaagaggggaaaaatatgacagagaaatgaaaaatcttgattttagtaccaagtatttttccattttatgttcgacattttaatgagatttataaccaccaaaattggtatatatgtattatttttccgttaacttgttgtatgctattgacgttatttgggaatcaagaatacaggaacaaatcactaaaatctattgcaactgtagttgtaattgattatacaaaaacttccaaaaaatttaaagctccaacaaaagcatatatattcacacagctttgtaaacaatagctcacggtttacatttgttaccttgttccttttttaaacggagtcatccgaaaacgcaaatgaacaattagacgaaccgtgagaattgatgattttctcattcgacataaattgttgtggctctttgcttccgcaaccaccagctttgatcttctctgtctccgatcttccaacatcaatatgccttatttctgtgagcattgccacaacatctttcattaaaggtcgttcgtttgccttgttgctaacacacaagaacgcaaccgcaagagtttgaagcatctcatgcattatcgagtcagtccgtccatcgagtctcggatcaagaagcctgctaggatcttttttctcagccaagtgatctctcacccacttaaccaaatgtgcacctcctggtagatccggatctaacggatgctttccggttaaaacctctaacaataccaccccgtaactataaacatcgctcttctcggtaatacgttgcatcgaagcatgttctgtaaaacccaacaaacaaaacaaatcaaaatcaaaactccaaacttagttaagtgtacaagtactttctcaagcttacctggagccatgtaaccataggagccagccatcggaggccgattggtgggtttcgctaaatcgattccggtatttggataaccggagatggttctagctaaaccgaaatcagctaagtagggttcaaagtgaggacccaataagacattcatagctttaacgtcaccatgtataattgtggggagacaatcatggtggagataagcaagtgcatgggccacaccaagaacgacgtcgtatcgcgcctcccaatcaacacatcctccttttccggcgccgtgaagccgagaactcaagctaccgttagggagatagtcgtagaacaagagtttcagattccgattagagcaccaaccaagaagacgaacgatgtttctgtgacgaatcgatcctagagttttaatctcggagttaaacgcaccactctcttcctttgaccacattttcttcaccgcgagtgactcgccggagggaatcgttatacggtaaaccacaccggagcttccggttccgatcacgtttgctgacgtcagattcttaacaatgtcgtcgattgaaaaatcgagtttttggtaaagcgtcacttcccacgaatctatttcttctccgaggagttgttttccggcggctcttgcccggactagagtgtaaaccgccatgagaacaagtacggcagtgacgacgacgagaattaaaatagtcaatctaacgacggagctgttcctggtcgtcgggtcgggtcgggtcgagattgcgttcgagatgtaaagccctctgtttgaggcgagatcagaaagtggaagtcgccggaaaaagggcgtgttgggtaaatcgccggagaaatcgttgtaggagatgttgagagagacgaggttttgcaaatccgttaaaacgtttaagtttccggtgagttggttgtgagatacgtcgagcactccaaggtttttcaagtcggagaatctagacgggatttctccgacgaacctattgcagctgagattaagagatatcgccagagacgggatttgacccaattcgtcagggatttcaccagaaaagtcattttcgccgagattgagaagctgtagactccgacaagtggagatttctctagggatttcgccggataatctgttcttggcgagattgagctttgtaagctctgtcaacaatcctattcccggaggcagagtactggacagagcattatcggagaaatcgatgaacttcaagctctttgggagtgtagtaccgagcaatgaaccggagagactattcgtgtgaagatcgagaaactcgaggctttcacaaccagagatcgccggagggattgacccgacgagacggttctcacttatatcaacaaagttgagatttttcagattcccgatttccgacgggatacttccggcgagtctgttaccgttgagtcttaaccggtaaagattcgtacagtttccaatatccggaggtatgaaacccgacaaatcattggagagaagaagaagcttcgtgaggtttcgtaacccgaatatctcttttgggatggagccagagagactgttgtaagagagatcgatggcttgaagctcacgacactgggagagactttgagggatgtttccagttaacttgttctgccatgcgaagaacatggttaagcttcttaggttactcatcaatgacggaatctctcctgtgatgagattattgtcgatctctaaatgcgtcagcttcgtgcaattcgttagctcttcagggattgttcctgagatctggtttacactcagctgaagctcttgtagattctcaagttttccgaagctccttgggatggtcccggtgaggagattctcggaaaaatcgataagccagagctcgggacagttcccaagctcggttgggattttcccaacgagattgttctgccataaaagtagactctgcagcttctttaaacctccaatggtggtagggatcgatcctgagattgaattctgatacaagtagaggttttggagctctgtgcagtatccaatctcatccggaattggaccagacaagagtgacgtgtaaattgctattgtctgaacacgtttcaggtttccaatcgacgccggaagtttcccggagagactagtctcagcgagaccaagcattacaagattctcgcagttacctatctcccaaggaagctcacctcttagattcttgttcccaccagcacgtaagacttgtagattcttgagctctccgatactccttgggatctctccggatagcttgttgtcgaaaagcataagctctacgagacccgaaagattcccaatctccatcggaatatgaccttctagattgttagtgttcagagacagagtcttgagtttcttgagcctgaagatttccacagggatatcaccggagagagaattatccgacaaatcgagtaactcaagctccgtgaagtctccgatctccttggggattactccggtgagattcagtgaagataaagtgagggaagtaagagacttgaggctccggagactagtcaccggcagagaaccttgcaagtccatacctttgagctgtatctccgaaacttcacctctacggttacattttacgccgacccaattgcagggagatgtgtcggcgacgtgccaggaggaaaaagcgtcgccggagatgttcagttgagacttccatgacaagagagcttgaccttgttggtcgagagagaaacaggggatgaagaagaaacagagtagggatgagaagaaggagagtctatagatatttggtggcatcggagaagacgaagatgaggaagaagaatgagagaagtgcgttgggattgtaaagcgaagaaccaatccatcggttttggttttattttgtttataggaaatatataaataaacacagagcagagagagaagtagcaaaggaaggtttttgatcccaacaaagtttctatcactaaccctttagtattattttaatctttgcttttgatttttgtaaaattgaaaaaacaattaccctaaatagtcctaattaagttacaaagtagttcactcttgaaatagctggatcaagttttagataacgttttgaaacataatcctgtaattaaatttggatttgacttcaaggaatataccttacatagataaaccttttttatttatttattggaaaaacatattatggccgaccaccaaaatttttgaaagtaagaaaataatcaaatattatgcaacaaaaatagtatgctataatttatatgaaaatcgaaatctgagaatcaagaatgacatgtcaaaacaatagccctcttacaatggcaccaactttcatggttttgagaccgacatgtcaaatagtcctcctctcttttccgctgctatattgtaattgccttttacgacatttgcatgtacgaattttgtcgaaatttcactccaatccactaatcagagagcatcgtatcatgatcttataacatgtgaacgagaagtgttctccacttcgataaaaggttgcgatcatttataggtcttgacgtcttgttccatgtggccagttttaccattaaactagtatcaaactgttacgaaaggttcaatcacattcaaacgtttttttaagagttagaccgagcattacaagttatttaaatttaactatatcattaattcatatatactagctctaacttacaaaagaaaagacccgttaaatataatgacaatagtacagcccaaagatggctgcaacgttcaccacgaagaatcgaagaaacaaaacttgtggatcttaaagcggcacgatgaactttaatgcttctttttggtttaataataggtaataaagtgttcaacgaattctcaacacattaaacgcaccgataattttaaccaattatatccacgacaaaaagtgcttgtgttttagtagttacatttaaatagggtttctcatagtaagaattgaagtatccaaatcccttgaacttcccatgaatgtcgacataattgtgtaactagtaacgaggaaccatgtgtatttgaactagaaaactgtacatggtttaatcagaagcacttcttgtagctagtacattgtgtaactagtaaccacaagaaaccatgtatataatgtggattctgtttttattttgagagaaaacagaagtgggtaaatagtggttatattaaaattatttactattagcgtagaatacagatcatctactttgagtctttgatagtataaactagtgataaaagttgaagtaaaacatggaatcttggagagtgaaattgcacatgcaagctaggaatttttgtgactgattaattaaagaaataattagtttacaaccatgtcccttgctcatcttgtcggtcttaaatttcccaaaaaaaaatattttttcaaatttgtaatttaattaaaatgagttttatatatatgacacatgaaaaagaaatcagatttggacataataataaaaaaatagaaatgatttttaaatttagggtaacgggtcgaacaaattataaaaagatcgaacacggcaacttaaggcacatgacatagagaggtcatgtgcatgtgaataaataaaaagtcgtttccctacataccaattgaatatttaattttagtttccctaattgccttaacattcactatttcactttacgttatacatctaattttctcaagcagccgtatcgtagtcggtccatatttttcatacctacaacgactttctttcacgttgatcctacacgtaaaacgaatcgaaatttcacctaacataatccttttttttgttataaaaacttatagacgtcgttgtttatatgtacacaaatttaaacggatataacaaaatcaactaaatacagcaaataataagaaaaagagagaaatgaatggtaatggtccatttatggtagggaaaaaaaataagaaaagaacaaaaaccaacaaacaagaaggaagtaaagagaacaaaaggtgcagaagagaaaagacaaagaacctccaactgtacttctgccaaatcagtgaaacatttctttcacaaatcttattatgattatcggttattaatggtccctctccttgttgggtgacaacaccctttcatccaaacattattcctaaattctctacaccaatttataatttatacaactactactgttgtatgattacataggcaaacattgatgagtctaatagtgaaagttaacgttacaaaacactttataaccagtggtttggatatgaaacttcacgttatataagacatttgttgatgaagacatttgtttatgaaagagtagtttatgggtgggtactctttattagtacagaaagatgaaatatgtgttacaacgtatactaatagtgtaaaataacgaagaaatgtttaagtgcggataattgacgaagacaatgtaacaagatctagatctaatcacgattcaattaggtcagagatctcatcacatgagagagaggctttgttgaatggcttgatctgctccaataaattatattaagtgagaattaataaagggtgttacgctggatctaatctagaatatgatatgggttatttatttctatagtagaaggttttgtctgtatacttttcaatcggatttaacttgttttgtctaataataaaagaatggtcccttgtggtgggaatatagcggcagaagcagtccaagaatgtagtggcagtagtgcagaagtgtgaacagaagtgggcatttcatccaaaactatctatatgtgtatattatctcatgatccaatgaataaaaatttagtatgatatagatttaatatggatgtaaatcttgtctatatagaggagtttaccttctgcatttttgcctggttttaatatatcgaatttggtattaactttaaaaattacattatcatatatgccttatgcaatgatcaaatgcccaaaattataaataaattatcaatgttttagttattttttcagctttgtttttcaactttccgcttgaattcctccttttttcttttaacttttagtttttttgtctaaccatgaatagaattcattaagacttcagccaattaaaaggcctttttctagttttctaatttaaacgttgcacgaccacagatttatagattagagaaagagaaagcatagtactaaattttgaactgattaaaacaataatgtttatgtctttttaactaacattgcttagtggagaagatgagcttttgctttcaactaatattatctctcgctcaaaagcttttgttttcaaataaatatcagaaacaatacgtgtaatgtaaggtcaaatgttcctgctccattgtttccgtattttcaggatttgggtttcccgctcactaagcattataccccaacatcaagataaacaaatagatcaacaattataatattttcttaccactatcgtacacaaaataaacaaacaaacacttggagtttccattttcaagtggaagtttatttagaatgcttgtcaaagatcttcagcgtgatatacatgtagagcctttcgttgtatttcaattatgataagactacaagtgtacaacatttctatggtatatatagcgtgagtacgtagaaacgtctatcatgaatctttgtacatgtaagacgacccgtcgtgaaacaaccatgaaccgtttatgtgcggcatggtgttagattttcgcatcttgaatgataaaattcattgtttatcttgtcatatgacaaaaagaattataatttttccattgatttgattatcgtcgatgtgtaaccactcaaattcagatctaaatattatatgttattgataaaaataatgatcaagacataattattcatcattgataatctttaactaaagatggtcctaaacacactgcttttgactgatggtcccagtttaaagagccgaacaatcttttatcgggctttacttggccaaccaaaacctatgttgcatatacttttctcagcagtaatacaggacagcaaaatacacacgtcttattgatattgtgatcacttgatgatcttaatcgggacatgatctaaacgtttttttttttttgcaaaaacaagacctaatcagcttaagtatttgttacaatgtctataccctaaagagtttcacattgtcacctatcagaacttcgctaacacattttgggaaacgaatcagtcgacaccatcctgcgtgggaattaggaaactcattttgacattttcttggtacaatggattttttcgttttggttcgggaatcaccagcaactaaaaaaaaaagaacatcaattgggttcttcactaaacatttccttcacgatcatttatcttttcgagggatttcatcaaatctatgttaaagagtataccaaaaaacgcttcgacatctttctttgtacaccgacaagtattgttctctctcccagattggctacgaaagcttatctcccgaaaactcttagcgcagatgaggtgagagcagaactgaggaacctcatgcctgatgatccaccagggaagtaggatatacagtagtaaaccagcgcaagaacctgtccattagcacaaaaagaaacagatactggagattatgagattcagcagaatgcgcggattttgcgagcagaagttctcaaaacctctacaagtatatctttcatacagtccaaatagataacgggtgaagacccagataagtatcaccacttgttcgagagtctaatgtttgttgctaaactctggagattcgaaaggttccatctcaagaccgattcaacaatgaggtgagttactatatgatcttaaatactttggtgaggtccaatattgttttccacttgctcatagcaatatctcattttgaaaaacttaaactcataattaaagggaatatcctaagaattggaagatgaaatgtttagtacctgtaacactgagaagagcaccgagagaatgtagctgtggagaaccattgatacgtatatggtaccaaccatggtagcaatgaaacctagggttgaaggaagcctctggagaagtacacaagatattcaaaagagaggaaggaaatcactcttggatttaaggcatgacagacacacaatagaacagtgtaacatacctccatcgaagacatgtgtgcgagctgatttttagggccacgaagtgcgaagaaggatccaatgatgaatccacatccaagggtgaaacaaatggcaaatttctgtggcataagcaccatgactggaagaaacattgtgaaggcaatgaagatgaagaaaacaccacttgcgagaagtaaaccgaaatacatgagcgcttttcctgaaggcatactacttgttgctgactgcaagctccctggaatatctctaactccttttgaaaccctgtagtcatcaaattcaggtacattgcaaaaacaacagaagaacaagaattttatcagagaaacaaaagaagattcctgaaaacaactacaaatataaataactcaatagacttattcactaactctaaatccattggtatgcaaaactcataaatgcatttcccaaactatcaaatctcacaatcaacaaagtaaatctcaatagctcagattcactaacacccacttctcactaccactaataaacctcatcttcttagattcagtcacggaataaacattatgagatgactaattgcaatctacttacacactgaaggtgcccgaaacagtgtcattggcagatctaacggcggattcgatatcaaagccgaagcttccgccgctttcctcgaaatctctagaggctgcgtaagaattccaatccgcaagcagagacgaacccgattgctgctgctgatctacggtgctactcccgcccatcgaaaaccatccttgtgacattttttgggtttcgggatcttcaaggaaagcaaacaatgatagaccagaacgccggcgatcggatatttttcgttgacgttttaaggttttttggtaaacgccgcagctaaagaattacttactcgggaagaagaagacgggagaaccgatgctgtaacgtcgatagaagtcaacggcgtcgtttcttaagtaacttagctttaccatttttttccccgagtaaaacgagtaatttggaaacttcttgagtgaatttaaaaatactggtatggtaattcccttattaatccaagccttaaagcagaactcatcaagatatgtagttccaagcagttgttgttacagatttacaatagaaaataaataatctcacagccaaaatacttcattaacagtcagtgacaggacaaatatcataatactttcaagagctggatttcaaagaccagaggctcgttcgcatgcgatagaaggctgcgtcgtggtccaaactgcatccacaaacacatatgagagatcatttgagacatacgtatgtagcaagttcattgtggaagatgaagagtaaagatctgactacctcctcggggattggcttcaatgtctcgtttatgtaccctactgatggaggtatcagtgccctacgcttcccttcatccgcaaaagaccattatgtgcgagtcattagaaatatgagattacatcaaaagaccaaaatcttatttgttgtttcaagtttttacctccagctttcatgcccaccaagacttctttcaagccctcaattacctgtcatgcgaagcagtttgttagtacaggccatgattggaacgctatgttatatgcaaggttgagtgcaaatcaaagtacgtcgttttcatcgagaataagtttgacaggagagctttcaccactgaattgatccaccgtgctgaatcaagaaactatgagagttaaaaagaggatcagatttggatgaaagaaactatcaaggcatctaaagttttgcatgaaatctaacctatgaacgaaatatccatttgcacgccgacacacatagtttagttcgaccaggtccccttcatgagcttctcgtccttcaccttcaattatctctaaaacaagacttccatgattagcaaataaaacgaacaatattacaagtttttgaatgttatcatcagaaggaacaacagacagaattctagcgaaagattagtaccttgatacctcacgccactcgggagtttcaatgtcctgcattcttcgatcgccaaccaaaaaaacaattaaaaactaggatgaggaactaagtccatgcaacaagtagaacaatccaataagctcaaagaagctttcacatattcctcacttctttgtgtacatggcttatcaatgcaataaacaagcacattaaacaggaagccataaaatattgcaattcataaactagtaaaagattatttgaaaagcagaccagaaatataatcacaaaatcatttcaaacatggacacaactacaaattttcctcaatgctagcatctacaattatcatcgacgttctaacgcaatttcctgaatcaaaatcaaaatgaaaaaggagtttagatagctcagagaagtaccaattttacctgatcacttcaggttccttcatctgaggaaccggcgccgctaaactaggaaaatccagaagcgtcaagaccgaaccaaatccagacagctgcataaacatccttctgggtacatgtacagccgagaccgaagagaatccaacacgactaatcctagaaacgctgttccttgattttcccgcgctgataaataaaataaaaaaggttcaatctccagcgaccatactctcaaatcgacggagatagaaaattatgagattccaaaacatacgaatctaccttaaggccatggatgatccaacgaaaggaagagaaatctccatagccatcgccatcgccgtcgtcgtcaacagtcttcttcttcttcttctatggatagtggataagaaaaagagtgagagatgagattagctacggagcaacccaccactaaacttagtggacctgtgggacccacactgcttatgaattttgttgtgaaaaaaatacgcgctacggtaacgcgtgaggatctatttttccttctttttttgtttattttgtttattttgttaaatacatccggttcgatcaaaccggcgatttcaattttgacttgagaattcagattagagcatagccgatcattggtgttgagttcttctctcttttttttctagcagtttgccctttcaatgctctagcagtttgcttttacatgtctcaagattagtagtagatctacagatgcgaggagaaaatcatcaacggatttgttttttttccacacaaaggaacaacaaaatcttgaaaatgttgagagagattgaaaacaaataaacatgatacataatcagaaaacaaacacaattcccaaacagtctcctctgctaatatgctattgtttttctcaggtatcttccacttgcgagtgtaacacaaagctcggaaatgtagttgtgatatccctgcacacaatatcagatatcatggtgttaataatacgtgatgcagaaaaatttgaagttgcattggctaaacctcgggttagtctttggtttaggagctcacttgagatactggagagtcatgttcttcagaagaagaggatgtctaaaaactaggtccatccactcttcctcatcgatcatcccttcatgttttgtgtcagcttgcacaaatgtctgcctcataaactcaaaaatcactcttcacttcatattcatcagctgcttaaacttagttggctatactatagactagagtcgaaccaaaaaatagaaggaaggaaaacacaccttgtcgattatactctctacgatttcgtctgactggctcatgccggacgcagcaagagtagccaccaccagttgtttcaccccctgcctttcgataaaaccttgctgcttaagatcatatagctgaaacgaaactgccaaataatgttccaggtaaccgttaataagctttcatggaatatatataggtagcatgtgaacagtttgtttgtagatggttaatatatcgggtctagtttttgagatcagagacgtacggtcaattttatcatctataggagcagatggatgaaagacagagagagctcgggcaaactcctcaaacccaagtaatccatcatgatttgtgtcgaacaaatcgaagacctgtgtgatagggtaatgtcattgtttgcaaatggattacaaagactttttttgttgagaacaaaaataaaataccctctctgaaaacaagctctcatttttgtcagtctggaatatggctacatgaaactgttcctgatacaacagaaatacaacaggacacgttatggaaaatctgtaagacttgttgaaaagaaggagtgcgtggcaagaaagacatatatatttatatataattccaaataccttgttcatttcaccataataacacgttacgccttctacaacgttaccctgaacgaagaaacacagatttatatcatatgcgtacttagcaagaaagttacatataatttatacgaacctcgtttctttggcaatcaacaccgctgagtttcttaaacacctcatagagtgcctttcgctttttctgatccgtaaagcatcccgtggagttggaagaagctgaatttcttgttgaatccatggagagtcgtgtagatagaaactttttagccaagaaagagagaacaaatcgatgatcaaaaaaagagattgtcaacgcgctctgatacctattcagatctttgagacagggaaaacatatatattaggaaagaccgaaagagtaagtaatttattcctcaaagtaaacgtgtttatgcagaacacaatcgtcactaactttgctaattactttgtcaactctaactgacaaagtcaaccacaagactaacaaatccgattgttgtaatgttgcatccggttcgatcaaatcggtgatttcaattttgacttcagaattcagactagagcatacccgatcatttggtgttgggttctctcttttttgctctctattatcacttcatcagtttgctctttattaataggattcatgtctcaaggttagtagtatatctacagatgcgaggagaaaatcagcaatcaaaatcaggagtagcaaaaatacagatttgttttctttacttttaattcacacaagtaacaacaaaatcttgaaaatgttcagagagattgaaacaaatagacatgatacataatcagaaaacaaacacaattcccaaattgtctcctctgctaatatgctattgtttttctcaggtatcttccacctgcgagtggaacacaaagctcggaaatgtagttgttatatccctgcacacaatatcagagatcggtgttaataataacacagaaaaaattggaagttgcattgcctaaacctcggataagtcttggtttaggaactcacttaagatactggagagtcatattctttagaagggaaggatgcctgagaacaagggttctccactcttccttatcgatcctcccgtcatgttttgtatcagcttcctcaaatgtctgtgaaagaagaaacttagaaaccactctttactttattctcaactgctatcatgagttggctatacaacagtggaacaagaatatagtatcgagcagggtaggaaggaaccacaccttgtcgattatactctctatgatttcgtctgacaggttcatgccggactcagcaagagtagccaccaccatttgcttcacctcttgcctctctatgaaaccttgctgcttaagatcatatagctgaaacgaaactgcaaaacaatgttcccggtaactgttagtgatatttcatgggttacatgtagcatgtcaacatcagataaattgtatagatggtttctcagatcaactttgtaagatcaaagacgtacagtcaatcttgtcttctatgggagcatttggatgaaagacagagagagcacgcgcaaactcctcaaaccccagtattccattatgctttgtgtcaaacaaatcgaatacctgtgattggtactgtcaagttatctttcaaaaaggatcttggcaaatggataacaaagtcttttgattaaaaaagaagaacatacccggtctgcaaacaagctctcttttttatttgtcttgaacaaggctaactgaaattcttcctgaacgacaagacaggtcaaggaaaatcagaaaaggatgtccaaaagacgtagcaatatgcatgattcgtgaggagtataagtgagtggcataaaagacatataatgatgcccttccttcataccttgtttattagcccatcatcaatcacagcactgctgattttcttaaacagctcatagagagcctctatttcactcacgctaactgcacccaaacgagtcaatgatcaaaacacagaaagaaagatttgcattcctcttaacagagagcatcaactagagtaatggcaagcctttgaatcatacatataactggaaaaaaaaagtgcatggaagttaaaataagatggaaaagaagttgagagcatacaaactgtctctctcgcaagaagttcagggtcaccaaggcctccagattgtttgtaaatatcgatatcaaaacaccggaaaaaagaggagcatacatgcttgaaaccgtctatgcactgcgacatgatatatcttgtaaatcaaaactctccatgcctgttaaataacaataaaatgtaagaactttcgaaccacttggaagaatctaaagacatatgcatttgaacaagataagtaccttttaaccatttcctggttcgtcaaataggcaatgctttgtacacctcaaaaaattctgcgatgggaaggaaatgagatatagtcagttattagctcatcaaattgcaaaacagttaaagaagaattgacaggagcaaacaagattcatcattctcagatcagatctgaattagactaaagcaccagatactatgaaacacaaacagaggagacgcatattataaacggtcgtaaactttatgcattaatcttaactccagattcatttccagattaaccaatgtattcatggattaggaactatctttaagctaaaacacgaaacccaaatctaagaaacagccccaaaaaatacatgaactaggataaaatgaggaatcaaaaacacccaatttcacgtcagaaatgcatcatgaattttgcggggaaaaaaaatgcatcatgaagaacataataaaactatccagacggattaatcgtcagaaaatataatcctctgaggatcgacacctgaatctaatcgcgatatgaatcagagaagtgattaagctaaggagaaatgacggatatgagaaaaagcgatccaatgagttttagattccaaatcgttcggattcagagatacaacaacgatgaatctcgttatataaacttggtaatcagctcatggatctatcagcttgcgaagaaattagttgcttgattctcaatctcaaattttaacttgtttcccatcgcgattttcccggaataaacacacgagattacgaggaagcgaccgaccgcgaaatcgtagaaaagggagaaagagaagaagaaaaagccttacgccacggcggatgatgagccttccttgcggcggctccggcggttgaaggtgacggtggttgcggtggaaaacgcgaaaaaagctcttattgggtaagtgagagaaaaaaggtcgacacgattttctataagcagaatgaatatattgcaaaattttaaatatgctaagaaaaagaccaaattatttttgtttgttggcgtttttatactttttaaatttaaaaaataaataattttgtttatttttactcgatgttgatacagttgtaataaaactccttgttacattcactttcacacgtcgtcgtctagtggagcatgtgtccatttatgcgctgtcttaaacaccatcgtttcaataatcgttcctatacgacggcgtgtcatgttattcggattctgactgttgctttggtctgatttggtctctgggtttgaattcggtttaaattgtctttggaaaaaatattatagcaaaaaccagtataagcttagttacattaaccaacaattaaaactttgattaatggtaagagagggacaaactctactggtaaaacaacagattgatcatgttttttaactttttttttaggtaaaattacagttactggtgagctactttgtacacaagaaaaaaaaaggaatgataacgacattcacacaagtaaacgtgtttaggcggcaacagaaaaaaaaaaaaacacatatatggtacttggtcagagattcaatcttgtgactcatgtattgttttgatttttcagttagggagatcttgtttgcaaagaggacaacacgagatgatacgaagccattgatctacgcatttgaggtgaaacctatgcgaacatggaagctttctcacttcttctttctctttgtactttgccaaacatatacaacattcctgcaataatgaaaccggtgggtttcagttttgatatcaagattgatttctgactatttgacctatttcagaattcaaattagtgcttaccggatcattgtttgcttgagaagaatcagaagtttcatcaatgagtttgtatttccaacttgggagactggagatctggtcatctgaagctcctttttccgaagatccaacgttcatgttgtagccgaggaagctactaacgagaggtacaacacaacagagcaggaggaagagaagaaatgggaaggagtaacagagagcgttccaagcgagtagggagatgcagaggacatgaaggattggagcatagtggaaagaaccaaaccgagaatcaaaaacccatacattacctatcacaaaccatatcgcaaagaatagctccagcgatgtccggcatttgttcatcaaatgcgagcacctaaaacacacacaaaaataagtcattttcctagaaatctttgcattttatgatcaaacttgaaaaaactagatttttgttagtaacctggtggtctcttccctgcttctttgttgctgctcaatatcgccgaagctaaatgcattttcatggctagtatcttgctgacgataccgaccgtatagtaacataagattgagcagacatccaacgttgtagccagtgatccataacctcatcggccaaacaggcctctcgtttttggacaaagctagtgtggatgttatcacagtgatctgtaaaagtaaagcgatgagctctgataccatccaagcgatagaattgaaaggattggtgccaagatcggatcttgaggcgttctggtaatgaaagactcttctcaagaaaatgaaccaccttgctctagataccctcatggcaagtctcatgaagaaggaagaagatggagagctctccggagccgtgtgagtgttatcatccagttgcgtggaagcgaaggaagaagatgaggagacagtgatggagttaatggctgatgattgcaactgagaggaataacgggtactcatatcggaaacagagaggtctttgatttgatctcctgaacaagagcaaagagaaacagagtaaagcttgagctaaaaagccatgaaaagtctttaaaatatgcaattaaagtacatgtaaaaaaaaagacatggatggatatatcagtgaggcattttcatcaaataccttatcttcactctgcgaaacagagcaacataccaaaaagtgtaggttttggtgtgaacccagcagatggagaagattttggtaaaaaaatagtgaagatagaagagatgaagaagaaaggaaggtgtagtgatattgtcagagaaggtgaagttggccgtttgatagtgacgtccacaaatggatttttgcttaggattgaagaatgcagaagaagcagagaagtaggagaacataaaccgttggcctataaaacctaacaaccttagttttttgtcttcgaagcaaaactccgacagcaaccgctgctgctttatctattctcgttttttttttggttagacaacgccatctctcctccctctctccctctctccctctacgcaaagccaaatatttataagaaaatcattaaacataaaaaaattcaaaatccagtattgggccgggttgggccgcgtaaacgggtatccaaattagagggtcgttgaactgagtctgactcactgagttttgtgatcgagtcaaacaaaggtgagcttgggaaataatggcgtagctctactagctcaagtttgagctctcccataatgagtacatcaagcttgtcctccatctcctgcctcctctggagatctctctcatgatgacttcgaaggtttgaaaaacctaactatgaatcttaggatctgattacgtttgacatgtacgttaaattgcacaatttaggagttttcctgagttcaatagaaggtgacaaatttggttcttgattgcttgaaattgacaggaacggaagttgttcacagatcttagtgttattcaattagaaaaagatggaaacttttagccttgttttgctttgtcctgaaattatactctctttgattgaaatttgtgttagagctatcatctttgggtgttcttaatttgcaaaccattttttactttatcacttaaactctcacaaagtctttacgcattattattattatggccaccaaacgactttgcagtaactgtccctcacctgcaggtatgagaaactacagagataatgttaaactgcaacaaggttttagaacaccgggcagcccttagcgacgatccctttctctgttgggcaatttgccaaagggcaatggtctgtgttctcattcccccaccaatctggtaagcttatgttattgttctgtaacgcaaagtagatcaacactcccataaccgcagtgcctgcatcaagagctgcagagaggatgtagttatgccttgcccaccatcccttgtacctcctgaagatatagtagttgaacacgatcccaacagcgaaccacgaccagtaatgcacagccttggccattggcatcacattagcccctgagaagatcaagggaatatgaatctgatgtatccacttcttctccgggaatttccttgcaaagaaccagaccgggacaggagcaaggaagccaatgaggaagaaccagttcatcccggggtatatacctttacttgtgaacatccttccaggaccgatgattccccaaatgatcgacgcgttgtagaacactacatccccagggcaagtccacggactactctttgggagcatatctgtgttacagatgttctcgactgaagaaagcaaccaccatgtggtcccgaaggagacagttgaagcaacaatagtcgcaacgagttgaacgatgaacatagatctcggaggaatcttcatgtagtggccaagtttgaagtctccgacaaagtacaaggcttgagctatactcacagaaccataagtcttaaaagccacattggcaagtggctttcccggatacaagaacccgatgatcagttccgatataacattaagacccattcgctggtttgtggtcgctaggataactccaataggcaaagtgaaggtaaaggcgatggcacaagcgagtaaaagtccccaccatgggagctgaagctgtttgccaaatccctcacatgcataaagagctagcacaaaggaagcagcgagaaccgcaacgaaccaccattgaggtacttccttataattcttcttcatcaatcttgtatgcacatctccaaacttgtcctttgtcgtcaatgttgccttcttccacagctcccagataaaccttcatgtaaacaaccacaacaacaacaaaaaaatatttttcatggaaactgataaattgatctatacagtattttgagacgcagagtagagaaaaaaagaaaaaaaaaagaatcttactttccgtcaaagagggcgacatgagaaatggttgcggtaagggtaccgaagctgagcccatagatcagagcaaacagaatgctaaggtaaagcttgctatagctttcgtaagcaggaagatcaatattgaatgttttctggttgaggatacgagtggtgttgtaacgctgaccagtgtgatcaaatgggtgagaggtatagaaaggaaacttctttgcctcgtaagcgttgctccagtagaagataggaaggatgatgtagaagaagatgataaatccgccaaaggaattggctatagcgaagaacggtacagctaaaggactgcctaagaaacctgcaaccgtggaccaatcaagaccaaatgagccaatgccgagaccgtgcagccctgaaccgatctgttgagcggttacagagcgggtccatatccagcagacaaaggagagatatgagatggaagggaaaagatagcctgggactatgtagtaagtgaagctcaggaagaagactatcaagaagaatctaagtttcgtttgttttccttcacgcttctcctccttctcatgtaaggctctaatccatcaaaaagtaaaatttcgtgacagttacaaatgtgaatgatttggagaaaaaaacacgaacctaaagagagagacttgaacaagatttgcaggccaccacatgtaaggtgagtccactaggtatttcctgaacatacccgcccatccatatcccaacaactacatgacagataaataatgtaactgttacaaacaaaaactatgtaatttttgaattatattgtatattgtgtatacatacctgagtggtttggacaagcaacatggcggcggcgggattgagattccggtgataaaatgctttaacgatggttaggatgctggtggcataagctcctccagctccggtattagcgaatatagtgatcagtacatgttccttcatgttgaatggtccagggttcaacgaacacgaccaatttgtaccaggtaaacggagttttgttgttggtagagtcgtggccatgagctttcctagagggagagtgatgatctgagccacgactgaagataccgtgagcgggttcgaccggtaaccgaagaaattgttcacgaacgcgagtaccacgcaagaaaccattcctaagaaccatgtacggaatgtcaaaactggtagagatggatcgtcggttatcggtacggttaaacggacctcttcgattggactgtcgttttcatcctcttcttcttcatctgccccagggacaaaatcggtttactcagaaccaaccaaagttgcttagtatgatctacattaatctaaaggaatcgagttgtgtttaagaattatacaaatagagcatcagccataacggtacacaaggaatcaaaccacatcgaaccaagattggtcaaaacagaatcgagattttatttaccggctatgacgatcttggactcaaccttgtgctctggaggcttggatacttcgagagagcctaccattttctgttaggcggccctgacgtcgatcgactcgggtgataatgtccagagttctgaataacttgctgtagaagtaatgttcttgtaagcaacctgtgttaatgacctgacattaaaaataaattttctctgcaatttttccaggaaaaaggaaaaagttagacctctgttttagttaagatgtttgagaggatgtactagtattagagaagatacaagagagtatttcctctaatatgtattggagtgaagactgaaagaatcatgatttctcgacgaatttcttaatatcgacaagtttactgaactcattagaactaaagttgttgattcactttcagtggaaaaaaaactttcacttcggggtaaaaagctaaaatcttgatttcgagtatgaatgtagattctacatctggtatgtttttgaaataggtacttaaactaaaagaataaacagatcataaatatagcaatttttggcatttaatcatttagagatactggatctagcaatttgtagtgtattccgtctatagctttcaattattcactttacttctctggtttgaaagagacaaaaatcagtttacagaaagtagactttctatatagaaaaaagagaaagaacttatcaaaaatagtttatacatacactctcattcaaagtaaaagattaggatagagagtaaattacaaaaagaaattgagcattacaataattagcggatgttgataataaaaaggaaataattgaactagcaagagacaattttgtgaggtaagagttgcaatttaattggcgatcacttgcagcagctaaaaacaaaatttttagcgatagtgacagtcttaatgcattatgcatgtaattggttcgtacgtgtatacttgctggtgcaccgcttaatagactccgaatttgactcggactctttgtgcgttggacgcgcgtcacaggtgtgtctttcggtcttgcttgtggtcgcaattgtatgtatcgttgtttttgttttgattgccaatatgcatcattgtttccataatctatcggttatacaatatgaaacgcatatttccacttttattcaagtttctgtttctaagacacacactgtcttattcaatctgtttcatgtcaacgtctatgactaggttctatgtgttataaataacttgcaacttcaccaaaaacataatacatttttttttgacagccaaactacatatatatcctgcaaatgataatatttcaaattctaacacaattttacaagaaatttcaaccaatcaatcaaattatttttggtagttggaattaaaattcaccaaaaataaattcgtgttttcattcttaaagaagaaacagaatcgtttagaactgattttagaaaattacgtgattcatttcagtttttgttatcaacatcactagcttcaatcatgcatgggctgagcatgtaacgcaggtagagatgtcaaaatgggttaaaattcatgggttaactcaactcaattcaacccatgaactctaatgagttgaaaattttgactcaaatgagttaatgggtcaaatgagttgatgagtcaattggtttgatgagtaaaatgagttgggttgtaatggttaatgatttcaatggtttacccaattaacccatcaagttttgtaaaattgaattaaaccaactaaaatttctaaaccaatgccaatttaagtttaaccaacacatttaaaccaatttaataaaattaatatttttccaaatttcttaaatatacaagcgatgaaattgataaaaagtaaactcgtaatttttcactaaaaagataaacccgtgattttcccgccaaaaacgtaaatccataattttcccgccaaaaacgtaaactcgtaattttccagccaaaaacgcaaatccgtaattttcccgccaaaaacgtaaactcgtaatttcccgccaaaaacgtaaacccgtgattttcccgccaaaaacgtaaatccgttattttcccgccaaaacgtaaactcataattttcccgccaaaaacgtaaatccgtaattttcccgccaaaaacgtaaactcgtaattttcccgccaaaaacgttaacccgtgattttcccgccaaaaacgtaaacccgagattttcctgtcaaaaatgtaaacccgtaattttcccaccaaaaacataaacccgtaattttcctgccaaaaacgtaaacctataattttctcgccaaaaacataaacctgtgatttttccgccaaaaacgtaaacccgtaaaaagtggaatccgtaaatattttaagtttgatgataatgaattaataatattaattatttattattgttttataataataattaattaaattattatttaaatgggttaacccatttaacaattcaatccatcaaattaaatgagttatgggttgacccaactcatttaacatctaaacttatttgattaagagttgagttggattacccattttgaaacccctaaacgcatacatcaaataacttattgaattatgtttttataggttttatgaattcagtggctcgataatttattaggctgacaaaaaataagttcgactacagcccattagttagtattagtcaggcccattagttagtatcaatcaagcccattaagcaactttgctcatcctccatctttactagattcttcgaccttgcttctcctacctctgcaattctgctaaaccctcacggcgataaaccctaagttgtaaaaaccgtatccatggctgctcttacgcgtaacaagaagaagggttccaattcacagactccgccactgaataagcagactaaggcgtctccgctgaagaaggcggctaaaacccagaagcctccattgaagaagcagaggaaatgtatttcggagaagaagcccctcaaaaagcctgaagtttccacagacgaggaagaagaagaagaagagaatgaacagtctgatgaagggtctgaatcaggttctgatttgttctctgatggtgatgaagaaggaaacaatgatagtgatgatgatgatgatgatgatgatgatgatgatgatgatgatgaggatgcagaacccttagctgaagactttctcgatggtagcgataatgaggaggtaaccatgggttctgatttggattctgactctggtggatccaaactcgagaggaaatctagagctattgatagaaaacgtaaaaaggaggtacaagatgcagacgatgaattcaagatgaacattaaggagaaacctgatgagtttcagctaccaacccaaaaggttacattttcctttacttaattgtggatttgttcatattctggatctctggagctatttgttagctaatcttttctattactctacattgtttaggaacttgaagaagaggcacgtcggccgccagatcttcctagcttgcaaatgaggataagagagagtgagtaacattttcaaattttattcctttttaagaattctggtgtaatgttattattatgattgttttaaatctcctaaggaatcatcctctcggttcttagtttaatggtactaatttgtgtttcagttgttagaatcctgtcgaattttaaggacttgaagccaaaaggagacaagcacgagaggaatgattatgttggacagcttaaagctgatcttagttcttactacggctataatgagtttcttattggaactttaattgaggttattccctagtctctgactttactctttatgcttgctttgatctagagttatgtgtaggaattctgttacttatactctttagttgtaatcttctggcagatgtttcctgttgttgaactcatggaactaatcgaagcttttgaaaagaaaagacctacatctatacgtactaacactcttaaggtgaacttggttgtgcattggagtgtctaaaacaaagtatttctcagctgttgtgatatttcaattaatgctgatgtttgttttggttaagactcgaagacgggatctggctgatatacttttgaacagaggagttaatctagacccattaagcaagtggtcaaaagtaagtagtatttgcagattgtcttccattttatttgcgaaaacatttttgtggaccatctttagttgatcctggcataatatttgtaggttggacttatcgtttatgattcacaagttccgattggtgcaactcctgaatatttggcaggattctatatggtacttgattttctgattttttttgtacttttcggctcacactttatgggttttcttattgtttacttaagtatgttcttggtacattttcagttgcaaagtgctagttcgttcttgccagtgatggcccttgctcctcgagaaaaagaacgagttgtggacatggcgtaagtcattatcttacataaatgcactatatttgtgtctcagataaatatatatatatatatatgatgaccaagcagtaccttaatctgatattcaagtgtagcttgtgatatgtatcatttgttatgattgttgtgatgataagtgctgtcaaaacggaaaagccaatttgattgtcccgtgatgtgagacatatgcaactagtatattgtgatatctgtaacaagttcttataccactgcagtgctgcccctggtggtaaaacaacatatgttgctgcactaatgaaaaatacaggtatacatatattggttccttattcctccagccccataattttagtcagttatatctaatgttataatgtttatataaccaggcataatatatgcaaacgagatgaaagtacctaggcttaagtcactttctgccaatctacatcgcatgggagtgacaaataccatagtttgtaactatgacggacgagaggttagtttcttgaacctttattcttctgttgacggtacatgcttgaggatgttaaatattgcaaactggttgtaaaccatcagctcaaccaaattgaaaaattactggcaagactgtaattgcaccaaataacaaagttttaaagacagcttctctattattcccttgcattttttatttatctcatcttctttgcctttcagctaaccaaagttttaggtcagagctcggttgatagagtattgctggatgctccctgcagtggaactggagtaagaaagtttggaccatacactcttatagtcttttaagtgaatttctctgttcatagtttaatgtcacttctacacaatgcaggttatatcaaaagacgaatcagttaaaacttccaaaagtgctgatgacataaagaaatttgcccatttgcaaaaggtatgttgttgccttaaacaatatcaactaaaacattctttacatccaagacaaatatttaaacatgaaaatggcataaacgccgtttataccctcttactgtgagtatataaagaaggatgcatttggtatataatgctaaccatactctcttcttttcttgcgcatagcaacttatacttggtgcgattgatttggtagacgccaattccaaaaccggtggatatattgtttactcaacatgttcagttatgatacccgaggttggtgaaccatactttttctgttccactatttttttttcctggcatcttcatgttttctcactagttctatttgtacaacaaattatgcagaacgaagctgtcatcgattatgctctgaaaaacagggatgttaaactcgttccatgtggacttgattttggccgaccagggtaatatacattttcatctgcattgaaaaatttcatgattcgtcatctgaacacaaatgttttgctgcatatcttcagatttagcagttttagagaacaccggttccacccttctttagagaagactagacgtttctatcctcacgtgcacaacatggatggattctttgttgcaaaggtatacacttggttaacctatgaatagcttttccctgcaaaacagatgttttataaaatatgaatagtgattaaaccaacgaggtatttactttttcctttctttgttctgcagctgaagaagatgagcaatgcaatgcagccttcaggaaatgatgagccagctgtaacaatggagcaagctcaggtgtcgtctagtgatgatgatgatgagaaagctgaggccattgaggagttggagaagccacctgttgccagtgggcaacccaagagagagagtaacactaaagaagacacgaacaaacgaaaaaatccaaggtcaaaggaaattcacaaaggcaaaaggaataaaaacacaaaaaccgaaagtggtaatgtggaagaacccaggaagcaaaagaagaagagatcacaatggaagaatgagattgctcaagctaggtaaaaaaactaagtgtttccttgacagacaaaagagaaaaccttcttatgtacattgttgtatcatacacccatttacccataaatggttgaatatgttgcagggaagaaaaaagaaaaaccatgagagagaatgctaaggagacgccaaagcacaggggataagaataggtttgagatcgtgatgcatcttgaagagtagaatatttcggtgttctggccatggcgaaggacacaagaaaagaggcttcattggctgaggccaaggtatctatacaatggctttctagttttgattaatttactgcgtaaagaaagggtgacacccacatggattagctgttacatgtccaaaagttttgtatcaatcacataacttgatttttgtgagaggctgtttctattttccgttttcaattggagttgtaaaatttattgaaaacaaaaacgagtccctactttctctcacaagtgtgtttgaaaggctattcatttttctgctcctagcaattatttaataaaatacataaatcttggagggttgggtccataccaccacataaggatagaatttctcatagtattgatttgacgaaaaaataagggaattgggagtgagctggtcattgttagggagagatgtgaaggttttctgaagtgggacttgagtgttggagaaacatgacaatccaattcaactcttcttcatccatctttatcagattctcctccgttggggaccttacatttacttctctcacactaatcttcttgtttctatttttagattataagcccatattataactgctagtgcttgtagccttgtatacacaaactcacatgcatcacatataacatcgtataattgctgtattcactttatatttggatatccaagattatagaaaagagattcctttgcaggacccaaaagatacagcttttaaaagcaaatgagttcattttaatttcttgctaaccaaaatggtaagtaattttgtggacttatggtatggataaataacaaaatctcaataaaccattgaaaataggaaatcaaaaaatatatttctgcatataatttgaaaagaaaatttgcatggaaataactatgtttttgaacaaactaaacatggaaataattattaccgcaaagtacaaggcattacgataagcatccttgaaagctttgtctttttttttgggaactcgaaagctttttgtcttccagttgtaagaaaaatacaggaaaaaagaattgaaaagccctaaataaaaaagtcgaaaactttagctttgaccaactctttcctctcttttcatggtagacccaactctctcatttcttactctctgattcatctctctctctctcttcatttccatggaaggaaggtgatgagctttctcaatctctctttactgattcttaatgaaagtcatctcctttctctttggtatcccttttcttcttctctgcttaattcctgaccaaaaattgtgacaagatctttcaatccaaaagctatatacattaaggtaacgatttatgaagtatttctcctcaatttcatttcttttgtttctacgagtctgcatagatccagaagagctttgcttgattgttcttactttcctgagatctgtttaaacttagcaaaaaaaaaaagtctactttgcatgaaatgtgtgattagggtttatgctaattttggttaattggagaatcagagagtgttccctgatgtggaagtagtgaattactttgggttgagtaaatgtatgtctctcaattgattgtcaacgagatttgagctcgagatccgtaaccaagttgagctaaagcttctttctttcgacttgttctctatatgaaaattattttttctttgactcagttatttttcttaatttgatttctttgagctcgatcttatgattcatactgcaatgattgagttgtggcatcagctctgatggtatcttctgtttttaaaaaatagcaactttttagtgtttttctgctcagctctatgttaaaggatgtttcttcattacggggagaaatgaatgagagctcttgtttattgatcttcccatgattctagttctaaacgagccttctgttatctgaatttgaagtgttttaagcttttttattctaataagccgtcttcttctctgacgctatgttttgctcactgcagagctcaggtcactatctgacgggatccgtgacaatagtggttactggagtcaaaagcagctccttgaatcttgagtgttaagtagataggtaaggtaaccgttcatggcctcgaagtatggttctggagttctcccagaaaataagaaggaaaagggcgataaggaaaccccggaaacatcttattccagtcaaagtgtctcagtaaacactttggcagatcaagtatcttcaactttgtcttttgctccaagcagcgacagtaaaactggaggtgaagttaaatttaatgaaaagtctgatcagagcgggaagagtaacacatgtagaccaagcacaagcagtgatatcagtgatgagagcacatgtagcagctttagtggtaacaacaagcctcacaaggcgaatgacgtgagatgggaagcaattcaagctgtccgaacgaaacatggcgtattggggttgaaccattttaggctcttgaagaggttagggtgtggggatatcggaactgtccaccttgctgagttgcacggaacaaggtgtttttttgcaatgaaggttatggacaaaggggctttggctagccgtaaaaagcttcttagagctcagaccgagagggagatattgcagtgtcttgaccacccttttctcccaactttgtatagtcacttcgagactgagaagttctcatgtttggttatggagttctgtcctggaggtgacttgcatacccttcgacaaagacagcccgggaagcgattttcagaacaagcagcaaagtaaaaacattttgaataatcagtttcatgttttgcatccaagataccactttttttttttttttgttaaaatcatattggctttgtttacattttccaggttttatgtagcggaagtacttcttgcaatggaatatcttcatatgcttggcatcatataccgcgatctaaagccagagaatgttcttgttagagatgatggacatgtgatgctttctgacttcgacctctccttgagatgtactgttagccccacagtggtcagatcaactgttcttgcgtctgaagggcaaaagaactcgggttattgtgcgcaacctgcttgcatccaacagccatcttgcatttctgctcctacaacatgcttttctccacgttatttctcaagtaaatccaagaaagacaagaaaatgaaaaacgaaactggaaaccaggtaagtccattgcccgagctcgttgctgagcccacaagtgctcgctcaatgtcatttgttggcacacatgagtatttagctcctgagatcatcaaaggtgaagggcatgggagtgcggttgattggtggacttttgggatctttttgtatgagctattgtttggtaaaaccccgtttaaagggtcaggaaaccgagcaacactcttcaacgttgtgggtcagcctctgcgtttcccagaatctccagttgtcagttttgctgctagggatttgattaggagtctgcttgtgaaagagcctcagcatagattagcgtataagcgtggtgcaactgagatgaagcaacatcctttctttgaaggagtgaattgggcattggttcgatgcgctagcccaccagagataccaaaaccggttgattatgagagtgcgcctgctactccagcagcagccacatctactagtgtcaagtctgaccagagtaattatctggagttcgatttcttttgacatatttcagcaagaaaactgccattagatttatcaatttgttcttggcgatctgcaaatacgtttagtattttgaaaatgtgataactctttttaattctttgtcaatgccattcttgagagttcacgctgagatggttttgtgattacctgcaacgcaaagaagcttaaaagccctaagctacttttctaaatcagaaattgcgaaagctgagatattttagcaataacactcggttctaagaatcttgagaagcagaagcagagttaacaggatacatatcatcaaacagttctgacaagaaccctcctttaaatcgaaaggaaaatgtagtttgaaagcagaaacaaaatcacaatgtcttataagaacacaatacacaatcatcttagggctacaaatttcttcgttacaactgtttgtagcaagtataggcaacagccacggaagcagcagcacagacaacagcaagagcagcataagtatcttctcgctcccagctctctaaccatgttggtattccgcaaaccttacgtgtcgaagatcctttgtcactattaattctaaagaaagtcttttctgcaatttttcttcctggtgtcagcttctcagtgttgttttcactttcaagttgattatcttctgatgttcccagtgacaacatcagagtagtgtcgtcttgacaacatgaagagctgttcccattttgttggcaacaaccattaggttctgcagctcgtgactggcaacaggaaacatcggcgttgtgaaccgatgattcttgactcactttcccattgatctttacggaatggactgtaccatttagctgaaatcgcccttcttgagttttcttctgatcttcttctgatagacccatttcacccctaataatcagagaagcatcatgtgtgaatctaccaattaccactaatccggaaactgcgagaaaactgacagaacaagaaaactttgtacgtacctccatagccggtctacaatctcgcctttgttgatgtgctgctccaaaagaataggtacatcttctggggtcacatacccatacctagacacaagaatgattcaatcatcaagtcaaaaacagggtatgattgattcagacattgcagagaacttccaatgtactaataacaactgaagtttgaagataccaattaaaagatcacaaccgttcatgaaaccaacaccattacaaatgtattcttgatcttctcattcaaaattattgtaaaaccacatgaaaaagatgaatatagcctcaaactagttgataaatccgtaattccttactcaccagtgtcctgtgacttccctgttgatgtttgatcggtagatgataacattcccagcgtatttgtgaccacctatgtgagaacatgggctaattgacactttaccttgaagaccatggaactcaagttcttctctgaatctactaactagcgacggcccacaaaccccacatcgccggtctcgggatccatgggaacatacaaagacatatgagcctttcagcaattcaggatttccaggcagccattcaccatccttcacaagcacctcttccacaaaggtctccacatcaaagtgagtcaatctcctgcaatttttgttaaatcaaaactgtcaaaaaaaagtcccaactgttgatagaaaaaacgaaaccaaatctaagaaatctccaactaggaagacttcaccccttacctgtatctgatcatatcaggaaaaataagtacatcaccattggatgtctctgttccatcatgcccctcacatattgtgagtcgagtctacgaaacaatggccaaaaaaaaaaaaaaaaacatgaggcacaaagcaaaagacaatcatgaaggcatcatcatgagactatccgaaaagaagcaatccattacagacaccatttccacttaagttcaccactgtcatagctcaaaaaacggaggtgcaagtcctaagatcccatcttgaagccaatagacaagttattatgttgttagccatagaatcgtgccaaaaatagaaactttgccttatttgacccatacagaaatcccaagagtcaccaggcaagagtttttatgactcattacgaccttaaacagatactttaagtaagccaaaacaagtgaacgcaaatgctttttgcttatttgggagacttattggaaacaatcagacctagatttatgagaatcaagcaatatacttggaaacaggagatgcaagttaacagcgaacaagctgaatcaatggaatcagaaaatagtagagtaaaaagctgacctccttcttcatgctaccctttctggccgatacagcagcagagagtagcctaggcaatcgatcgaactcagcagcctcgatccttgcgggccaaacagatggctttttgtagcacaagaagacatgcctctcgtaaaactgtacggttccagctagttgttccgatcggaaatcaggacgagcgaatccaaaatcagcgtcgttgatgctttctccaccgcctccaccgagtaagctctcgctttgaaaactaccggagcgagaagtgggttcgccgagaaagttgtcgagatagtcagatacagtgactggagacgacgccgtagatggattgctggtgaaggataaagggtcgtctctatctcttccacttcccatttaaaaattcgaccacaagtttgaaactttacagatcgaaactgaaactacggagacgaagaagaagtgaaagtttctcagtgattcttctactgagagaggtctgtcaagtatattccgttactcttattccggtttactccttaatcgatattctattttgcaatcggaccggtacttttgcctttgtgtgtgtgacaggtcttttcgaatctagtacatcaaataagataatagtagctgcagccagaatgataaaagcctggacaagtgttgcttatgcttatagttaaccatgtttagccatctgctttgaattctatgtatttgcagtgtctccattgcaatctatttaggtactctgaatgtaacaacagcaattacattcttttggaacttgtgtttgggttgtccgaaaaggggatgtagaagaagagcacagattcttttctgtatattttggtcctgtaagaatacagactctcttcttcatcaatgttaatctttgttgtatatgtttatgaggtaccaattcctacatttcttagactggatttgcgttggtagatttgcagatatgttagagatagatcaaggatacaagatgagcataaattccttctgcaatattcaaagtcttaaagggaatcaagagaaacatattattcatttattaccattggcctccttcaaaccaaaagacataaacaaaagaaaccttgacaatgtctcgaaaagggagcctcacaaatcaaagacaatccaaggaggcttttatgttaaatgctatagacatacaagcaacctatcctttggctatgcagcttcttcctcttgtctctaccaaaagtaaagctgctttacgcagttcagactccaacaacaaaatattacatccacagatttaacttacacatttgccagatgactactaggcattaggcaacagtatctgacagagagactcaatatgtgcgatgtgatcagaaaggagtttaggctttcacctcctcaccaccaccagaccctcctgcttcctccttctctgaatcctcttctttcttttcctcctcctcctcctcatctgctaatttggtgagctcctcttggattatcatctttatagatgactttcttggagtgagatcttctgtgaactccttagctgaaagatggatgaaacaatgtgtttattttatatataaccaggaatcactggaaaaacaaatgactgaaaccaatctgttcataccaagttctttaaggatgtccgtgaacgtagcctgcagaagaacaacaatgctcttattaggttatctaggtatagaaggaaattcacagtttgaatagatattgcacaacaaacttcaaatcagctttcagaaaacgaaggttatttcatgtaaccaataagtttgttcggcagaatccaattttgttttattccacacacatcccaagtagttaagtgtatcgcatataaaaggttgagaaattactcaccgtactaaagtccactcttttcaagatctcaacgattgcatttttcagcactttatcactcggcttgtctttcccttttccagccctttttacttttagcatatagacacaaacagagataaacatggtgtcagaaaacattagtggttgtatattggttcgcttctgaaaatgaagatataaggaataagattctccaatgcatctgacatacactacacccaacatgtttttattctacctaagcgaccatcttactggaagaaaaaaacaggataatgaccaaacctggcttctcttttgatgcagactttgaaggagccggggaggccttgatagggttttcagacttcttcctcttagaggacgcctttggacttgtatcactgtcatcatcagtcttctttcgtttggctgatgaccgcttctgtgtaatcttctctggtggactggattttgcagcgaccactgctttcttgtttctggctctccctgctgattctttcttcccagctgacaatctagaaccacgtttcttctttgtagtttcttcttcagaatgctcctcagattcatctttctcctcgctttcagaaggctgaggcgcctcatcctcagatttatcaggaatgccattttcattctcctcctcttttttctcttctttctcttctgccttctcctcctcttgtttttcttcttcttctttctcttcttcagattcatcatcagaatgagctaaactctttttgacaacttttgttgcttcttcagactttttttggctctgcaaaggaagtgcagaataatataatcagattaaaatacttagccagaaacattgacgggttgaccagtgatggacagttgcaaataagctacattgagattacacgttcttttcagagttaataacaagattaatgaacaagcaagccctcagctctaagctatgcattacctttgctgatcgtttggaggatgaactcccagctgtaggtgaagttttcttgggagttctcttgcgttttgctcccttacttgactgtttcaacagaatgtttttaaagaatgtaagatgcacaatagttattaaagcaaacaaaactttcccaacaccacattaccttctctttctcagaaactgtagtgtcaccggtcacatcacctgtcacatgaggtttctccaaaaactcaaacagttttgtaataatatcttcctgtgttgaaaaagcatgcaacaagaagttgccagattcgattaaatggggaaatgaataagcataaacttggacaaccagaaatggctaatcaagctgctcaacaaagacagaaatttaaaccttcacatgtatctattcacagaggaaaaaaatgaatctcaagaacaaaaacttagaaattgataaccataatgaccttctttgttgtagccttggtaatgtgtatgtccaacacatcacaaaactcccacagtttctctttggtgcatttctcaagcttttcttttactttttcttttgctttcttctgcaaataccaaagagccacaattatatacaaagcaaaggcatatgtaaaagcattcattatgtgtaatgttgcacacctcatctccatgccaaacgaaaccagagaagcccaatatgtttgtcttgatctgagcagcctgttaaagcaagaagaataagatacatacaaacatgattagcagacttgctacagcacatgagtccataccactggtctcaaactacaagagtatgcccatgattgacaattttagaagtatgactattggagcagcataatgtcaaaaggatccaaagagacgctcaccttccctctcctcccaccaaatagaattgggtgaagcagcttcaaagtttcatcagacctcttcctcattaccttgttagcaactacagagaagaaacattcaagttatctacttcatttcaacttcaaacaaaaataaaaagatgaaaaaatggaacaataaaggtattttttaggtaggtcgcgattattagattttggtttacaagaaatcttgcttctgagccggctggaattgatcaatgccaagaaaaaaaattcaaatgaagattcacataaccagaaccgaaaagtgtatagatcaaagaatccacccatagtatacatgcaatttaacaactagtagtatccagcacatagaattctcgtaacaaaagaacgtttaggctacgcacacttgaagataataaggggctcaaactgtaaacttggaaagctaacacaaaagacttttcagcacaaggataattcgagatagatgcttgaaggacagatagatagaatatgaacataccattgggaatatctttgagatatgcacctcgcccctgtaatatccaaaggattattataaacatatctagcaataaagttctactcagctcaggaaagttttggcaaaccttttcaacacggaattctttcgaggagtctttatcaatcaatgcaacaagcctctcaacagatttccgctcacgcacagggcgatcagagaaaggagtcctaggctctgcatccttttttacttcctcggttttattcttctcgcgaacctttcctccagaactcgtccctttcccacgctttttagaacccttgctctcttctttttcatcttctttatcatcatttgtctcctctttctcatcttcctttgcatctttgctctccactttttcattgtcgttctcatcctcactcccttctttttcatcttctacctttgactcatccacctcagcctttgccgcctcaacttcctttgttttattttcttccttatcttccttttcttttccttcaacattctccacttgtttattttcatccccattctccactttttcatccatatctgtccctttgtcttcatctaccagtgtcccttcctctttgatgtctcctgtattgccatcttttgttccatttgctttgtcagcttcatgttgtatgtcctccttcccagcttttttgtggtctgcctcagtaatatctgtctctttggtctctttttcatcatctttggcatagttattgtctttagattccacgttttccttcattacagtatcttccactgaaacaccatcatcagtttgctctttctttccatcggcatcttcatccatgttggtagcctctgcttgtccctcatctttggtgacctcaaccttctcttccattttttgagtctcagcattgtcttcatttttcttaacctctgactctttatcttccgtctcagctttttcatcatctttcttaatctgagcatctatctccatattgtctggctcagccatatcctcatctttcgccagttcttgtgtttccttacccccagcattctcctttccagccatagcctctgatggcttttcaagagaagtagtcttgtttgcggttggctcaatggttgcctttgtatcttcccccatattacaaaccagttcagtagatccttccaccaaaaacacttcttgtggctgtgaatgagaaatcagttcagaggattaatattgctacgatagcagaaattaatgctctctataaagaaattgaacaacttgacataaagaacatgtaaaacgcattgaattcacacttagcatatatgcgaaaaaaaactaattccaggaaaacaacatctaaaacttggctagtcaacaataagacaaatctaatttagatctcattattgatccataattatcacttaatcccactttagatctgcagaagaagaactaaatggaaatttcgcgtaagtcactaagaaaccaaaatctcgaaggttcatcatttatcctcgcttcttatacattcagtagaacaaagatccagatggacaaatgaaaccaaaaaacaccctttcattcagacaaatctccagagcttacaccacacagattcagacaaaacacaaacccatcttgaatctctcgaaatcaagtcaatcaacgtcaaattcatgcattttgtcaacaacttaatagcatcagatatcaaaaagacaataaataatcaaaacatcgaaattcacaaataaaagaagcgcatgagaaaccctaacttctcatcgcaactttaaacaaacacaaagaagaaccaaaagaacatgcgaattcaaacaaagctcaaaacataaaagctcacaaagatttaagcagagtatccacagggttctaaagcagaagacttcggaatctcacctcagagtatcacaagactcggcactgagttttttttctcctctaactactttttttcttacaaaacagaacaaatagcttttgtttttctttttgatagcgttttttaggagagagaaattcaaggattcggacgcaaagccagattttaaatacaatttaatgccacgtcaggcttaggatgaatcattaccgtccgatttcattgctgtaatagagttcatcaacggttcagattttatgtttgatgcatctcgtggatcgatgacgctataaactaccctaacgtccggttccgaaccaggtaccgagcctagactttatatttcaaggattttatattaggtttttggacaaaaaaagttaacatattcaatgtttgtgacctatagaaaaatatatttttttaactacaaatttaatttggtaatttttcaatgatatgatagttttgtaaataaattatctataaaattactatataacagataaaaataaaattgatacgtaataattgctatatcggtttaatattaatgaaattgttttacttctttatgataaggaagctaagtttatgtgattgaacaaatgattaaaacaaactctttcttaaaatgtacttctttttaaagaaatttaacgaattcgttgaatgttcaattataattgatttaaacaacgctatattaggtaaaatgatctaattgaatagaattgtataagtgactttaacaaattttgttattttatatttaaatattttttatgatggattcgatccgctaccataaatagcgttgtcaatttttgcaaaaaaattaacatgataatccgatttttacctttccgcaaaagatgaaaatgattcactggtccggtgaaaaaaacaagactattttgacgacgatgattataaatgacttataatgtcattagtttgatagcgacaaaatttttatttgcttaacgggtactatgatctaaaagaatctaatatgtttgtctttaacaacagtaaatgcttcggaaaaaaaaaagttctaaatatgaaattagagattgtaacttccaccaaataatctagatacatgtaagagagaataaggttactgttttaattgccaatctacttcttgcacaaatctcttaattttgtatagagactgtatagtataaccttccaaataattgaacaaagtttaatattgtcccatggtaaatcacctagtcgaagtatttatatctcattattatgagtttttgacaaatctagaagtctagaactaaaagttgagaaactattattgaaaaacgggcaacagttgtaattgtctgcttaaggaccacgtagcttaagtaccgtcgtggtgtttctttcatggagcatatctaattacggtgaagaagaaatagtttgtagtaatattgctgtttcttgtttaaataaaagcattaacatcttgttgtgtatttttacataacatttttggaactcaatacaggtgacacaaacaaatatatatggtggagatagtttgaatcaagatcagctctctgtgaagaaataggaattatatagaacaaggcctcgtcccattcctaacctaagaagatcccgtacataatgttgcttactttttgttttacggacccgattgtactctccccatgttgggcggatatgggtaagatgaattgttcaaggacgagatgtcaccattttgagtctcgttctttgtttctctctggccgtactgattcataccgctatttaagctagcatagtaggatgacatgggactagcatgaacaaacctgaaattgactccatttgggtgagtttggttgacaagttgttgattctggtgctgatgttcgttggaagcgtggttaggtccatcagatgagattccaacaccaagattgaggctgatggtgtctgtttcatctggtctgaaccgaggctggatttcgtgattgctgctagactttgaagtgggaacatcatgatcgtgtttgccttcgtatgttgttattacagcttttggatcatgtgatgctctctccacgtgttttctcactgggcatccatgagctgtgcatttgtagtagctcctacaaaaggccgaggaacatcatgaaacataatatctccattgcgcacatgttgagtctgttaagatcactatcttccatattccaaaccaaattcctaaaagaagcaacactttatgcacatgtcaaataactaggtcctgaagacaaggactaaactgttctagctaccattttgaactcgcaagttatgtttatgtatgttcattcgagaaaaaagcaaggaattttttggggtgttaaaagctttaatgctgtacaaacctgggatttgggttcccccttacgactttctgcccatatttgcgccatctataaccatcatccagaatgtcaacctcactcagagtttgaacaacaacccgaggctcccggatgggtttcactagtggagttatttccatcgcaccctccatcctcctacataaagttaaaataaagttttaatcatgtcaaatcacagattcaaatcaagcacctgaatcctttgttaaactctaatacctccgttttgagaatggatcatcatcgtccggctcatctttattcctatttgacgctgccgcttctccaccatcgtcagatgctgagataggaggtacttcagggttaccagtttgttcattggggttagacaagttgtagacgccagatcccttctctgtatgcagacataagagtagaaggaaaaagttatagatattgccaagggagtaagtgcatatttgtctcaagttttagttatgattaccatctcggccagttgaagaaggatacttgtctagcctttcttcttgtgcagccataccaccagagtttcggcgaccaggttgaggtttaggatggtcatgtgtacccttgtatataatatcggtgatctgcccatcatgagatctttcaaataactttttcacttcacaattaggatgtgtacatttataatagctccggggaaattcactccctttgacatgcttttgaccatattttctccagttataaccatcatcagccaagatggatggagtgcttcctctggagtcattttgggaagtctggattgattcctcttgatcagatccagccggaatatctgagctcgttggtgtcatctgacaaggaggagttggccggcttagctcacttgaggaacctgcagcatcactgatcgaagaaggtgagtgtgaggatccatggccctggccttgaaaatgtactggtggctcacttctaatcttgccaagctctgcatataccttgaaatcaataaagatgtttagacaaagtcatcccccaacaatatacaagtaacttataaactgtgagcttttggatacaaggctccttatgaaacaatttaaggctggcatggtattatatgtatgcaaaggcgaaagattttgagatttacaagcaatccaagcgctgaataaatagacttcgtgcagaaaaattaggtcagccactgttcggggttcatatgtcgtcgactatctgaacagtacattacatgcaaagcataacaaacagcattgttttggacaataccatatttgatgcaggaggtctgaactcaaattcactggacttctgctcagtaaaggtgttctgatggaaccccctgcctgtataagaacttgagctagcagaaatgtgcactggtcgaggcttgaacaaagaaccagtagtaggggaaggttctggctgaaagttaaagaaagtggcatattattaatggcatgaataaaacaatacatatcagattttgtaaaacatgaacctgatctatcaataaacatgatgttttaaaaaaaacagtcttctaaaaacaaaaacaatatcttgttcaatcaagggataagaagatataactaagagatgcaaaataaaattgagcacatagcatataacctattattcataacttaattgaacaaaacgaatactctatagatctaaatggtgaacatgcgagtaaagtacattttctcaccaacagaatcattcaatagctcatataagtaaaaggaatccccacacagacgcagctaaccgaaacctaaatgtacaaagaatggaaaaagaaaagagaagcaccaaacacatggaagatagacactagacagtatgaagaagaaacgacaaagagcaagaggatataaataaagtatccagcaccaatagaacatgataaaaaaaaaaggtttattcgaaagaacaatctgaacggacacaaatgcaaaccaatgcagagtatagtagcacaaagaatcagaatcttggccaaagtccctaacgtaagcaaacaaatcatagttttttaatcacttgtaatggactaagaaacaaaaatggaaacccaagtccaatgtttttcctagtgagcaagcagagagcatctccaccaaattaccagaaattccccactaacatgaacagtgatccaaatcgaaattgaagcaacgagaaaccgaacaagtgggacaaaatgtcaatgttatgaatcaattccaattccaaactcagtttcaaaatggcacaatccaatttcatgaaaaatcctttaggtcttaaaaatatgaaatcagaaaacctaatttctcaaatcgacaacaaaaatgaggtgaaactgtgattgcatttaccaaaatcgaagaagaagaagaagaaagagatagtaaagtagctgcttaaaccttgatgttggagatgaaaacaggagattccaaaaacgaagtcggactcaacccaggaggaatcgtgatatcagtcgacctcgagatcggaagcttggccggtgacatcagcttatacctagcacctccacctccgtttcctccagctgaatcgtgctttgccgtgagatctcccgtcgccgaacaatctccctgaaactccttccggtcattagcttgagggttcatttcagagattcgcaagggtagaacaaaaatgaaggaaaaaagaagctaagggaaagtagaagaagctctcagctatggcgaaatgagagagattttggtctctgcgttagtgaagattgtagtgaaagatgaaagaacgatattgacttcacacctctcttaattctttgtttttccttttcatttttttaataatttattttcttcttcttctttttctcctttatttagctttatcaatttctaaagcaacaacaacaaacgttaaagttgacaaaaacaattagaagatgtaaacaatcctctttttttttctcatgtacatttgtcaaaatgtaaaagataaaaaagttagtgtaatcaaaattgcttgtttaaagagttgttggaaccagaaacatcctaaatctcaaagtaagagtgttgtagcattggtagattgacacagtcagaagcagtattgttgatgataattaaggatcaggtatcaacagtctcaggtcttttaaaacttacctttttgaatcttttgtgcgccaatgatccgttgcttcgactctcgtctatcttatcttctgcgatgtttatcaatagttcaataccgacgctgaaataaatgtatttgctgatttgtaacaagtttctattgtgatgaggccaaatatcaatcgcatcatcgacaattaccactctacgctcatcaacagcaagaagatcgagtgtcttctcataaggactttgttctctggctaggactcgatctccaaagtatatttttttccggatcaatccacttcaacacggtctgagcgtaactagaatcacccattgtgtatacgtgcatgatgaaacgcttgttggcttctaatagaaattcatgaagaaaaggtcgtagctttatcatatattcgctgggagtggatctctgttgattctccacagatctgaccttgaatcagctccttcgattagatacttctgctcttcggaaaggtccgaaacaagtaccgagtggacaagcgtgtggtccaagtcaaggactaggtgaaacttcttcttcttatcatcgttgagacaggccatttttttcttgttttggattttggttgcagagtatgattgttggctccaaacaagtgaaactctgtaatcgaaagagaaaccctaatttgatcggtgataatgaaattgatatgctatgattatgtattatatagagaggatatgtgtgagatatctttgggccgttctcagtttctttcattggtttaaatgggcctaggcccttgagtcaaattacctaccaaattatgtgggagttgaatcgaattttttttgttaaaaatttaagctattggtttatcttgtggggtagcggttgtgttctatttgcgtggataacagttaggatatataatggtgagtggtgacattctggatccaagttggtccacctcaaatcttgttagagaatttttcaaaaaaaaaaaaaaacatgtttctttggttgtaaaacttccaaaatgtgtaaaagataagaagaatatgtgtatatatctctcaatactgttcaatgccgtttcagaataaaactatgtaattcttttctaaaccaacaattgttttacttgtattttaaataattatcaatccatgttttgataaaaactgataattcgaaagtgggtaactcggtaaaatgataaagcaacagaaaatatatcataactattcaaaaatatgtgactagtgaagattttagatagtaattttttcttggtgcaacactcatatcatatacatagtcttgtcatttttacatattaaatttaatgtctagattaacagaagaaataaggaaaaactcgataactgtttttttttggtaattaaaaaactctaagaaaatctagaaacggaaaagtttgcatgaaaatttccaaagttcaaaaaggtgttgtccccttcacataaccacaccatcatcataattttgatcaaacatttgaccaagaaaaaggggtggtttcactattttagtttggtgtacttaagattttgaattatttaaagttcacgatatattggcatatacctcgaagaatggtgatcttgtactcaagtgctggaggagacctttaatttttaggagtgaaattctcttcaatttgcaattttctatttgatcacgttgaagatttcaaaaacattttttaatccaattttgtatgtttgaaattagtcaggaattcggcatatgattaactgcttatacacaagtattctgaaataaactaagatgttttggaaaaaaaaaaaaaaaaaaaaaaagtattttaaactcatattacattttttttcttcgcaaactagtattaccttcttactagaacaagtaaacaactatgggatcaatgaggtcatcgaatgccaaatatgaattctattattggccgtctacaaattaattaatggatataatgcaacccttggatactcataaacatcattatgcccaaaaagaacattagaggtagactttttcctctacacaagagaagctcagctgtctacagatcctatcttctccttctcataattttatagaaaactatagtatatagataaaaactatattgttttaggcgtcatatataagaaatatgcccacgcaagagaggataaaaaaaacaccacacaacagaatattttcccttataggtaaaggtaaaatgtcaatggaacataatattaaaatgattaaatttgatgcaaaaatattattttgtatattttcatgtagggcatatgattctatctttgtgatataaaaagatagcatcgagtacccagttttaaaattatgtcaacgtaggcatatcacaagtgaaaaacaaaacgtagacaaatcaaaatattaaaaatgtaaaggtcttatcataagtagaatgtgaatttgttaatagaaaatatgaaaaagtcgttaataacataaatgtgtataatatgtatcgtgggttcgtatattagatagaagacaagtcacctacgaacaagaaaatgtactatgtagtaatcttggaatattaatgtaatttctctctaacgctcaattaatatataacgttgtcacttgactcactttatctcttaaccattcattttctggtgttttgtgtaccgaataacatactgattaattattatgtatccgtccacttgttcgtgattttgtaaggtaaagtccaaacattttgtaaatagtctgaaaagaccaaaaaaattctaaaacataacgctaagtaattcacctaacttaaattatatgagacactaataatttcggaaactttgatgacgattttagctcaaacattatgtaactattttctaatgtttgtcccagtgattatgatgatatgaatatatgataatttttagatatttaaattatttcaatacttttgtagatagtgattgaatacattataccttacctaattagaaattaactcattcattcacctatagtttttacaaacacattactggtttacaaactcatattattatacgctgatgacatttatataaatcattaaactacaatgtatgttctaaaaatcttccaattttaaagtaaatagtataaaattaaatatatgcataaagtttaaacttagtttgtttccaaagcaaggaataatgtgcagggattcagaactttggaaattcttgtgagtttttttaaaattataagaactttggaaattaaactttagaagaaaatcttcatacaatcataaattcagctacaattgaaaagttgtagaagaacaaaaatagacaatgaaattagtgtttcttcaaataaaatggaacattttcttttgatgatattaattagcctttagaaaagttgtgatactcataaattgaattactcattttttctagagactccataaattgaatttaatctcataagaaatgtaaaatctatttttcaattgtttttatcacaaataaattattggttagaaagtgaattattgagatgaatatatatatatttgtgggaaaaaataaaatttaaaaataaaaaggagctatcatcttccatcatctgtctttagggcctccctctaagtctaacaaccctaaaataaaagattctaacaccaaaagagagaagcaaatctcaaattcttcccctattattatatgtgactgttgttgtttttctctcttttaccatctttggcctgaagaaaaaaaaaaggaatccttcttaatggatttggtaaatcaattaagaaagcattacacaaaataaaaaaggaaagttttttaataagcttcattgagagagagatatagagagagaaaagagagagaggccatattttgataagagaagaagaacccttatagagaaagagaaagagagagacagagagagtggatggatgtcttatagaatgaacaaaacatcctctgtttctcttgtccttgtccctttttccagatcttaaggttttccacattttatcatctgggtcctctccttaatggtgaattctccatctttacaagtttgatgtttttgttcatcaaatctggcgtttttttttctcttctaatatatattgtctctgctcattttccgtttctcttcccattgattgttctgtttcatttctgttttttttttttcaatagttttgattggatgctttgatgatccattgtcagatttgaagacactcaattcctatttgatcggggactagaatttggattctgtttcagacaaaagtagatttccctgtctctttcccgtttgattttcaataagatgaatccggaggtaaaacattgaacaattcttcataaatctcagaactttgagcttttttgaatcttaaaacacgatcgaagtaaaaaatcgaattgttagatgaaatgggcaatcgtcattttcgcaaatctgatccgtatttgtgagatcggattcattggatcgactttggggttttgcaggagcaaaagatggaatctgcatcggatctgggcaagctcttcattggcgggatttcatgggacacagatgaagaacgactgcaagagtattttggcaagtatggagatttggttgaagctgtgatcatgagagaccgtactaccggacgtgcccgtggctttgggtttatcgtttttgcagatccttctgttgccgagagagtcatcatggacaaacacatcattgatggccgcacggttagtattcttggatccattgcttgacaattcatctaattatcagtcttgagtaatcgagtgttctaaagtctcgatctttctgtaatgattctgtcttagaggtcttattggtctcgctgctcgttaatgagcaacggattgttctataatctcgatctttctgtattcatgctctcttagagatctgtttggtgtcatccattaatgagttttaagcagcaacgtttagatctttctgtaatcatgctcttttcgaaatcttctgttgtcattagcttctggatttgctgttactgttataacttgtgagaatgtgttgttgctttgtgttgaagtggcaatgttagtgttagatcaatgagaaaagaatgaaagatctttttttatttctttgttgcaggtcgaggcgaagaaagctgtcccgcgggatgatcagcaagtgctaaaacgacacgccagtccaatgcaccttatctcacctagccatggtggtaatggtggtggagcacggacaaagaagatctttgttggaggtttaccgtctagcattactgaggccgagttcaagaactactttgatcagtttggtacaattgctgatgttgtggtaatgtatgatcataatacacagaggccaagaggctttggcttcatcacttttgattccgaagagtctgttgatatggttctccacaagacctttcatgagctaaacggaaaaatggttgaggttaaaagagcagtgccaaaggagctctcctcgactactcctaaccgaagcccacttattgggtatggtaacaactatggagtagtccctaataggtcttctgctaatagctacttcaatagttttcctcctggttataataataataatctaggctctgctggccggtttagtcctattggtagcggtagaaatgctttctctagcttcgggctcggattgaatcaagaactgaatttgaattcaaactttgatggaaacactcttgggtatagccggatccctggcaaccaatacttcaacagtgcttcaccaaaccgttacaactctccaattgggtacaacagaggagactctgcttacaacccgagcaacagagacttgtggggaaacagaagcgattcctctggtccaggttggaacttgggagtttcggttggtaacaacagaggaaactggggactttcttctgtggtgagcgataacaatggctatggaagaagctatggggctggttctggactttcggggttatcattcgcgggtaatacaaacggttttgatggctctataggggaattgtatagaggcagctcagtttatagcgactcaacatggcagcagtcaatgcctcatcatcagtcttctaatgagttagacggcttgtctcgctcttatggctttggtattgacaatgtaggctcagacccatcagccaatgcctcagaaggatactccggaaactacaatgtcggaaatagacaaacacatagaggtacactcatcgatgtcaaacttttttccttttgcatctcatctgctacatttatttttgcctgttgaaaagtaattagattgattaacgttttcaggtattgaagcatagaaagaaatcgacgaagagaagtgagaattgtagatcaagaagaacagccatttccgttgcagagtttgaagagttgttatttcgatatcaagtagagaaagaaaccaactttcttcatcacagtgagtttcttgttttgtttttttcgtcgttagcatcacaaacacaaaaaagagaagtttatttttactttaaaaattcttacataagataagatcagattggtagctgcaaagatacaacatggatgataaaaaaagatttggtttcgtctccatagcaataaccagagatcgttgattctcgatcactattctttaggtttctctccttcttcttccatgatttcttgatgttgtgtgctctgtttgtaactctaattgttaaaattttttatgttacagattttttttttcttttggtttttaaactttggattcgaattgttcatgggaacttttggatttttctattagcgtgagagaaaacacattgtgcaaaaggctccaaaatgattattttgttacatttcatactttttacctttgggtttcttttctcttctgcttacagtataatctatttattaagtacatgtggttaattcatgattttaaggtaaaaaagtaaacaagcttatcttccaaattggatttgtttccaagaagacattggggttgttaccaagaatttgagaaagcctgaattattggatcctttgactaaaccaagacacatttgggtccaggaagtgacaatcacattcacacaaataattaaccaatcttaaaccatgggacattgtgattaagagctacaacatcagttgaacttgaacattatgagactacatcttgagcattagcactagcattggaagttaatgggcttcaggcccactaagtaagttttcagcctaagcaatatcttcaataatgattttttatttatttaggatatttacttttaaaaatgtaaaaacaaaaagacaataaaagtttgttgacaaaagaaaaaaaggttcaaaagtcccaacggtcgaatcgaaattcagacagttcaaaaagccgctctccatctccttctctcttacagaacataatcagatctctcttgctctctcaccctcactctcactctcactctcattgtctgaaaaccatgaagtctccggcgatattaagcgagaacaggttcctaggcagcattacaagttcttccatccgaaatctgcttccaaaatctatctcagggaagcagaaaccaatcatccaaaacccagatactaagattcccagatccaacgacgagaacgcgattcctgtagatccaaaccaaaaggctagcgatcatcacaccgctcttcagttcacgaagcaatctgactcaaaggatggtaatttcggagagccaattaaggtacttccataactcaaaaaccttctaaatttgctttgtagttgcttaagcttgtatgatcagttatagtatcagagtggatttccactaattacagagagatcctttggaaacttttaacaggacaataaaatgggacaaagcacttttgctgaagacaagcgcagtcttctggattcaccattaaaggttgaatcaaggagtatactttctagaagaaccaattcagtgcctagtgaaattaaagaggaagatgacgacgactcattgggtgatcagattcgtgaactaaaggtcttgttttttgttactgtcatatagctgcaaatatcatctgttacatatttgatgtgagtttgttgtatatactgacatttgaggaatcaatgttttgtaatttggttggttacaggaagagctcataagaacaaagtcggatgggtacaacaaagctgatgcaagtaagagtggacactttgcacgtgacagtttaagtcaattgagagtcagtatcaacaaatctttactcatgtcgtgtccaaaaagagatgaatctgagggaaaagaggtgatcgtggatggtgaagatgtgctggaattgaataaacatattgagaagcttcacggttcttatgattctgttcactcctcatttgcaagtgcttcatgctatgaagccgactcgatgagtggagatgatgaggatgtctgctcagaagacttggagaaaccaatgcatggaaaccataaagatgttgactttgtagataatgatccaagccagctcgacaatgttgaattcgatacaacgggtagtggcatttcaatcagatcacagcttcctagttgcgttctagaagagccaattttctcagaatctccaaagtttaagaatgttcagaagagtgtagctgcatcgacaaagttttcagcaaatcctaggaatgtgtctgaaagctccaacattggagacatgaaagtcaatcagattagcccgtgtatgtcaaagaaggtttcaggtcctacagattctctagctgctagtcttcagagagggctgcaaattatagactatcaccaagggagctcactatcaaaaagttcatctgtttccttctcttttggccatatggcattgaaaccttgcgcagaaggtgagaatcttaatgcttcagtccaatcttttagaaaagataaagcttcagaaggtggattgtcgtcgattctcctatgtctttcatgtagaaagaaagttgaccaagaagctgaagtatgtccacaaaacctgagatatttgcctactttctctatagctttaattttggtaattctgtttcgttacttatcttataatctcttctatatcaggtaacagaagaagctggttcaaacgaaaaacatctcaagaacatgtgtatggagcaagcagctaaaattgaggagctaactctcctggtaaaaaccttgtaaactttaaagaatattagtgttataaaaccttgaatcagattttcaaaaattagttttgataattcttaacttagaccaatatacaacatagctgtggaagagcctgtgaagttaccagttgagtttcattgacgatatttgacaagaatggcaatctaaattgaataaactgtgttgtggccttgtttgcagcttaggaaatcagatgatggagaagatggaacagagttcatcaaagaaacatatgagacgaaacaaattagtgaagagtttggaaaaacaaactttgaggtaagtgaaaaggaagctcttctcaaggagattgcagacctaaagagcaagctgcagcctactaagtccacagacaatctgagatcctcgttactactacgatccattcaaatgcgcaaaagcattgatgttagcaggaatggtgagaacagtgatgatctagcgaaagaaagggagatgtggacagaaatggagagtgagtggatatccttaacagatgatctcagaatggatatcgataaccatcgcagtcgagctgagaatctagagtttgagctcaagcaagagaagctagccactgaagagttgaatgacgcgctcactagagctgtgcttggccacagtagattcatagagcagtacacagagctgcaggagacgtacaatgaacttggggagaagcacagtgtgatgatggctggaataacagatgtaaagaaagcagcatccaaggccgctatgaacggccgccatggaaagcgttttgccaaagccttttcagatgagctttctgccatcagagctgagaaagagaaagaaagagagctcttgaagaaggagaacaagaacctaagaactcagctgcgagatacagctgaagcagtccaagctgctggtgaactacttgtcagacttagagaatctgaacaggccttacaagtctctgaggtaaactaagctcattcataagatcataacactctcatgtggaaaatcttggtttcattaaatggctaaacttgaactcaaaccatcattgcaggaacgattcagcgtggtggaagaagagaaagagaggctgaagaagcaaatggagcaactaaagagcaaacacaagacagaaatagggacaatgaagcaatacttagcagagagtaaattaccaggatctgcattgttgcagccatggtacaaagatgaggaagatgaaatagaacaagtatcagaacatgaaaccggagctgtcagtttcgatgactacgaggatgatcaggcttggagagcagagtttggagctacatatcaagaccaccattactagtctttgtttcagacaaacgacccttctcgggtcatttactatgatcctccttagtacttttgtactgttatctttcattttgttgttctattgtatctgccattattgaaccgctaaaaagatttgtaacggttggaaacatttttacatgtattgattgattcatcttttcctgaattccagtgaaattcccagaagaacagaaatctaactgaaaccgcaagaacttactgtaagcccaattctgttaatgataatgttaaatgggctataaaatgagccccgtcatcagccgctgaagtgaaacgcatcgtttagtatcgtcgtcttctggggaaaatatctttttttttaaacactatcaattcgactggaaaaaggatatttccagattaggtagagagagagcaaaagtactttcattcagacttcagtttaagctatggcggcgaacgattcttcaaatgctattgacatcgacgggaatctcgactccgattcgaatcttaacactgacggtgacgaagcgaccgataatgattcctcgaaggcattggttactatccctgctccagccgtttgtcttttccggttcgccggagatgctgctggtggcgccgttatgggctctatcttcggatatggtgctcttcttctttctattttgtttcttctattgcttggttttatctgctattgctttactctctgatagtgaattgagaattactggcaaacaattgagtttgtactcttttcttcatttaagttgatttcaaaacatgtttcgtggataagggtttgagaaatcatagttgttttagcagactagccttttgagttattttcaggagtaatctagatttaggggattcaacattcctcaagtttggttatgttttgctcctggaagctatagaattgaattagcttagttttcattaaagagcgtcaatgtgataagattggctactgatttgattacgatgatggaattgtgaaatattatctcactatataagttgggattcaggttcaggattgttcaagaagaaaggcttcaaaggatcatttgcagatgcagggcagtctgctaaggtacccctcatctttatgctatagcatatatatgcttattgttccaagaaactgagtaatttgctaattttttgttcaagacttttgctgttttatctggagtccacagtttggttgtttgccttctgaagcaaatccgaggcaaagatgacggtgagactcttcagattgcttccttcttgtgtaaatgattagtttttacatgaacttgtaatctctctcctacttatattgcttttgttctttttttacagccattaatgttggagtagcagggtgttgcactggtcttgctcttagtttccctggtaatccaaatccattatgctcattctgatttctactttggcgttatgtatcatatcaaagatgcaatcatcacagagaggagagctaatagattctttcttatatggccttttttacaggtgctccacaggctcttctacagagttgtctcacgtttggggcattctcttttattcttgagggactcaacaaaagacaaacagctttggcacactcggtctcgttgagacaccaaaccggactgttccaagatcatcatcgtgctttaccactctctcttgctctcccgatccctgaagaaatcaaaggagccttttcttctttctgcaagtccttagctaaaccaaggaagttctaatctcgtcttattattctccctttcttgtgtcttaggctctctctatgtagatgtaaaattttcccgcttttgttgtactttgtgagacatgttttgtgaaaggctttttgcaagagccaatttgaagagaaaaagagttgtgtactttttgctttattgaatacgatctttactttagactttactacttcaaatcaattacatttgtatatcacgttcttaatttcgctccgaaaaggtaagacaatgatcacaattctccaatgatattaggaccaaaactttgtatctgaaaccagttacagtaatttcttatgacattgtttctttaaggaatctcaatgtaaatctgaaatcacttgccttgtttctgcctgaggcgttctttgacaaaatcattacgggctttagtacgagcttgctgaggagcaacgttgagatacgaaaaatggattccaatggcgaaaagagcagcccctgaggcaaaaaatgccaccgtcattgccagttttctttgtgaagatggatagcaaaacgacatcctcaaagctatcaactcttcgtttgctacaaattcaaggtttctgtgttcaataaaacaagatgtaatcacacggaaacgaaacaactaggaagagagacgagacacaagggtgaaagaggagaaactttctaagacacatttcatcgaacagtttgtgtgcttgtctatttttcttaaaacctcaaattcagttgctataaattgcacgcttattgaaacgagttatgtagtaatgagaaaaactgtacctgttttttttaaagttttaaccataagaggggaagtcccgagtttcagcggcaaaagacacgtacggcacagtacgaggattcatagatcttcagacagcagttaattaactaccttcgatgatgttccgacaaatttggcaaagacacgctttgtagtaaaacgaatcagtatgcatcacaatggggatgtagctcagatggtagagcgctcgcttagcatgcgagaggcacggggatcgataccccgcatctccatattttatgttgatatcatttttcaagggcccatagaaagcctaccaaatgaaaataattttaatttcaaattttgttcatcgtttaatctctctacctccttctccggcgacaatctgcgtgactccgttcccgaagctatttatcttattggaattctctgctcggattcattttctgctgtaacagtctcttgtgaaatctgcttttgttgtaaatcacgatgattcgcataagcatcggagttaatcgccgtctgcgttatcaattctcaagttttgctggctacagtggatctgaaaaccctaggctctttaaaactctcggcgctgcaaacaccccgattcctcacagaaggaatcctgaacctaaaggccaagatcttgatttcgtcaatgttgctcatagccacctgattcaatctgattgggataagctaaataagctatcagaccacttggattcatttagggtcaagaacgtattactgaagatacagaaagattatcttctttctcttgaattcttcaattgggcgaaaacccgaaacccaggttctcactctcttgaaacccatgctatagttcttcacactctcactaaaaaccgcaagttcaagtctgcagagtccattttgagagatgtacttgtaaatggtggtgtggatttgcctgccaaagtatttgatgctttgttgtattcgtaccgggaatgtgattctacgcctagagtgtttgattcactcttcaaaacttttgctcatttgaagaaattcagaaatgctacagatacttttatgcagatgaaggattatgggtttcttccaactgttgaatcttgcaatgcttacatgagttcattacttggtcaagggagggtggatattgctttgaggttttacagagaaatgcggcggtgtaagatatctccaaacccatacactctcaacatggtaatgtcaggttattgtaggtctggaaaacttgacaagggcattgagttactacaagacatggaaagattgggttttcgggctacagatgtgtcgtataatactttgatagccggacattgcgaaaagggtcttttgagctcagctttgaagcttaagaacatgatgggaaagagtggtctgcagcctaatgtggttacttttaacactctcatccatgggttttgcagagctatgaagttacaagaagctagtaaggttttcggtgagatgaaagcggtcaacgtggctcccaacactgtcacgtataacacgttgattaatgggtacagccaacagggtgatcacgaaatggcgttccggttttatgaagatatggtctgcaacgggattcaacgtgacattttgacgtacaacgcgttgatatttggactatgcaaacaagctaagacgaggaaagctgcacagtttgttaaagaactcgacaaagagaatttggtgccaaactcgtcaaccttttctgcgctaataatgggacaatgcgtgaggaaaaatgcagaccgtggttttgaactgtacaaaagcatgattaggagtggttgccatccgaatgaacaaacattcaacatgctggtttctgccttctgtaggaatgaggattttgatggagcatctcaagtgctaagggaaatggtcagaagatcaattcctcttgattcaaggactgttcatcaggtctgcaatggacttaagcatcaagggaaagaccaacttgtgaaaaagttgttacaggagatggaagggaaaaagtttctacaagaatcttttaataactgagaagcagaaggtattaaccaaaaaaaaatcaatttcttttattcagtggaaaaagagattgatcgtgtttataaaggatacagtctcataaatattataagagtatatgatacaacaacaaatgaatatctcaaatgaatccgagggaaagtcacactcaaagaataacctgttgttttttggacagaactagaatataagcagacgacatgcatagagaagtcgtcactgcaaataaacagaaggttgtcacgaagactcgctagcggaaaaattttatggttctggctgttaagatttgactgagtcacacacagggaaatcttacgagggtggaagacattatcaacagaggagatgagatcaagggttgatcacagaagtagaagagaggcaagaaccattgcgaaaacagaaagtagaagagatagagtgattcgggtttgtccactaggtgcttgtgcattggttgatggggttccaggggatgaggttggggcttttgcggtaaccggaggtagtggtggctcagtgacatcagcatctgtgaaaaccgggtttggagcttcggctggaggaaaggcagtaggactcacaagggttaagagggcaccgggttgggcaggggccatgtaaggtatagtttcttttctgcccaaacatagattccctgcagaagagaaaaaaagttaggcattgatgtaaataactttgtgttgtgagacctttggtgcaaaatttggctcacttacttttgtatcttgcagctgtaaaagggaactcggtgatggttccatttataccggctccagtgatataagagtttatctcaacggttgcatcagcaaagaagtcatatggttgagataaaaactcattctgaaacagttccacataaactgggagctgagacttctgcagcttctccacaacattggtttgcgttgtgatgaacgactgagcgacaggaaagactgataatttttggatcacaacagcatcagcgaatttctttatgtcttcaatagcagagtcgagaatatcacggatgttttcttcaactttgtagacagtctcgtactggctctgcttcttgaagtcaactagaaccgagctgtttgttgactgaatcatgacctttgtggctgtactattgctgtagccagtctgtgtgagtgtatcaagaaccgctttgacaacgtcgagcccttgctcctctctcaggtatgccgcattctgggggacataaaagacaaacatgagtggtgtggccattagaagacagtcacggtctgattgataaaatcgtaagactaagaggtgcacaagtgctcacctctacactgatcaaaacaccggagagagaggtggagttttttgccaagcttaggaaatcagaaagtgagaaaagcttcccagcatttttctgttttggattcctaaacaggctggttactctgtaggggtttgaaatagcagctgcaaacaaaaaaagattggagaatagttattgtaactcttaagttatgtatcctctaaaggagcctgtatttttgacccagacatttgcatctatatatgtaatctcttttaagttactagaaatagcaggaagaagagtgtacaaaacagaccaacatttatcagaaagcaagtagatagcttgaagacaaacttacgagtcaaggtctggatctcagcccatgtgagactgaaagtgtatattgcaccaagtgagcccaactcaggaacagttgttgaacggtttctgaaagcagttagggagaccgtcgtgctgttcccgagatcgatcgaacttaagcaaaagggtgtaccatcgctggacaattggaccgagcaatcgattacatcagcaccatctttgattgccttcttatatgccaagtctgtacatccaggatagtctccactcgcaccatctttggttataacaagaaaatccactgagacaagaaccataaagtcaattactggttcttcattaggttatgacaagtcatggcaagatacaaagcaaaataatcaactcccataccttgttttgtagcgtttctgccaacgtgggagaagcaatctgaggaaaatatgaaaacaatgactcaattttgagtatttccagcaatgttttaacgagaaaatgctttattctgtagacgacactttgcttaccaagggatgcagatgcagttatgggaaaatcagagagcacaccatcaacagagaagttgccattgtccacaaaagatagatactcagagactggatcgaaactgtagtcgtgtgcaatatcaatatcatttgcaaaacctgacacaaaaacttctaatcctgctttgtgagcatcttgaaccaaggatgtatgaggaagcaagtactgctggtcatcaagtggcaatatgtaagacttggggacaagaatccctgaagcaaacgtcttgacaaaagtcaagttactcaagatagagccgtaagttctgtttgtcgttggctcgaactcgtcttgaccaagaaaccggaacacaagacttggtccattacgcccgaaccgaccagcaattttcttaaagaagttcacttcaggggaagagatgaagtcaatgagaacagtttttgaagctgcaaccagaaaactgctcatgctcaaattgtgctgcgcgtagaacgcatcgtgctgaacatttaaccagaagaatgatggtttcatctgcgtggatacgctttgaaccgtcataatcgggttagaattaccatcgaacttttctgaccgagataaaatacctcggatcactgcaacacgtgaaaaacacaagttaaacaaaatcctcattacaaaaagcagtagatagagccatggacacttacagttaacatctttgagatctttcaaggagaaatcaatggtgaaccaaccggaagtaggaactccgttaaccgggtaagatttttgtcgagtagggtaaacagcttcaatagatgaagaatttctcattgttaaatcagggaagcaaataccaagagcatctttggttagctgaacatcacaccatagaacagcatctggtacacttgtcagaattgcgaaattgtaagcatcgtaactcgaatctgggaacaatccagagaatccaccacgagctatcacaagaggaggatcacctgagcacgaaattcaagaaagtgaaaaattttaatacagaaaaaaagagatccaaagtaattctatatttggaaactgtccacaaatggctaaattctcacaaaccaaaatcaaatggagaaaccaaagtgaaatttactatctggaaagagagaaagtgagagaggacataccagtgagcgttggccatggacttttaggttttttactttgagcatggatttgagcagcaagcagctgaatcagaataacaccacagagaagaagcgatgaagctcgtaataaccctcgcattgttggattgtctgccgggaattcgttctaacctgccttttagcttcccgccggcgacttcgccggagacagaacgaaatttaagagagaaagagaggtggagagagaaagagtcttgttattagttctggctatttggtttgtgggattctcatttatacgatcgttgattaatttaaattaagtatagattatcaaaaaaagtctgatgattagtttctttcttacaagttttttatttaatattgcagtctaccaaaattacgcgtaatcacgtattttgattttgtggaggaggagccgagattttggtcgggtcggcttcagctgatgttgttgttgacctctttgttcctcggactcttaatttcaccgggctttgataattcccatatcaaaaatagttaaccctttgtgattatataagtcgatcatcaatacaaccacgtacgtataacaagaacttttataacaaaaactaatgtttatggtatcgttaactttttgctttatgcttgaaacaattactatatttttactgtaccactacgtacaacaaaaactttaaagtacttgtaagaagatcattaatatggctaacaattggggcccctcactgaaatgatgaagacatgaagttgtacctttgcatgcattggcattcatggttataatatcaaaagaaccaaatgaaattcgttttgatttttatttttttaaaagcgttttggtcatttattcacttaaatttagaaatctgaaccaaccaattggttaaagctgaaaaatgtatatccttatgtcaaaaaagaaaagaagaaaaacagagtacttgattgtctttactacaaaagaacatattaacaacattcacaattttgtgtctatattttagggtaataaaatgggtcgaactaagaaaaaaatattagtacaaatctacaatgctgggattatttggtatgacatcattaagacaacagaaaaagagaaaaatcttttggttgtcggctcggcgcagcgccaaattaaacagcaacaaagtggtgaatgaataataaacagctacagagggacccacaacatggccgtcatgacttatctgtaataatacacgtggcgaatatctatttgtggtcagtcatgacatcagttcaaacgcgcaaaccagtcacgtttatacgtgggaccgttgtttgctgtaaacacccaaacataaaccctaaacactttcgacaatttatctttcttttttgcaaataaaaacatttcagaaggaacgtttctcactggatgctgatgttgatgttggaatatatgttttatttgacttttaatatacttatttttacttggtcaacttccaatacctgtcccttatttaattaggctctctaatcatatcattgacctctatcttgtaaattatacgtttagggtggttcatttttgtattgcatttattttctcagttatatttatcaaatcttctatatatgatggttcagtcgattcgagattcgacgaccaacatacctggctgtccattaggattattaaaattcaattcttgccaccctaaattattggaaccttacaaaacatatactagtatataactatatattgtcacgatacacatgatcgcgcggtttaaacaagatttaactttaaaactaaacgatattttttggtattttgtgggaaaaaataaaacaagatttggagacaagattttgtcctaacgataacgatgaaaaaatgaaatcaagtaaactggaacacatacatttttccaactacgtactaaaaataatgagcattttaatactatatagttgccttttaacactaattaatttatttccgatttatgtatatctggtgattcttgtcaaatgtaaaagaacgtagatatctatttctttcattataaaggctcgactctcctatatacatatagactcatgactattgtctgttagctagatgtacattatataatatacacatgaataaacatagatgtagtttacaaccaagcaaacgagactaatttcatattttatactaccttttttataacattagcgacaaacattcagttaagaatttatataattttgaaataattgcttccaaacaaacacaagttgggaaataaccactaataaaaagttaaagaaacatcatacacaaaacttgaagttgggcatgtgcatgtgaaggaaattttttatactttatagacccttttttgtcatcatttacacttatagatattatagagtgagtgtttgctcaaaagaaaaagttattaaagagtatgatcatttgcaacatgttactgacatttccttcttccatattttgtatagtttttttatttattttctcgatcgacaatgggccgaaagttaccacagatatgagagcttgagaacagaataagatcttcaatatttaaactaagaaaatgtgaacaagggctccacacttatgttctttgttctaaaacacgtaggcaaaaggttccctctaactctctaagcattttagatcaaattgtcatctatgaaaaacaaagctcaaaagacgctttatttggcttgaatcaacaacatatttaggtacttcttgtcacaagttttttagaatcacatgtgctaactacatacaaggacacaattacactatactaatactacaactgtttgttctttgggttagaagcaacttagtacgttgaccctcaaaagactcgtttcacgaaacacgagttacattaatatttttctaatcgaaggaaaaggaacgaaacgtaataatgccgcttaacccacaaactcagtcttttgcttaggtagacccaaatgcatccttttagttctaaggttccgcaaatcttgtcacaatctggttcaccgttcacgcatacggaaactcatacggctaaaaaaatgtttgcatagatgaattgaacatgatccaatataatgttattaaacgcatacggctaaaattttgacatgtcaagggaagtgacacgtagacaagtcgttacgccatgaggtcagcgtccttcgtctacgtggacacactgcacatccacgtgtatccatcaaaaagcgagtttcgtaaacctatgcttacactcgcgcgcgtgatattgagatgttgatccctctcaattaagcattcaatgccactgagcctaatttccccgcacgaaacatttactctgtttttttgtttccctccttctacgtttctctgtacacggctttcttaaattgctcacacgaagcagataattcgtctctctatctctctctccttgcatcattttcttcgtctcattggtattgattgattcacgtgactttgtacattgcggttaagttcttccgtcttggtcattccacatgttgtgtagtgttcaacgccgaattttccttcacccgaggttagaggcttgcggatttttctgtacattggaattagcttcgatgtttcgagattagtgttagaaataatagtttgcgtgttaaagttcttatctttcctgatttggtcggttacctcagttttgtcttgttgtgagatgaatccatctcttgctatattaaggacaaatcttcaaatcggtgatattttgcttcttttttttctcggccacagattaaaatcgtcaaattatctgatttttgatgccctgaagctt

SEQ ID NO: 633 - DNA, 128574 bp, Arabidopsis thaliana
gaattccagtgaaattcccagaagaacagaaatctaactgaaaccgcaagaacttactgtaagcccaattctgttaatgataatgttaaatgggctataaaatgagccccgtcatcagccgctgaagtgaaacgcatcgtttagtatcgtcgtcttctggggaaaatatctttttttttaaacactatcaattcgactggaaaaaggatatttccagattaggtagagagagagcaaaagtactttcattcagacttcagtttaagctatggcggcgaacgattcttcaaatgctattgacatcgacgggaatctcgactccgattcgaatcttaacactgacggtgacgaagcgaccgataatgattcctcgaaggcattggttactatccctgctccagccgtttgtcttttccggttcgccggagatgctgctggtggcgccgttatgggctctatcttcggatatggtgctcttcttctttctattttgtttcttctattgcttggttttatctgctattgctttactctctgatagtgaattgagaattactggcaaacaattgagtttgtactcttttcttcatttaagttgatttcaaaacatgtttcgtggataagggtttgagaaatcatagttgttttagcagactagccttttgagttattttcaggagtaatctagatttaggggattcaacattcctcaagtttggttatgttttgctcctggaagctatagaattgaattagcttagttttcattaaagagcgtcaatgtgataagattggctactgatttgattacgatgatggaattgtgaaatattatctcactatataagttgggattcaggttcaggattgttcaagaagaaaggcttcaaaggatcatttgcagatgcagggcagtctgctaaggtacccctcatctttatgctatagcatatatatgcttattgttccaagaaactgagtaatttgctaattttttgttcaagacttttgctgttttatctggagtccacagtttggttgtttgccttctgaagcaaatccgaggcaaagatgacggtgagactcttcagattgcttccttcttgtgtaaatgattagtttttacatgaacttgtaatctctctcctacttatattgcttttgttctttttttacagccattaatgttggagtagcagggtgttgcactggtcttgctcttagtttccctggtaatccaaatccattatgctcattctgatttctactttggcgttatgtatcatatcaaagatgcaatcatcacagagaggagagctaatagattctttcttatatggccttttttacaggtgctccacaggctcttctacagagttgtctcacgtttggggcattctcttttattcttgagggactcaacaaaagacaaacagctttggcacactcggtctcgttgagacaccaaaccggactgttccaagatcatcatcgtgctttaccactctctcttgctctcccgatccctgaagaaatcaaaggagccttttcttctttctgcaagtccttagctaaaccaaggaagttctaatctcgtcttattattctccctttcttgtgtcttaggctctctctatgtagatgtaaaattttcccgcttttgttgtactttgtgagacatgttttgtgaaaggctttttgcaagagccaatttgaagagaaaaagagttgtgtactttttgctttattgaatacgatctttactttagactttactacttcaaatcaattacatttgtatatcacgttcttaatttcgctccgaaaaggtaagacaatgatcacaattctccaatgatattaggaccaaaactttgtatctgaaaccagttacagtaatttcttatgacattgtttctttaaggaatctcaatgtaaatctgaaatcacttgccttgtttctgcctgaggcgttctttgacaaaatcattacgggctttagtacgagcttgctgaggagcaacgttgagatacgaaaaatggattccaatggcgaaaagagcagcccctgaggcaaaaaatgccaccgtcattgccagttttctttgtgaagatggatagcaaaacgacatcctcaaagctatcaactcttcgtttgctacaaattcaaggtttctgtgttcaataaaacaagatgtaatcacacggaaacgaaacaactaggaagagagacgagacacaagggtgaaagaggagaaactttctaagacacatttcatcgaacagtttgtgtgcttgtctatttttcttaaaacctcaaattcagttgctataaattgcacgcttattgaaacgagttatgtagtaatgagaaaaactgtacctgttttttttaaagttttaaccataagaggggaagtcccgagtttcagcggcaaaagacacgtacggcacagtacgaggattcatagatcttcagacagcagttaattaactaccttcgatgatgttccgacaaatttggcaaagacacgctttgtagtaaaacgaatcagtatgcatcacaatggggatgtagctcagatggtagagcgctcgcttagcatgcgagaggcacggggatcgataccccgcatctccatattttatgttgatatcatttttcaagggcccatagaaagcctaccaaatgaaaataattttaatttcaaattttgttcatcgtttaatctctctacctccttctccggcgacaatctgcgtgactccgttcccgaagctatttatcttattggaattctctgctcggattcattttctgctgtaacagtctcttgtgaaatctgcttttgttgtaaatcacgatgattcgcataagcatcggagttaatcgccgtctgcgttatcaattctcaagttttgctggctacagtggatctgaaaaccctaggctctttaaaactctcggcgctgcaaacaccccgattcctcacagaaggaatcctgaacctaaaggccaagatcttgatttcgtcaatgttgctcatagccacctgattcaatctgattgggataagctaaataagctatcagaccacttggattcatttagggtcaagaacgtattactgaagatacagaaagattatcttctttctcttgaattcttcaattgggcgaaaacccgaaacccaggttctcactctcttgaaacccatgctatagttcttcacactctcactaaaaaccgcaagttcaagtctgcagagtccattttgagagatgtacttgtaaatggtggtgtggatttgcctgccaaagtatttgatgctttgttgtattcgtaccgggaatgtgattctacgcctagagtgtttgattcactcttcaaaacttttgctcatttgaagaaattcagaaatgctacagatacttttatgcagatgaaggattatgggtttcttccaactgttgaatcttgcaatgcttacatgagttcattacttggtcaagggagggtggatattgctttgaggttttacagagaaatgcggcggtgtaagatatctccaaacccatacactctcaacatggtaatgtcaggttattgtaggtctggaaaacttgacaagggcattgagttactacaagacatggaaagattgggttttcgggctacagatgtgtcgtataatactttgatagccggacattgcgaaaagggtcttttgagctcagctttgaagcttaagaacatgatgggaaagagtggtctgcagcctaatgtggttacttttaacactctcatccatgggttttgcagagctatgaagttacaagaagctagtaaggttttcggtgagatgaaagcggtcaacgtggctcccaacactgtcacgtataacacgttgattaatgggtacagccaacagggtgatcacgaaatggcgttccggttttatgaagatatggtctgcaacgggattcaacgtgacattttgacgtacaacgcgttgatatttggactatgcaaacaagctaagacgaggaaagctgcacagtttgttaaagaactcgacaaagagaatttggtgccaaactcgtcaaccttttctgcgctaataatgggacaatgcgtgaggaaaaatgcagaccgtggttttgaactgtacaaaagcatgattaggagtggttgccatccgaatgaacaaacattcaacatgctggtttctgccttctgtaggaatgaggattttgatggagcatctcaagtgctaagggaaatggtcagaagatcaattcctcttgattcaaggactgttcatcaggtctgcaatggacttaagcatcaagggaaagaccaacttgtgaaaaagttgttacaggagatggaagggaaaaagtttctacaagaatcttttaataactgagaagcagaaggtattaaccaaaaaaaaatcaatttcttttattcagtggaaaaagagattgatcgtgtttataaaggatacagtctcataaatattataagagtatatgatacaacaacaaatgaatatctcaaatgaatccgagggaaagtcacactcaaagaataacctgttgttttttggacagaactagaatataagcagacgacatgcatagagaagtcgtcactgcaaataaacagaaggttgtcacgaagactcgctagcggaaaaattttatggttctggctgttaagatttgactgagtcacacacagggaaatcttacgagggtggaagacattatcaacagaggagatgagatcaagggttgatcacagaagtagaagagaggcaagaaccattgcgaaaacagaaagtagaagagatagagtgattcgggtttgtccactaggtgcttgtgcattggttgatggggttccaggggatgaggttggggcttttgcggtaaccggaggtagtggtggctcagtgacatcagcatctgtgaaaaccgggtttggagcttcggctggaggaaaggcagtaggactcacaagggttaagagggcaccgggttgggcaggggccatgtaaggtatagtttcttttctgcccaaacatagattccctgcagaagagaaaaaaagttaggcattgatgtaaataactttgtgttgtgagacctttggtgcaaaatttggctcacttacttttgtatcttgcagctgtaaaagggaactcggtgatggttccatttataccggctccagtgatataagagtttatctcaacggttgcatcagcaaagaagtcatatggttgagataaaaactcattctgaaacagttccacataaactgggagctgagacttctgcagcttctccacaacattggtttgcgttgtgatgaacgactgagcgacaggaaagactgataatttttggatcacaacagcatcagcgaatttctttatgtcttcaatagcagagtcgagaatatcacggatgttttcttcaactttgtagacagtctcgtactggctctgcttcttgaagtcaactagaaccgagctgtttgttgactgaatcatgacctttgtggctgtactattgctgtagccagtctgtgtgagtgtatcaagaaccgctttgacaacgtcgagcccttgctcctctctcaggtatgccgcattctgggggacataaaagacaaacatgagtggtgtggccattagaagacagtcacggtctgattgataaaatcgtaagactaagaggtgcacaagtgctcacctctacactgatcaaaacaccggagagagaggtggagttttttgccaagcttaggaaatcagaaagtgagaaaagcttcccagcatttttctgttttggattcctaaacaggctggttactctgtaggggtttgaaatagcagctgcaaacaaaaaaagattggagaatagttattgtaactcttaagttatgtatcctctaaaggagcctgtatttttgacccagacatttgcatctatatatgtaatctcttttaagttactagaaatagcaggaagaagagtgtacaaaacagaccaacatttatcagaaagcaagtagatagcttgaagacaaacttacgagtcaaggtctggatctcagcccatgtgagactgaaagtgtatattgcaccaagtgagcccaactcaggaacagttgttgaacggtttctgaaagcagttagggagaccgtcgtgctgttcccgagatcgatcgaacttaagcaaaagggtgtaccatcgctggacaattggaccgagcaatcgattacatcagcaccatctttgattgccttcttatatgccaagtctgtacatccaggatagtctccactcgcaccatctttggttataacaagaaaatccactgagacaagaaccataaagtcaattactggttcttcattaggttatgacaagtcatggcaagatacaaagcaaaataatcaactcccataccttgttttgtagcgtttctgccaacgtgggagaagcaatctgaggaaaatatgaaaacaatgactcaattttgagtatttccagcaatgttttaacgagaaaatgctttattctgtagacgacactttgcttaccaagggatgcagatgcagttatgggaaaatcagagagcacaccatcaacagagaagttgccattgtccacaaaagatagatactcagagactggatcgaaactgtagtcgtgtgcaatatcaatatcatttgcaaaacctgacacaaaaacttctaatcctgctttgtgagcatcttgaaccaaggatgtatgaggaagcaagtactgctggtcatcaagtggcaatatgtaagacttggggacaagaatccctgaagcaaacgtcttgacaaaagtcaagttactcaagatagagccgtaagttctgtttgtcgttggctcgaactcgtcttgaccaagaaaccggaacacaagacttggtccattacgcccgaaccgaccagcaattttcttaaagaagttcacttcaggggaagagatgaagtcaatgagaacagtttttgaagctgcaaccagaaaactgctcatgctcaaattgtgctgcgcgtagaacgcatcgtgctgaacatttaaccagaagaatgatggtttcatctgcgtggatacgctttgaaccgtcataatcgggttagaattaccatcgaacttttctgaccgagataaaatacctcggatcactgcaacacgtgaaaaacacaagttaaacaaaatcctcattacaaaaagcagtagatagagccatggacacttacagttaacatctttgagatctttcaaggagaaatcaatggtgaaccaaccggaagtaggaactccgttaaccgggtaagatttttgtcgagtagggtaaacagcttcaatagatgaagaatttctcattgttaaatcagggaagcaaataccaagagcatctttggttagctgaacatcacaccatagaacagcatctggtacacttgtcagaattgcgaaattgtaagcatcgtaactcgaatctgggaacaatccagagaatccaccacgagctatcacaagaggaggatcacctgagcacgaaattcaagaaagtgaaaaattttaatacagaaaaaaagagatccaaagtaattctatatttggaaactgtccacaaatggctaaattctcacaaaccaaaatcaaatggagaaaccaaagtgaaatttactatctggaaagagagaaagtgagagaggacataccagtgagcgttggccatggacttttaggttttttactttgagcatggatttgagcagcaagcagctgaatcagaataacaccacagagaagaagcgatgaagctcgtaataaccctcgcattgttggattgtctgccgggaattcgttctaacctgccttttagcttcccgccggcgacttcgccggagacagaacgaaatttaagagagaaagagaggtggagagagaaagagtcttgttattagttctggctatttggtttgtgggattctcatttatacgatcgttgattaatttaaattaagtatagattatcaaaaaaagtctgatgattagtttctttcttacaagttttttatttaatattgcagtctaccaaaattacgcgtaatcacgtattttgattttgtggaggaggagccgagattttggtcgggtcggcttcagctgatgttgttgttgacctctttgttcctcggactcttaatttcaccgggctttgataattcccatatcaaaaatagttaaccctttgtgattatataagtcgatcatcaatacaaccacgtacgtataacaagaacttttataacaaaaactaatgtttatggtatcgttaactttttgctttatgcttgaaacaattactatatttttactgtaccactacgtacaacaaaaactttaaagtacttgtaagaagatcattaatatggctaacaattggggcccctcactgaaatgatgaagacatgaagttgtacctttgcatgcattggcattcatggttataatatcaaaagaaccaaatgaaattcgttttgatttttatttttttaaaagcgttttggtcatttattcacttaaatttagaaatctgaaccaaccaattggttaaagctgaaaaatgtatatccttatgtcaaaaaagaaaagaagaaaaacagagtacttgattgtctttactacaaaagaacatattaacaacattcacaattttgtgtctatattttagggtaataaaatgggtcgaactaagaaaaaaatattagtacaaatctacaatgctgggattatttggtatgacatcattaagacaacagaaaaagagaaaaatcttttggttgtcggctcggcgcagcgccaaattaaacagcaacaaagtggtgaatgaataataaacagctacagagggacccacaacatggccgtcatgacttatctgtaataatacacgtggcgaatatctatttgtggtcagtcatgacatcagttcaaacgcgcaaaccagtcacgtttatacgtgggaccgttgtttgctgtaaacacccaaacataaaccctaaacactttcgacaatttatctttcttttttgcaaataaaaacatttcagaaggaacgtttctcactggatgctgatgttgatgttggaatatatgttttatttgacttttaatatacttatttttacttggtcaacttccaatacctgtcccttatttaattaggctctctaatcatatcattgacctctatcttgtaaattatacgtttagggtggttcatttttgtattgcatttattttctcagttatatttatcaaatcttctatatatgatggttcagtcgattcgagattcgacgaccaacatacctggctgtccattaggattattaaaattcaattcttgccaccctaaattattggaaccttacaaaacatatactagtatataactatatattgtcacgatacacatgatcgcgcggtttaaacaagatttaactttaaaactaaacgatattttttggtattttgtgggaaaaaataaaacaagatttggagacaagattttgtcctaacgataacgatgaaaaaatgaaatcaagtaaactggaacacatacatttttccaactacgtactaaaaataatgagcattttaatactatatagttgccttttaacactaattaatttatttccgatttatgtatatctggtgattcttgtcaaatgtaaaagaacgtagatatctatttctttcattataaaggctcgactctcctatatacatatagactcatgactattgtctgttagctagatgtacattatataatatacacatgaataaacatagatgtagtttacaaccaagcaaacgagactaatttcatattttatactaccttttttataacattagcgacaaacattcagttaagaatttatataattttgaaataattgcttccaaacaaacacaagttgggaaataaccactaataaaaagttaaagaaacatcatacacaaaacttgaagttgggcatgtgcatgtgaaggaaattttttatactttatagacccttttttgtcatcatttacacttatagatattatagagtgagtgtttgctcaaaagaaaaagttattaaagagtatgatcatttgcaacatgttactgacatttccttcttccatattttgtatagtttttttatttattttctcgatcgacaatgggccgaaagttaccacagatatgagagcttgagaacagaataagatcttcaatatttaaactaagaaaatgtgaacaagggctccacacttatgttctttgttctaaaacacgtaggcaaaaggttccctctaactctctaagcattttagatcaaattgtcatctatgaaaaacaaagctcaaaagacgctttatttggcttgaatcaacaacatatttaggtacttcttgtcacaagttttttagaatcacatgtgctaactacatacaaggacacaattacactatactaatactacaactgtttgttctttgggttagaagcaacttagtacgttgaccctcaaaagactcgtttcacgaaacacgagttacattaatatttttctaatcgaaggaaaaggaacgaaacgtaataatgccgcttaacccacaaactcagtcttttgcttaggtagacccaaatgcatccttttagttctaaggttccgcaaatcttgtcacaatctggttcaccgttcacgcatacggaaactcatacggctaaaaaaatgtttgcatagatgaattgaacatgatccaatataatgttattaaacgcatacggctaaaattttgacatgtcaagggaagtgacacgtagacaagtcgttacgccatgaggtcagcgtccttcgtctacgtggacacactgcacatccacgtgtatccatcaaaaagcgagtttcgtaaacctatgcttacactcgcgcgcgtgatattgagatgttgatccctctcaattaagcattcaatgccactgagcctaatttccccgcacgaaacatttactctgtttttttgtttccctccttctacgtttctctgtacacggctttcttaaattgctcacacgaagcagataattcgtctctctatctctctctccttgcatcattttcttcgtctcattggtattgattgattcacgtgactttgtacattgcggttaagttcttccgtcttggtcattccacatgttgtgtagtgttcaacgccgaattttccttcacccgaggttagaggcttgcggatttttctgtacattggaattagcttcgatgtttcgagattagtgttagaaataatagtttgcgtgttaaagttcttatctttcctgatttggtcggttacctcagttttgtcttgttgtgagatgaatccatctcttgctatattaaggacaaatcttcaaatcggtgatattttgcttcttttttttctcggccacagattaaaatcgtcaaattatctgatttttgatgccctgaagctttagcttgcatctgtagtcatttgtcaaagataattgaacagaggctttctatattcgtcgtcaagggtttaggagattctgggttttggcgtgattttgaggggaaagattgaaactttccccgtgaatggtaagacagtgagagatgtctgggtacgtgggtgttgtcgtttctgatccatggctacagagccagttcactcaagtcgaacttcggactctcaattccaaggtttcttctttttcactgttagtcctttatatatacatctcttgtatgtaatcttgtttgatttgtggtgtagtatgtgtcggtgaagaatcagaatggaaaggtcactattgaagatctccctcctctatttgcaaagctgaaggcacttagtgcaacatttaaggaagacgaaatcaagggtatgctaggggaattgggttctgatacaagcactgatgtgagttttgaagagtttctcaaggtatatggaggttctacgtttcattggggaatcgaggattggactgagtatgaatgtgatatgtatataatgtagttttggattgatccttatgtgcagatatatctcaacttactaagtaaagcagctgagaaatctggtggtcatcataagaactcatcctcgtttctgaaagcttgtacaacgacacttcttcacactatatatcagtcggagaagggtccttttgttcagcacatcaatagatatctaggggatgacccctttttgaagcagttccttcctcttgaccctcattctaatcaattgtatgaacttgtgaaagatggtgtccttctatggtaaggtgcactagagtccatctctacacagaatgcatctgatttctgcctttcacgtgtttctctccctttatttccggcgtagtaagcttataaatgtagctgttcccgggacaattgatgaacgagcgatcaacactaagagggtacttaatccgtgggagagaaatgagaatcacacgctttgtctcaactctgctaaagctgttggatgctctgttgttaatattggcacacaagacctggccgaaggacgggtatgttttctctgcttagtattcagtgtacgtttgaaaatatttcaacacacatcaataagtgtaattatgtgcaccgttctgaccagtgagcttttatgatgttttgcagcctcacctggtgctcggattgatttcacaactcataaaggtccgcacacatccacttgtccgctctgtatatcttagttttattttttttgtgttaaccaaataatgttggaaactgcagattcaagtacttgctgatctcaatttaaagaagacgcctcagcttgttgagttgcttgaggacagcgatgtaagtgagctataccaatcacattttcagccatttaattgctcttgtacaataatataacaagtttctctctgttgcaggatgtcgaggagttgctgagattaccccctgagaaagtcttactgaaatggatgaacttccatcttaagaaagggggttacaagaaaaccgtctcaaacttttccgcagatttgaaggtatttggcttctcaaactacaacttggaggaaacctttctcctttgcttatccagatctttagttaggcggttctcaattcaagattgtattgtacttacgttctactgttccttacaacatgtagaagctatatcaattcttggataagagaaacaatatgaactatagaagtcataaaagaaacagaaattttattcttactcaaggttttggtaatgttatggatggagtttgtcctcatcaagttttttctatgataaagcgtgttgctggtaaatctgcaggatgcacaagcgtatgcctttctgctcaatgttctcgcacctgaacactgtgacccggctacactagatgcaaaggatcctcttgaaagagctgaattggttctcagtcatgcagagagaatgaactgcaagcgatacttgactgcagaggagatcgttgaaggatcttcaactttgaatcttgcctttgtggcacaaatcttccatgaaaggtttgtatcgtgatgcactttcatctcccaaaaagctcctagatgatggcttgtcctgtttgattaggctggtgatggtttactcaaagaacagactcttgaatgttatggaaaaaagaacggggaaatggttttcaacttttcgtactattatcaatgactcatagcttcttacctgaaatccctttacctgaatatttttccacttaagtttttttattgttttgttttctacgctctcaattttactctgcctgtctgtacctcttgcaggaatggtctaaacaaggatggtaagtatgcatttgcggagatgatgaccgaagacgtagagacttgtagagatgaacgatgctaccggctatggatcaacagcctcgggattgacagttatgtcaataatgtatttgaagatgttagaaatgggtaatctttattttgagcttatagtaaatcaagcaattagtagaaaattttcctgcagttgatgacgttgcatttggaaaatactgaaaacgctctttggtcctgatgccttttgtttgttccatttactattttatgcagatggattcttcttgaggttcttgacaaggtctctcccagttcagtcaactggaagcatgcttccaaaccaccgattaagatgccgtttagaaaagtagagaactgcaatcaagtcataaagatcgggaaacagctaaaattctcacttgtaaatgtagctggaaatgacatagttcaagggaataagaagctcattcttggtaatcattacccgagagctcatgtttctcttagcttgatacaaaaacatgatcgccttgccttacaaactggagatttatatggttgtgtatctcaggtctcttatggcagttgatgagattccatatgctccaacttctcaagagtctcagatctcggacactaggtaaagagatgactgatgcagatatcctcagctgggccaacaggaaagtaagaacaatgggacgaaaattgcaaatcgagagtttcaaggttcctttctttacaactacttcaaacacttaccacaatagtattatataaagtatgtccacctatcaccttctagtgaatcaaattaaaattctccaggacaagagtctatcgagtgggttattcttcctcaaccttctatgggcggttgaaccaagagttgtgaactggaatcttgtcaccaagggtgaaacaggttttcactactctttttactaaggtatagttacttactccgtttacctgaatcaaagcttatttgattattatatggttattgaaacgtacagatgatgagaagaggttgaatgctacatacatagttagtgtcgcaagaaagctcggttgttcggttttcttgttacctgaagatatcgtggaggtaagaactgagagactataatgtatcatcatccgaaatagcaattgctcagatgagatgtgttttggtatgttgtgacaggtgaatcagaagatgatcctaattttaacggcaagtataatgtactggagtcttcagagacattcacgggagagttcagattcgtcgtcaactcagagcaccacaacgacgtgcaccagcacagcctcgtcccctgccccatctgtcacagaagaggaggaagtctcctcattgagcggtgaagtcacgagcttggccgttggtgatgcggtttctgaaatcaccacggtctcagaggaagcatccatcgaatagagagagcgagatcacatatatactgatatacatctcttgctatagcaaagtagctgttataatagtgacttctctgtaatcttttgtttttttgtttcatcaactaaaattaccaaaaataataacaatgttacaaacactcaatcacatcgagaaaagtaaagtaaaattgtgaaaatttgtttagtacttaaaaagttaggaggaggaaaaagtgtacatcttattttgaaaacagacactacgcaaacaaccatggatcagacgacgatgatccacaacagtcaaggcaaacaagagatagatagctcaacagacgatgaagatagagaagatggaacgagacatgcagacaaaagaggacttgaaaaccgtggcgttgggcacctctaagatcaactacatggatcctaggatcacggtcgcatggtgcaaacgtcatgaagcacccattgaaaaggtagttaattatatacaaaacttgaatattgatctaccatgaaacaaagagagtcctctaataaagttttttttttgtaatggctggttcgttaatgtagatattcaacaagtcacttctggagaaatttgcgtgggcaatggacgtagaacctcacttcacattctaatatgcattgcactgcagcagctgatgagagtttctctataaaacagagcaaagcaggctacattttttttcttccaagtagataaattctttttgtttgtatctttatttgagatcatgtcttctttttttttcgtatatacaattgttcattgtttgcttgaattcaaatttagtctgttttataaaaaatgaaaccataatctttactattttaaaccataaaaaaaaagtcaattgtaaatacaaaacaccaaaggccaattaagatttattccaactggaaggatagagcaaaaaaaaaagaataatctggcgcaaaaatgacttacacaaatcaataagttttccaaattttgtttctttagcagaaaatcaaaaatgttattttggtcacaaatgtaaaaattggtataaacaaggttttaacaaaaaaagaaaaatatatatatacaaaggcaaaattacccctgagaaaatctggggccttgacacgacgatcctccatcatcctcttcctcgaggaacttcaattccaatctgtgagatctctgcacaacatcttgtctattttcaatcgaaacctctgtgagatcgcttttgatttttgtaattctcgtcgcaggatatctctctcattgggatcagacatggcttttgttgtaacatccctgatattcgctgtcgtaggcatcattgcttcgatatgcactagaatctgcttcaacaaaggcccctccaccaatctgtatgtcaattttcattcctttttgcttcttctccctttgatttagtcatctttttgctgtctttgatccattgcttcgtcaaagttaataaagtgttcttcggtatcaattgagatcattatttatctctctgagcttagaaactattattggttgatgactttatatttgctcattgacttttgctaatttgtttttgaatttgttccttcctgtgatgggtttttttcaatgtaagcaactagtaccgtcacagttctaactcttgtgctggaaaaagtgttgatctttttccctttttttatcattgacttcttatgtacttgtttgtcttgtttctatgaaacaggttacatcttacattggtcatcaccgcaactgtctgctgttggatgatgtaagtttatgtttcatgcactatgtttcctctacttgctagccactgctttgcattcacaaccatgggaatttgtatccagcccgttatttgtttatccaaccctctcttgtttgattgttgctgatcaacattaaccatcaaactatcaagatatagatccttctagcctttactacttccatttttgttgttgataggataacgtaatatcttgacacttctcatttatctgtggaacttatctctagtcaatgaattagtattcatgttaagagaaagtttctacaacatgaacattattggtcttctactaaacgctgtgcaaatcctttccttatatgcaattcattcattgtcttacatatcattacatcgtttttgtttcttcgcattggcaggtgggcaattgtatacattgcgcagatgaaccctctcattgtccctatcttaagcgaggtggagtagaaaccattctactcaaactaggaaaccaatgcacaaatttgagtaagagccccgctgctctttctgtatcttcttcaaacatatttgttttcccctttgtaattcttatcgtggtgtggaacaacgaaactatccccctctttactcaaacatattctgtctctcattcaattcttgaacagttttcatatactcaaagactctaccagagagtgagtgtattgttgatgaaataaaaacatttggcagaatattcgccatttcccatcttcatctcctaccaaggaaggaattttaggattttctttttgttcatggcaagtttctatcagaaccagttcgatctgacatggctgtcaaattgtcctaatgcttccctgtgaattctattgatataactgtgagctccaaaactgtttgaggtcttatctcctaagaaagtacaaacttgaatcaggacaaaatcactctttaactaccaatacacaaacactcttttgactacagttacaccaaaaccggaaacaacaacaacaatatcttttttagacaaccccagttcgatcagtctttgtggcctaggtagagctcgcctgaaacaactctattgtatattcttctgcactgcaacctaaacactgaacgaatagtaattctcttcctcttcaacggagttgaatattgacgctagttcgactttgggaataaggttttcgaagttttgcccattataggaagtaatcaggggccggctttttggcgggaggccctctcgagtcctgcatatagaaaatatgtcagtctacttatctgctcaacgagatcagaacgggaagtaacatattactaaaagggtcatacctgctgggctgcatcaaacacacggaattctttatttagattctcgtcaagctctagaattgaagccacattaccgcatctggagcataagtgaaataggagtaaaaatcaagctacaagaaatgaggatagatagactgaaacagacggctctgagaatcttatttacctgtaacagtaatttggggctgaccacactgtcacaatctggctatcaaacatccatttgtaaccctccataactagttgatgggcacgggctatgtagtctatgttgtttgagtggttaaaagacgtgacaacactgccaccaaaaaggaatccggcaccacgagggctcaatccccagccatcaacaatatcttcaggatcagaccataggagatcacacatggcaccatcatgtggtacttcttgcttccggtcaattgtcctaatctgccataaaggtatggttccgtcagttaactaattctagttggaaacttgtaattatcagtagagagagctcttatatcaacctgatcaagagtcataatagctggagaaagaccaccatgaacacagaatatcttgttctccacaacagctgaaagactataagaaaagacagattaaagagtcggaatattccaaagacaagtcaaaaactgaatataaagaaagtgaatgctgctttgaatacctcatgtagtcaaaaatgtcggtgcagtatctccagacatttgaagagccatatttacgcaaacactcatcataaaatccataaacctactaaaagcagactttatgaatagtctgaatatatacatacacaaaagcaaaattttcaaatgagactgcattcacctgtgtgatttgcctgctttcatggtttcctctgatgagagttatgcggtctggatatctaacctaagaatatcaaagcaatctacttaagcgattccaagaaccaatttagcagaagagattgtgcaaaacaaggaaaccacaacaaagtaaaacacagtccagagagttaccttgagtgcgagtagaagtagaaatgtctcaaccgaataatatccacgatcaacaaaatctcccataaacaaatagttggtcttaggacaatcacccccaactttgaaaagctccatcatatcatagaactgcccatggatgtcaccacataactatcccaatggaaaaagaaagacaagtattagcaattcttgcaaatcataagaaacatcaatggtatctactctcacttcttaaccctgtaacttcactgcccgtgaaatcttttgacttgtaacaatagcaagaaacaaaaacaagtctttcactggatcctaggaatgatataccatttgatacaacattacgaatccaaattataaagacacaaaatctccgcgcctattttcttcagatttattgattaataagctcataattccgaaacccagatcgagaagtaaggtaaagtaagaacttacagtgacaggggcatcaactctctgaacattactctcttcaacaagaatttccatggctttgaggcaaagagccttcacctccgattcgctcaatggttcgcatcgcttaagctgccctatttgccgatctaggtctgacatttttacctctcctctcctcttcttcctccttctattactcttcagccaccggaaacgatccttaatctgatgaataagaaggaatcaaccaaccctcgccaaaaagaatctgatattctccactgtcgaatgtattaagctcgtcgtcttcttcccaaggagagagaattagctcctctccgcaggaatgttttttccccccaaggtttttctttccctccttatggtttagattattttcaaaatcgcctcacttcttttctgaaattacatattcgtccagaatgtgttaagttcacataatgggcccagaatataactttataaggcccggcccacatatatcaaagcggccattttcgtaatttctccacggcgagaagagaagataacggcatttcgatcggagttttgatcggcgacgatggagagaaacgttgagaagatgctgaacagagtttcagtcgtgttcttaagcatcggaacagtgttaatggtgattatgattctccagacgccaaaacttgtatttcaccagaagctccatcgaaacctcatacgcattttctgagatctacatgcgattcatcgcctcgtcagcatcttcctctcccaaagaagaacgctcgaatctggttctctggagcttggaaatcgcgtctatcctccttctctacctacttcctccgatttcgcgatctcggattcattcaaaatcacaccaaagctctctgtctttccgacggagcaggccatgctccgatggctctttctcagatcggattatccgacgttaccgcagttgaattggttgattcgattcctcttgtgaaaagagctgatcctcataaccttccgtttttcgaccgtgtctttgattttgtctttactgcacatctagctgaagctctgtttccgtggcggttcgtggaggagatggagaggacggtgcgacgcggtgggttttgtgtggttgcggttgatgaatgtagtggagatgatgttagagacattgctaggttttttcataattccaagatcgttgatgttgctaatgtaaccttagaaagagtcaaaagaactagtatactattcaaacttcaagactctaaaaggactagtatactattcaaagttcaagactctctttcatgaaggtgttttaatcttttcttcttttcttttaagactctccttcatgaaggtgttttaatcttttcttcttttcttttgattgcgttgattcataggtcctttctggattctcagactgcttcaatgttcatggagtggagttaactttgagttaatgtgaccatatatttcgttacactactatagagtaagtcagtaataaatttagcaataataactaacagtgtaaaattggaaataacagaaaaaggggttggtacaaagagagaccaaggcaacaaaacatacagaagcttttctttagagctgcaacttatagtataaccatacagaactggaaaaacaaaaacaaacatagatctcttagaccaaaagtccatactactacccgaaccttcatttaccgtataggcacaagcttcacattgatcgattattagcttaaaatggctcgatcaattacttaacataaaggatacttttagtagtatgctgtcttgtcttcactgataccagcgtagattttggcacagtactcgaacaagcttccatcgaaacaccgcctaatagcttcttttgacaaaaacccttcttcatcccttgctagcaagtacaacagtccccactctattttgcctgcgatcctaatacatacatgtagatccaaacattataactacaacaacattgactaatactttagtttaacacatgcattcaataaactaatgaaagggtaagaaaaaggaaggctaatgctgtgattgtaccatccaaaaatgtcccaagcgtcacggtttccttctgtcatctcccatagttctccaagactcaacttgtctggcaaggttttcgcatatttgctaaatatcaactcaagattcaccggcataaacctgaaaagcatacggaagttataccatatgcatcagtcatcatattttctatcagtcaaccgtttttttcaagataatatggtcactcaccttccttcattgtcatatgtttttgaatcacttccatgctttgacttgtgtatgttgtgtatgtatatagggaagaaaggtgaaggtaaccacccctgcatataatcaagtagaacactaacaaaatggacaacggatttggatatgataatttccgagtctagagtagaatcaatcaaagttttgcgatatatgtcagcagaggaggagaggtgttaccggaagagtggcatagctaagggtcaggttgataacagcggctattataagcgacccaatgatattgaaaccaagcattcgcagtcctaatcaccggttgggatcaactttttgtacatataatactaacgaaaaatttgaagttgaaatatctatatatactatatagacataccagagtaggtctcccaagggtaaatgatgccattatcatcgatatcgaagaaggagacatgctgttgaagaacactaagtccgtaattcttatggcctggagttccgtacgggtgttctctgtctggtgcttgcaatgctcttggcatatctatgcataacacatataagatcaaaatctgtatcatttccacgtatgtgtaatgtgtgtatagaattattcatgcacgttcatgggtaatacattattaattaccatcatatacaggatatgtatcattttacaatttatagcttctataagatcatgaacatcattctatatgcatgttttaaaaattttgagggtcggcaattccatatatttaaaagggtttcttaaattcaaccatatatcaaatattttttggcatgcaatatattgaaatcaattagggataaaaaaatgcaagtagcgagagaaaggttttacaaggtttaggaagtctatcatccaagtcaacacgagcacggcgatggtaagtgaccggcgcatagggagccaccgtagccattgcgtctctctccatcatctccgtctttgaccccatctctctctcactttgtctctagactgagtgcaaatgtatgtgtttgtcttagagtaaagagtataatgaggtaataataataagaatcgatttgattgatgtgcgtggcggacatgcacgcgccgacgaaagcagcgattgacatctctctttccttgtctttgacgcacatctcttctctcttcctctgtcttacacttgacatgactctagagacacgttttcttccatgtttcatcactctttctattcttgtctgctaaattcagtaattcgggcctctatgggcttttatataggcccaacctcgagtactaacaccacccgctacatgagtgcgtgtcccacactcgctctttacgtgaagactgaagaggaactccattgcctatgtatgtatgaatgtacacgaagttgcaaggaaaattttatgataataagaataattcacacaaattttctttgtaaacgaagtctgagcctgaaaagttaataaacaaacccacaaatgttgagaacacacacacgcactaacatcaaccccaagtgtcatagattagatataaaattcagtgaccggcaccggccgatggatttgttagcaactcaagtgacttcttgagatgttctacagcagtcgagacttcatcaaaagccaaagctcccacagcgaatctagcagccttgagtgcctctgcaaccttctcaggccctggctggtagctgctatcgtaatggtacttctgagctgaactcggtgcaggatctagcacgggagcaatattgatacgcccgtttgatgagtaaggtggaggaggaggagcagaggagaagcttgtggaagaaggagcaggtgcagagtgcggagaagaatagtaaggttctgggttttggtagtgagaagggtagtggggagaagtggatgggaggctgctctcactaaagctaggataagattggaaattagggagagaatttggagaaggctcatgagatgagtagttttgcggtggcggcatgtgttttggcgggtcttggtggtatggttgatgactgtaaggatgcgggtaaggggagtctgatggtcctgtgggagggggaagatgatcgttggaagggtaagaagacggtggtggaggtgggacatctgcgggataatcgttggtcggattgtcataaaacctgggaggtagagggtgttgtggcacttcagggaattgatggtggctggagtcatcattcgagtcatggggtggatcaagctctgttctatgatgacttgttgtgttggtatcacttgcactgtgatcctgtagataattaacatgcacaaacaatgaatcgattaagttgatgcagacgttttatcatagtgttttgacaattgagaaaacaaaaacctaaaagtacacaggtgggtgtgaatgtgtgtgtctctagctagatgattttgatcagcgctatgcgaattctataaacatttacgctcctaaacacttttcgatattattggacagaatacacgctaagccaatatcaagatatttccaatccataaatattcaagaagagaaacttacataggagccactaggaccgcttgatgggatggataaatcagtatcatcatccacaggatcacctggagtgggcttccttccttctttaatggctttccttatgtcagcagccttccaagcagcatacttgtgtttctgctctatctgttaatgggagccattacatatatacacatatcaatctcccaacacagctgcctcttaaggtgatgttaagtgaataaaaaaagaagtaggaacttacatcaggaggtacgggaccaaactggctcagaatttcaaagaagatgctcgcagcataaaaagttttggcagtgcccctgtcacaagcacaacaaagttaatttggataatccatcgcaactcggaagcctatgtaattgagtcaaatgaatgcaggtgttagcacttataaaataaggatacagacagtaatcgaactaatatcagtatccaaccatgcatagaaacacatcaatgctggagatacaggtatttcgcaaaagcagaacaggtagaagacaacaggtcgagataagccttggatgcatccaactaattacttaacccgctatcttaaacgatggtagaggaaggtatcacctaaaaacatgtctgccggacatgcatactcattgtaaatgtatgtgtacttgcacgctatttccagtattggcaaacacaataatactagacagacaatgaatctatagaatcatgctaattcgactcattgagctagtgttgacggtgaccctaaaattattagaaacttgagggcaaaaaaaatgccattctatatataatcaaacataagagcaaaaaaaattcttacaagtctgctcttcctgcacgatcctgcttgtctgccttagcaaagacactaagtgcaaacccctccacatgcatattgtcatctggggacagagtcaatgattttttatcctggagttacacaaaaaagaaatcgccataagaaactggaactaatcaagaaattgcctcatgaactctgtcaatcacatgaacaaacctaagctaaatttagatataagcctccttaccaaacacaaacataaataaaaaaactccagctttgtaacaagtaacaacatataataatcaaagtcaaacacatcatgagaattactaagaaccggtcctttcaaatctaaacaagtaaaaaatcaaacaagctgaaataaatcagaaaaactcacaatttaaaacttcaaaggtaataccttttcgagttgattaatgagagacatgagaatcgaattggtggtcttagttctctcgctctgcggaatcttcaatcctcgttccattgcatatagccgacctaatcaatcacaaaattccatgaatacacacaatcgcaggaggcgatcatctaggttagatatagataagaaaacgaaactcacagtaataagcaacaagtggttcatgcttctgcagctcatcggcacgttgcaggtaaggcagaagagccctggctggttcgtttgggttcgacatagattctctcttctctcgagctccgtagctttttctccgattgatttgttaagacaaaacagctcaagaaattttcctgtatttaacgcgcttctgattgcaaactagaaacgacgtcgcagaaaggacctctaaaatcccaaaccttcttggaaactttttaaacttttaaatcatgcccaaaagatctttcagtatattacaattttgcccaaatattatttcgtaattccaattagaaccttgactttcattcactaaaccggtcacttcacattagtcatgctaacaagtaccaaacaaatttgagtgaatgaatacagaaacagaaacatctaagtaacattctactctcattgtctttgtttctaagtgtttgtttcttaaacagcactattagcaactaacaaaagtgtaagtaagcattataactctctttcttttgatattgtcacggtgaagccatcactgggtcagcacgagagactggagatgcagcatcatcttttgtgttggctacaatgttcgaaggtgaagctatcttgttcagactgtctctcttggacttgcttccgttctggtttgagttcatagacaaacgcctcataggagtttcgttgagccctcctccattgactcgtgttcccaccggtttcttggcactaacgggtcttgcagggcttggtttagacccaaaggcggattcttgatctgtgtgtggctgttcttgctgcttcttctgttcctgttaatgaaaaggcaagattattttaaaagaagttagtttcaacaatcggtttaacacaggatgaaacaacttactttcagcctccgcttctcatcttctcgttcttgcctaagcatagtgtattcatctagcatggcgagtaaaggaactccatcgtactcaaaggacatactgttctcctcttcccatgcccgggttttagcaatcaacgtgtcaaccatagcttgcacaaacaaagtatgatatattcttcagtctcagtttaattctatgtgtagtaataactaagagagacttttggaagttcttaccagtaatcttgctgaccagaatccgagctttctcagctctcttgagattcaaatgcgcacctcggcttgcactatacctgttctgatcctgtttttccagaacaaaaacccaaaagaatcatcaattgaactctatgcttaataagtaatgtgtttattaacatagccaatgttagcatactcgattgtaatcttcgagccagctctcttcctcacaagctgacatccatttctctacacggtctaaaatttcttttctactaaaggcttcctccttggcctttgcgatctggctatccatgtcagccagtaactcagtaggttcagtattcccagcatcaatcaacgacatgatcctctcacgaacaacctctggttttatttctatgtgagcacgagcatatatctcctcaagctctgattgctttttgaatgcaatttccttcattctgctagatttcagttgatcaagcctatccacttccacctcagccttcaagagttcacagaagatttttaaaagcagtacttatcatacacattgattgatacattacaaatttacgatacctgttcgataagatcaagtgcgagagcaccagaggcagtcacttcatgaactgaagctgaaatgttagaggtaacatggtcaaaaagctccctttcctcatcagaagtatccatcagattccatagatcagttagctgagtagctagttcttgaagctgcataaaaccaagatacattaatgaaatccacaaacaagaatggtgcagagaaaagttacaaactttcagcgcaattaatcagaaaggatttcaacatatgtgcagcctaaactgaccaagctcatgtcagagatcacaaagaccatgattttgactaaccttcttaagtctttgcattttatcttctttaagagtcaagacagtcttagccaaccttgcaagtgtttcattgctaatgctcttggtttgaacaccatttgcctcatctaagctcggatgaacttcggtgacagtgcttaagaaatctaaacgaaggacggcacatagatcatgcaccgtgctcacaaactcgagcaccttctgtaacctatcactctgctcaaacacaaagcagttttagttctggtttgaacataggccacacataaccatatcccaactaatattttaccttctctttctggagctcttggagtttcctctggaagtcatctaatctctttagagacaagtcagtctcatcaaccacatgaggtccattgttcaatccgccagcgatctcctcacatatcttctgaatctgtgattgtacatcagaaaatgcccggaccctttcctctttctgttgccaaagttgttcaagcgcaggtgctattgcagaaagttgttctttgatcgttcctgaagtcttatcaggctgcaatggaaacaaagacattgaatcacactacactgtaaccatctcatctctttaccacttgtaagacgtgagattacttacaatgtcgatatagcttttttccccgagagcagttgtgagattggaaagttcaacagtggcatctgacaaagtctgaagaagctctgcacgagattttgcggctagctcaactttctttttgtaaacattcagacactcttcctcaatctgtagaagcagtttgtctcgttcttcatcactctccccaacctcatcccagatttcctgtaacaagtttgtacattgagtttgtggaaccatatattaaaaggataagtgtgtatgttgcgaaatctacctgcaacttctgtagtaaggtgccacaagtgatttcaccaagaagaggattttctgcttctgtcactgccattcttgtgaagtcaaaaggtttcctacaaaagtagaaacaacgaacatatttagtgaagatccaaactaactatacactaaaagaaaccaaagttgcaatcttttttagaaaaccaaattgaatcagaaacaacattttgaacttgggaacaaaaacacatcaaagaacttagtgaagctaagaatgtgaaactaagctcaagaaaagctcgaaaggaacttcaaagaaatcaaacagcattggtgataaaaccaaagccaaagcaagaaatcaacattgaagaagtaaagaggcaatgagctgaaatgaaactaatcgaatccaacaagtagaagatggctttcttaccttaatcgatattgaatccaaatggtttatcttcctctcttttagatctgaagcgacgaatagtcactgtgagagtaagagagagagagagcataggaaacagagaaatctccaactttggttatggaggttgggaaatgggaaaagtgggacccattttacggaactcaataattaatgaggaaaaaacaacagcaaaaaggtgagagaccctgtcttttcgcgttatttactgatttgaccactgatctcacagacctcgttgactcctcatgctcatgtctgaatagttaaaaggctttccttaatgggcttaaatatctgacccagcccaaacagatcaagacaacacgtgtcactcattccgggtttaaacatgaagcagcgacatgaatagtttattggttctctcttccgatgatttgatgaaacctcaccgctaagtgctcatccaccaccttcctcctcctccttcttccctcaccttttgagtttctttcttcacgtttcttttcattaattagggtttcgcattttcaatcaccatcatcccaccacgttttcgttaatgtaagttcattctcttttttctacttgtcatgatcccattttgttgcaatgttcacttatgaaatttatcctttgtatgtgaatcatcacgttttgctttgatgaatcatttagatttctaggcttacacattcaaatctaaatcctctattatatgcttgttacacaagtaatctctcatcagatatcaatgtgtgtgtttcattaagacgtgtataagctcgagttatggttgacattttgaaattatagatcaaccccaaattcatttcctcggatgtataaagaaacccagatcatcatgattaactgaatttcaagaactcaatccaggaactgagagcatttcctagggatctcaatggcaatggagaaagatctcagtccaaattctccacggattagaaagctaagggatactagttaccctactacaccaacgtctcgaatgaatactaataaccagagagataaccattatcccaacattcctaattcaccaagggattacaattatactcctagctctccaacagctcgcattcgacaccgcaggcgatcaagcgaggtatctatacaatgtcatactctcttttccggttgaatccaaaatttgattgtctttttcaatattgatcagaatttagctgaggtgaacagaagcaatgtaagcagagtaagcaatttgttacttggtgataagaacaagtacagatcaatgtggataaggacatgctcatctctctggatgctcggtggagttgtgtttataatctacatgggtcatctctacatttgggctatggttgtggttatacagatattcatggccaaagagctcttctttcttcgcagaagagctcatgaagaacgtcgcttacccggtttctggctcttgaattggcacttcttcttcacggctatgttgtttgtctatggacgcatcattcaacagcagctagtcaacacggtttcttcagatagattcatatacaagcttgtgagtggtcttatcaagtaccagatggttatttgctacttcttgtacatcgcaggtttgtctgtttcttttttcttcacaaaaacaatactctctttcttgatttattaacagcttaagttggattcaggtctcatatggtttatccttacattgaagaataagatgtataagtatcagtttgggcaatacgcttggacacatatgatccttatcgttgtctttactcaatcttctttcaccgtcgccaatatttttgaagggatcttctggtacaatggactcttatatatatccactgaagcataatagttttcccgagtgctaatttcttttaaatatgcaggtttcttctaccagcagcactgattgctatgaacgatgtagcagcttacttcttcggtttctatttcgggaaaactccgctcatcaagttgtctccaaagaaaacatgggaaggtttcatcggagcatcagttgcaactataatctctgcatttattgtaataaccttcttctatcatttattcattcgttcgtaactctttcttttggtctcaagactgatagattattatctgcttcgtacaacagtttgctaatgtcttaggccagttccaatggcttacatgtccaaggaaggtaacaaaaagtgatatctccatcacaatattttgtctcggcctttacttcatccttgtgttgcatatcttttgcaggatttttcaactggttggcttcattgtgatccaggccctctcttcaggccagagtattacccatttccctcttggattactccatttgtaagcaattaactgtcctctcgtgaaaaccagccgatgatgttgtcttgttttgaaactgagctccgttgtgaactttgcttaacagtctccatggaaagggatctcgaccctgcctgtccaatggcatgctttttctctcggtctattcgcatccattatggcgccttttggtggcttcttcgcaagcggtttcaaaagagctttcaagatcaaggttaacacatttttcaaacattaaaaggttttgtatctacagatccaagaacaaatatttactagtttatgtcgctttgacaggatttcggagacagcataccaggacatggaggatttactgacagaatggattgccaagtaagagtcactaacgtcgaaaagtgcaatatgatctttgcatcgttttaaacgaatcttgttgcctaaatgcagatggttatggcggttttcgcatacatctacatccaatctttcattgttaatcgggactacagtgtcgagatgatcctagaccaggtaagaatcatcatataagccaagaatacggaggcattgtaaataattgattgtattatacctgcagatatcgaggagcctgggacacgaggagcagaaaatgctttatgaaaagctcggagacattcttcaacataagttgcaagggaggttttaaatagtgagtgcaagttttgtgactctgttttcagcttctttctctatggttagtttctggttgtatcagaccatgtaaaaccttgatttgtatctgatttaactaatcaaacagagacttggtaatagtgtgcgagtagaagagatgtaaaatgatattttcctcgttcaattatagcatggagatagagaaaacagacacagaagcaggatttcccctgcaaatgccatgtccagcaacttatgggagatcttgttcatctaatgaataaccaaaccacaaaagaaaactatgactcgaagactcgagaagatgttaatggaaacatagaaccgtaacaaaatttatgaaaaccagctgacttcttcttaagcatcagactctttcttttcttcttggttctctcctccctgggtaacaccaacctcagctggtcttataactcggtcatacagcgtgtatccagactgcacatattgacacccatcattactaattggtatttaagactatacaatatgaaataaagagacaaagaattgagcaagctttatatatttaccttcaagacatgagcaactgtgccttctggcttagaagcatcagggacttggaacactgcgttatgtctgtttggatcaaatggctcgtttataggatcatacttctccataccaaatttcttaaatacctgcagcggcacacatgtttaaccggtctcatctgcattgcttacttaaggtcttataattacatttctcgatatttacctcagcaagctgtttctcagtcatctccactccttctaaaagggtctttaatagtggagctgctccagcagaatcttctgaggtgtcaagctttgagaagctttctttgacaaccgaagaagctcttccaagattatccgccacatccaataggctctttgcaaaattctgcatacatatatagtgaatatatatatttcagaaaactattatatgaaacaaaagctgcaaaccaagttcttaaagactaacctgtacggcatactttttggtgttttcagcatcacgtcttgttctgtccatgacattctccatctcagcataagtgcgaagaactttgtctttcaactgcttaatctcttcttccttctcagacagtagctcttccttctcagctacgagcttcaccaaatcatcggctgacaattcatcatcatcactctcagaatctgattcagaagatgaagatgcagctcctttagcacctttccgctttctttttgcagaatctgtcacagaatctttagattcagagtcaagacctggttggtttgcctcagctgtaggtttctcttcacttgtctttgaggcctcagtgtgggtcttcttctcatctgattcaggcgaggtagaggaagaaaaattgaacctttgcagtgcaaacgaatccatcatagacatctgagctggaacaagctgcccccaaaaaaaaaagtaaaatgggttaaactcagtgaaatgatacagagcaaaaacctatagagaatctaaaccattcttctattgtttattcatatatctgaagattcaaacataagagatcaaggaaacagtatcagaagatagcaatcatttctagaaactcaaatgagggaaagccttaaaccctaacaaaaccctgaattgcaatttcggcatgaatagtgattaatttgagtgaaaatcgaaccttatgcgagaaatcgtgagctagggagtgaaaccggctcgagaaaacaggagtctgattcctcgccggaagagtgacggcggatagagatgagcgtatgcccgcgttgcgggttactcgcgacaaaattctcaaaaccaacatctggagatccaccacagatgaacaaacagagatcaagaagataagagaatcgaatcgaatcgaaatgtaattgttctgaggaaattgttaatttgcagaggcacacagagtgcttggtggatggatagtagaattcacaattctctctttcggggtttttagtaatttacgtaaatagccttaccgctgcacgagcgggctgaggctaaaatgatcgctttgattcggcgagcctgtgagggtattattgtcattatagcaaatgggagattttgaaagctaatttgagaagcctctagaaagaaccaaaggtacttgtatatctttgggacagacgaagtccatttatctcctgggcctgattggtacagtcctaccaaacagaacaagcagcagtatgttactgttgctaagtggtttggcttttttagtttcattcttgtgtttaattaaaattgctggattaatatagaggttgtgtagatttgacgtcatttggatgggagaatttggaaattaatgttcaactacttaatctataattcaacaaacgataaatgaccacttaattgctaatagcctctagttaattcaaaacgcaaacctatgttatgaaccacttgtcaataaatttataaatctttagttgagactcaaaaaacaaagttactttatcggaaatgtcacatttgacgcatgagagacactttcttgccgttacttgttattgtcgttgcaacaaccaaaactatggttgaactaaaaagccccaaaacgtgcgacacagttcacccaaagtgcaaataatctttacattcaagactctagactcagtaagcaataaaaacagtaagtgatacaagaacagagagttgagttttgagcgtgaatccggtaaaaaggaagatgcgttacatatacatctgaagcttgcaatggtacgaatccttctattttaaaatattctgtctttctctcttttttagtagctataaatacggctctctgctgcacaactattattgaaactctcaatcattttcagctcattactcacctcaactaactctctgtggccaaaaataaacagagacatatcagactaaggagtatttaataagcatcatctaacaacaggccaaggtattaactacacgagctaaatctgttttagtcaggtttgatagaagatacctatctttctccatcttaaatgcttgctccaattgttcttcccaattaatcgtgaggttcttgttttgcagaagcaaaaaattgaaaaaacttgtgtaaaaagcatgcagcgaaacagagttcttgcgttcttgttgctagcagctcagctcttggtgaagatacctgaaacgtgtgcaaaatttcccgcacttatcgtatttggtgactcaactgttgattcaggcaacaacaaccagatttctactgttctgaagagcaatttccagccatatggccgggattactttgacggcaaagcgactgggagattttcaaatggccggattgcaccagacttcatttctgaaggtttgggactcaagaacgcagtccctgcctacctagatccagcatacaacattgcagactttgccactggtgtctgtttcgcttcagctggaaccggcttagacaatgcaacctctgccgtgttagtaagtcaagcatagttatatatcttacaacatatatatattctactgtactggacttagatttctgacatgctttctctgaattgtcatcgatttctaaagtctgtaatgccgctatggaaggaagtggaatactacaaagaataccaaaccaggctaagaagctacttgggtgaagagaaagctaatgagattattagtgaatcactttacctgattagtatcggaaccaacgatttcctggagaattactatcttcttccccgcaagttacggaagtactcagtgaacgagtaccaatatttcctgataggaatagcagcagatttcgtgacagatatatacagactcggagctcggaagatgtctttgtcgggactctctccttttggatgcttacccctggaaagaacaactcagctcttttatggaagcaaatgtattgaagaatacaacattgtggctagagatttcaacatcaagatggaagagaaagtcttccagttgaacagagatctgaacggaatccagctggtgttttcaaatccatatgaccttgtttcagaaatcatataccatcctgaagcattcggttagtacaaagttctaacaaaaatattttcccaaccattgcaaccctgcaaagacatagggctaagtttcaatatgtaccaaatgctcttaaatcaagaattcttatgataatattcctatgtgcattgcaggtttcgaaaacgtaagaagtgcgtgttgcggaacgggatactatgagatgagctacttgtgtgataaaatgaacccattcacatgttcggatgcaagcaaatatgtattttgggactcatttcacccaacagagaagacaaacgccatcgtagcaaatcatgttctgaaatacgacttatctcggtttcagtgataaaataagaaattgctacaccacaagcactatagttattagttaacctactaaattctttcctccacaacatatatatttttttctgtgagtttcttgtctagatatcactcaaatcaagcttccaaaatgttgtacaagaaccattcttcttactctatgttcgtgtgactacataaagatgctactgtgatgttataaaaatggacaagatcaaactttaaaatactaaaacagaaatggaagtgaatcatgaagccagaaaccaaaaaagctgacatttgtgactcagcgtgacaactaaatcaaccattttgctcaccaaaatcaccggaggaatggcccagagctaagaagatgcgaaagccaggttcataaaagaagatgaagaagaaatcaattgggatcacagtgagagaataacaaatgcgacattttcgacaaatcctttccggacgagacaagaggatgccattagagaaaaggaggatcgaatcgaaattgtgcaatccggttcggtttcgtcgaaccgttttaagcgtttggttattaattttgtacggttttcgattattgtaaaccaaaaacctaaaaaggctcgattgtttctaaaccggttaaagttgtatttcttctctgttcaattctttcagttctctcaagtctcaaacacttcaacactgtagggtttagggtttatggtcaaaatccctgagacagaatttgggaacgaacccaaatcaagctgaagtcgaaacgattggatgcggtggtcgattgcgactgcgattgcttcaacggctaaggggtttcttcatcttcatcaccattttctgaagaacagtaatcctgggattgttctttctccgtcgttgagatttcgtttctgggtacgagctttttctggtactactattgattatcgagaggtattgagaagtgggcttcacaatattaagttcgacgatgcatttcatttgttcgtactcatggcttattcttaccctctaccttcaattgttgaattcaataaagtattgactgctattgctaagatgcagatgtatgatgttgtgattaatctctggaaacgtattgagaatgctgaaggtattgaaatttcacctgatctctatacttgtaacattttggtgaattgtttctgccgctgctttcaaccctcttcggctttatcttatcttgggaagatgatgaagcttggtattgagcctgacattgtgactgctagctcgctggtcaatggattctgtctcagtaatagtattaaggatgctgtttatgtggctggccaaatggagaaaatgggaatcaaacgtgatgttgtagtcgataccatactcattgatactctttgcaaaaatagacttgtggttcccgcgctggaggttctcaaacgtatgaaagacagaggaatttcaccgaatgttgttacctacagctctctcataactggcctttgtaaatccggtagattggctgacgccgagagacgactgcacgaaatggactccaagaaaatcaaccctaatgttatcactttcagtgcattaatcgatgcatatgcaaaacgtgggaaactgtcgaaggttgatagtgtgtacaagatgatgatccaaatgtctatagatcctaatgttttcacttacagttcacttatctacgggctttgcatgcacaatcgtgtagacgaggccattaaaatgcttgacttgatgataagcaaggggtgcaccccaaatgtagtcacttacagtactcttgcaaatggatttttcaagtcgtcgagggtagatgatgggattaaacttttagacgacatgcctcaaagaggcgtggctgcaaacacagtctcttgcaacactcttatcaagggctattttcaagcaggcaagatagatctcgctctaggagtttttggatatatgacttctaatggtctgattcccaatattaggagctacaacattgtgttagctggtctatttgctaatggggaggtagagaaagcattgagcagattcgagcatatgcaaaagactagaaatgatcttgatattattacatatactatcatgattcatgggatgtgcaaggcttgtatggtgaaagaagcatatgatttgttctataaactcaagttcaaaagagtggagcccgattttaaagcatacacgataatgatcgcagaattgaatagggctggcatgcggactgaagcagatgccttgaatagattttaccaaaagcacgttcgccaaaacgaaagcgcaccagctgaagtatcctaggagaattttcttgagagacatttacagactcggagcttgcaaagatatctctctacaggctccctcttatcggatgcaagaacacaaatcttgatggaagccagtgtatcaaaagataccacgatgtgtccagataattcaatcgcactgttgaacaaggagctgaacaatgagcggaaacaatcgcatggtcttagaatcatgaaaagtcctgaagtatttggttagtaataagctttctatccctcaaaagacatacactaaggtttatgagtatcaattactcttttttatcaagaattcttctcactgtgtttttaattctcttgcaggtttccaaactgcatctggatactaggggatgcgctacttggatgatagattgaaccctttcacatgttgggatgcaagcaaatatggattttgggactcctcatgtatcccataccacaaacatgttccttaacatgctacattctttcttctactaacttgctctgtttctgagttgtattcgttaccaatgatcacttcaggttgcttgatattatttgaatcaagcttccataatgtttgtaaaagaaccagtttttcccactatatggtggaagtgtgtaagtacttaaagatgatcttttgatgttataaaaaacacagcaccacccgacaaggagaaactgtttacataagaaaacagaaatagaattgaatccagaatccagaacttagaagtatcaatcatatatctttaagcatcacagaacaaaacgaccccaaagaagcaaaagttaaattttctgagaattcttcttttgttctttgggaaaatgcaacttgataagagaaggaagatcgactagctccactcgctgcttcccgagcaaaatgctcttgagcttctcatcacaaatcaccacattcttgttcttaggatcctgtaagaaacaaaaccaatcagtcaatgagacaaaacattttaaaaaaaaatctttagcttaaataacttaatgatcaaacctgaagattgttggtcttgatataggaccagacacgcatgaaacaacccagacgggaaatctgagattgaccaacaaagttccgtagagtagatggaagattcacgaggtcaatcaaattcccaagcttctttggattatccgttatagccttcttcaacctctggggcagcatcctgattctcaacccacgagtaaaccagaaattcgactgccgcggaaaagcaaaagagaaaaaacgttaattaccactgacaatccctttggggaatttcatcgagcatgtggcgtccaaatgaaaagcaaacgaccctacgtacaaaaagctttttaagaaagcttacccgtggaaatggtagaggaaattgaaagcaacaagtccgtgtaaaccaactgactcgcttttaacccgtaatgcttgcgatgttttacgcttcgaccttggaggtattctcgcgtttgaacgctggagctgcgatagagtcaaaaagtcttcttaagaacaaggaagagactacattgtgttactttgtgacttgactattgggccgcgttttcttttacatttgggctgaataataatatatccttgtgacttggaatgattgttgtggatgacgtgtaatgcaataatttagtttaaacaacaaaatcgtcatactccaaatcttcaaaatctcaattcttccgtttagtttgtcaaaatcaattggaaaatccaaaacaaatcagcgtgataattattccattaagattctcacaacaactgttttctctgctcttgtggatatgaatgtatcaagcctaatttctaaaggtcatcgattgtcatcaaattaagcatatcactaatattgtcatcaacaaaaaaacatacataattaaacatcattgaccagccgtaagtcatctaacatcacacatccctaacaaattgcaaaaacaaactctaattgaccattgttaaatatctaagacctaaggatatttagggagacgtacactgcatactagtcgaccatcgaatgacaaaaccgatctatttgtcccatagatctcgtcatcaacattatacaacttggcacttacattctcacaaacggctgacatgtactgttctccccataaagcagaagttcctggataaaaccctactctcccagaaaacaccatatcaagacccaccacacctcctgtcaccgccacttcatcctccatttcccaagccgcctcttcatcgataacttttgtttcgtttctcttgacaataacctcgttcttctctccgcctttctgccagaacgaatcagctcttgcggtcgacacgagctttccccggtgaaccagccacactgaaggattctcgtacgtgacatggagtttctcgttagggtttttgatagagaacgttgcggaccagaccgggagattgtggttggcgaacgatatatgcattgattgtacgtgtactgtggggggagttggcgtaatcaatatgacaaacgtcacacctgctacacaagcacccatgatcgtgatggctagaaagagtttgaaaagtagtgaccagtgtgagatattagctggttcggattcttggtggctccgtgatgatattggtcggagttccgggactttttcggtatcaatgacggttatcagaagctgttgattcatttcttcaaccaggttttgttcatcatccatattgggatttatacaagtgctgataatgtttacttgtttatatgatgatatctcaaaacaattagagaaaaagatttatctagtagagattataaaaattaaagatattaataattaaaatctttatcattttttctgattgtatatataatagataaaatgattaataaaatcattgatttctataatctcaactagatgaatcttttagtttctatagaatcattttatccactatacaagattttattccttctaatatatataccctgaaattctaataataatatactagaataaaatatactatttttgcaacataaaattcattttgtttattatgtcaaacttcagcattcatgcaagattttgagaataatctagtgatgatataattttaaattaaaatatataaaatagttcaacaaagttaatatattttatacacaatataaaatatatatatattcccgattagcaaacaatgtacttaataaatcaggcaaaaaaaaaaacacagaaaattgctgccaactattccgcctcaatgtccggtgggaaactcgcattttccatatcctgcaatcaacgaaaaaataattttgttagaattatataaaaatattaaaggtcaccatatatatcgatcttacagaaacgtgaacatcttaaaaggccaaaatgacccaatatagctcaactttcacaaccgccaactactaaaccatttgccactatctttttctttttttcaataaacataccaaatgaatttttaagcataaataacagctaaatatacacttctgaattgaactaaagcaaaatatgtaatgttatgataaaaacagaggagagattagattaacgtacgaggaggttgcgtgacgacgtgagcagctccaccaaagaagcacgtaccaacacgacgtgagttcttctggtagtaactattgaaggcgtacgaagcgtgagcttctaacgactcaggatgataacacgtggcacctggctgaatcgggcggcaatcagctcctccttctccgcaagcgtaatcaagagcctcctgaagtttctccttcgctacctctccgttcgaaacgcaccatgtatgtccctcgtgcgtcaccggaactttacctctgttaccgttgaccggcgtcgttgactttttagtgaacggaacgttgtacactttcccttcgtttgggtaaaacaaaccgtagtttctctcagacgttggccccggtttctggttttcgttgaataaagcgaataaatagacgttaagtggctccgtcggtcttaacggtgttcctttacccgttaacactctcttcacaagtccggcgttatacgccgccgcgttagattcgcttgcaccaatctcattctcatctccaacggaaggccaccctgtttccgtcaccatcaccttaacgcctttaaatccgacggcggacaatgccgcgtaaacggcgtctatttgagcgtcaaagagactgttgtacttcaatccggtaccggaatctatattcccggcgttttctttaaacagagcgtagtctaaagagattttatcggcgtttgctgcgtaagcgaaaaacggataagcatttaccataagatacgacgacgtttgttgaagcagagcaagcattggtttaacaaccggttcgattaattccggtttaaaagaaccagaggaaggcgggtacgaattagcaagcgcgctaagagcaataggagacgagatcttgatggctttgtcgagtttatacttaaccagagaggtgtgaatgttcttcatcgcattgacaagatacggcgtgatcgtcggatcgacgaatacttcgttaccgacggcgatagcttcgatctccgtcgctgggaagtatggcattatgtgggttttaatccagttgtcggcgaatgattggtgggaggcggcggaggagagaagctcgttagggagagcgacgattactttgattttggaatttgcaagtgcggttagtacattcttatcggtgtcgaagattttgatacggttgattccttgagatttcaggaggttcactactttctccggcgacgggagattgttagctatccgaccataattgactccgaccattccagaatctgtggaaacaaaaacaaaaaaaacgcaaaataagaacaacgtagtagacacggcaaatacagagacagacataggtatatgaagagattaaaaactaacgtgcgtcaatggctgagaggaaggaaagaatcagaaaataaggtaagaaagaaacggccatggttattctcgagtgtatcttcagaaacagagcattaaacgcatagatgagtgtcgtttgatagttatggagacgaaggaaagtttttgttgcgtttgggacggagctggtctacagtatttatacgatttaggtgtaaacaagtgccaagtgggggttgtgggataactaataacacggaagaatagctgaaataatagatttaactaaaactgtataattttaaagctctatttatagcaaaaagttttactttaccataatcttcagttaaaggaactctctataattttgatgtttttctaacatatgaatgttttcatagttgattttggttataacagaaacctaacaaaaaccttgacttttattgtttcttaaacaagagtcaagacctaggttctttatatgttgcattgcgcatatttcgttaattcatcatcatttctttcttttgtgaagagtgtgtgacagactttatctccttcaactaatcattttgttaatacacaaagtgacatgatttatagatttaacaatttatttatttcttctatgtcaaattgtcaagtcttcaacagatgatgaaatcatggagagtggtggataggaggactcacgtcacgtgagatcaggaactgcaacctaaaatatttaaccaaatgaaattgtctagtgggttagatgtggcccaataaaaatataagcccattataacgaaacgacagatttgaacataactagcagccgttggattaaaagagaacctagagagaatatgaaccgttggatagatgccctacgatttatgatagagaggaatccgatgcgtccaagtacaaaagccacggccaattagagagattttcagagtcagtctttttatattcatctctcagcatcattctttgattgtgtgaatctctcatcgttctctcaaatttcgtgtttttgtaaccggacggagaacctttcacgatgtctgcaaaccaggaggaagacaagaagccaggagacggaggagctcacatcaatctcaaagtcaagggacaggtatctctctttctccttctcatccttgtgtgttcttgtgaatgtttgggtttctgatttcgtgtagctgcgattagggtttttcattctccaatttggtttaattttagggtttcgtactactagctcagtcttaatggtcttcttcctcttttgttttacaggtttaaagtatcctgctttatgtttacacgtttgcttgtttttgctaattgtttatcaaatttctgaaattatataagtcttgtttaggtgtaagttgttattgagcttttggttcctgttgttgtttgagggttttatagttttggaagggataagtttacttagttgttgaatgttctaaagactgtgaacgatgctgtctctgtactaagttgttatatatcttctgatgaagttgtagtctctgtactaagttttcaattagtttggctgatgtttgtgcttcaaattctcatagacgaagccttaaactgaatgtttgttgatatgtgtttaatttttcgactctttcaggttactaccaaaagagagccatgtgatttagttattgtttcatatgcggtctctaacgtttattgttccttctatatgtttgttttataggatggaaacgaggttttctttaggatcaagagaagcactcagctcaagaagctgatgaatgcttactgtgaccggcaatctgtggacatgaactccattgctttcttgtttgatgggcgtcgtcttcgtgctgagcaaactcccgatgaggtataacattcattctacatgctttatttcttaccttttgaagtttatagtttctgatactaataattcttgacactacagcttgacatggaggatggtgatgagatcgatgcgatgctccatcagactggtggcagcggtggtggtgctacggcctgacacttcgtccaggtttagggcttgtgtgtgatatgaatggttaaggagtaatcggcattaggatttgcagacttgtttttttatcgtgaccattctctttagaaactaagttattatggtcacgaaggttaaagaaccctttggttgattttttgtcttgttcgtttggtatcggatcctatgatactactatttcggcttaaaggtgttattaacccaattatctaaagtttgttggtatggtaacggtaaaaagctattaattattgaaagtgtgactcttaacatatacgtagctcattgagctaatggcgagcaaagataaaatccatctagtcaactaaacaaaatattacttaaacatgaactagcatcgagttagtgaattatagtctatagaggacgacttcataaccagagcttgtggtggttatagccaagacaataatcagtattattactctctctcgagtctcgagctgtaaaaactaagtgtctgaatcttaacatggttgttgatggtagaaagacttggttacaagtaattagttggctgaacctgaaccccttcttaagacatatcctttgaataatcaaatctatacaaataataatcatattagtgaagaacatatataattcataaacaccaactcataacaaaaaacaaagaaccagaagtctaggcacaaaatgcccacaaccatcatacataaaccaagaagcttcaaatgcaactacaaagagagtttgcttatttaggcttttaattatacatacaaaccaccaagtcaccatattgttcactgaaggacaaggcactcggcggccgtcccatttgtgatcggacctccatgggttctgttgcttttctggttaacattgccactagagttttgctgatgaactatggttccttcaagatcctcctcttggttactacaacctatggcttcaaaggcgagagcagtaacctccttaaacctttcctccgacagagaagcttccgcaaggagcctccacgcgttatcctctgaagcaccttcgtaatcctctttcctcttcagtaccatgtgaccacttatctcccacacggctgggttcacttgtgtttccaatacctccgggctcacttcacctagagcctgtttctctgcgtaacactgcaatttttacattcaaactgttattcacttttgattaagtaattcaaaacatgtattcatccaacggtgtagttatatacctgtggcattaagaagatctgccttccacaatcagagatgagaatgttgaaaggaatgttgttgttttgaaggcaaacacagcagtctgaaacagtatcagatagttcttgcatagagcttccaccttcaaagagaagacttctcacagggtaacttagaagctctgagattttgacaccactaacagtggtagttatcttcttggtaggagctttctccagtgggaaaggcatggccaagtaataagcctgtttccaaaaacaatcaccaccaaaacaatcagaacaaacatcttagatgagcaagggtgaaaaggttatgcttggatcacttttggatatacctgaaagtggagatgattgatagtggcaaaagcacccaagctgttgtaaccgagtctgaagtatggattagcagcctcagcagccatgtgaactgcaagcaaaaggcttttgtgatcgatcctttgaggcaagcagtcaagaacacgaggaatcagcagcacatggccatactctatcggactaacctgttaaaaacaacaataaagaattaatcttttgctagcgaaaccaataaaaggaagaaagaaaaaaccaagctctctgcacaagagtctttacattgatggcaacaacactgggagaattctcagggtcaataggcatgcaagggaagaactgaacttgggcatcttcaccagcttcaaactggaagagcaactcttcttggccaactttagtgaagttgaatttgctgccatcaaaagactgcaacaccttatctacacggaactcagttggcctcttcttcaagtgacgaccctcgttaagctgagcaacgaaaccatacttccccgggataacctataacatcaagagaaacaatcttaagaacaatgtaaaacatatctcggattcctcagcaacaaacaacccaacataactagattgtcaaacaaggtaagaaagacaattactttggtttcgcaggcagtgacatcatagcgaaaaagtcctctttggaacctatcctcccactaaacataagaatactgattagactcttccaagctacagaaaccattatcagaatatcaaaatcagtggtctatgatttacctctccgagaacaagggactcgagaaaagctacaggaggctctatagcctcatgactgattacaagcttctctccggattttaccagattcttacatgcatacaatggaagcctagcccctgaacaaacacatcataaggtgaataaaaaaaaagtgataaaatttaaacatgattaaaaaagacgattcaggtttccaaaacgtaccgttaaggcaacaagcgccgaggcaattccgtccacagccgacgggatcctccgctccatcgtccttctggtagttcgaaacaacggtcggaactcttttgattttcaacattctcaaaaaagacaaatttcgaagagcaaaagaaaaaacttcccccaagaaaaaagcgattcaagagcaccaaaaaaagaagaaggaaaaaacactaacaaaccctaactcctaaaacctaaaggaaaagaagttaaagctggaaccgccaccggcgagaaagaggagatcggaagggctgccgccttcagacggcagagctccacgtcctccgtgcggcaaaggattagtttcgattaaacaacccttctgtcggacaatatggacatgtgagctaacaccccgtgatatcccgtgtatagccgtgattccgatcacctgttccccggattttttcaaatcgaacgccggaaaaaaagattacagctaaaacgaacccgacactcaaaacagcagaaacgaaacgaataaatgagagatcttttgatgtgggtttttttcacaaacaaaaatttgagaagatgcctgaatgaataattctttgaggtgttttttgatgatacagtgttttaggatatcgaatgggctttaaatagataggagatgagtgaaccagagaagacagacgacaaaattttaattatatactaatatttctctctttttttctgtggttgtgattcggacgtgaaatttcttaggtcctttcttgtggattttattttttcatcgatattattttgtctaattgtatttttcttctaatctaattagttagtttgattaggcaaaggaccaaaacaaaaatcttattcggaagataaaatgagatctaagtttgataagattaaagttggaaaaaatatttttgcatgcaattaagaaaatttttattagtcttgggagaaaagttggagcactacattttctttgagagaaaaatagatcagaatgaactaaagaaagatttaaatcttgtgtagattggaaattgagaactaattgtaactgtgtcttacaagtattttcaattaaatttgagataaacaattgctaaacgtttatccaaagagaataacatttgctaaacctagttaaccttatgaattatgatatacgtatgtttaatgccaattgattatgaatttgaatttcattgtatataatcgtagatcgtagtttgctgcatgtaaacgagactaaaaggatggaggcgatgaagagttcatgtggcatatgtcttcttatgatgtcatgtgaagtcatgtgttatgccacgttttatattatcatagaatattattattatattaacgaaattttctttttgactttttctgttcaacattaatttgtaaatttatgttgtctttatagataatatttacatggtcgtgtttattcatgggacgggggtgtggtcgtagcaactactacgaggctcaatttgggcaaatgactaccatcgttcgttcggtcgtttttttgcgaaactatgatataatttttaaatacatatattgagaaatatttagaccattgctttttgttcgttattttatgagacaaaactacaaaataaacaaaaaaaaaaccaaacaaggcaagaaacacaagttaagattcggaatctaagaaaaggatatagttcttgaaccacataatagtggtccattatttatttggcagtctctacgactacgatcgtacgtccctccttccatcaccgtttgttttatttattgtttcttttctttttttactttaaacaaccatttatcatgttttaagacctcgacatgtaattcgaattagtattgcattaagatttaaagagttacggcggtggatcggtggtagtcagtgcaagtaacggatcataattgcggttgaccaagcctctttcactggcctctttgtaaccatgaaagctgagatgctattggtacaccactaagtcccaaattcccaataatcgtgcgtcagtaaacatcaatttcgagaggacaagtatcaaaatgcgatatctgctgttacaaatattcaactcagttacaaagcccttaacaatgtattgatttctaattttctataaagtaactttgtgaatacacctaagtttatcaatgaagaataaaattgtttaaaataatcgacaaaataacattatacatgaattttacaacaagtgtttgagcatagtagctaagttgttttcttggggtactctcttggtccgaaaatggtggaaccaaccctcacattggtgcttcccatctcaatctgcagaaacatagtcaaagatcatcttccacatatatgtggttcctcggatgaaagaaagaacacattcaaatgattttcgatattgagttgattgcattttcgatattagaagagagacaaagatattaccgctagctcgaagtcaccagacatgcccatggacagttcaaattgatcctcagccattccaagtgccttgcatacatcagctctacagtttgaaagtgtctgtcccggtttatggggaaaagaataaaccttggtaagtaaaacttgtaggaataacccgagaacacgtaaaacaagtatccaatcaagtagtagaataccctgaagttctctggggtagacgtataatcaggcatcccaatagtcattaatccggagaataccagatttggacagtgatgtttcacatgtcttgctagctctacaacgctagaaggttcgattccagatttagctgcatccataatcaatcagtcagccaactgaagaggctggacaaggaaatcagcatagaggtaaaatactcacaaacttctccgcttgtgttcacttggaccaaaacctttagtggatgtctcccaagatttgaaacagctcgatctagatgatttgctacctgtgaaatcaatcccaagtgattgtataaccaaaataacctcctagtaaagtgaattgtgcaagttaaacgccacaacaacctctaatcgctagttataataccttttctccatccacaccatgaaccattgccaaatttgggactccagctgcaaacattggattaaacgactttcactttcactaaacccctaattcaatattaaagatggggataaaagtcagactcaatagcgttttggctttgttgctctgtaaatgccccacgaaatgccactctatatcttccggaagctgtatatcaatcaaacaaagtgaaggagaagctccattagcatcatcaaaagcacaaaatatatcacattcccagaaaatggagagacacatagtagttagtgattgaaggataaacattcggattttgaaatgaaatcgattatctagtgaagataacaaggattggagagaggaacctgtggagctttatcgatgatttcttgaacgtaattctcgccgaagcaacggtgacctgcgtcgtagatttggcggataagtgagacgggtttagtcttggagactggaaggaccctgacccgctcggcatctcttcctacttgctccgccgccttacgagctctaagaatcacagagcggagagcacttgcgacggttgcctccaccgcaggagctgccatcgccaatcgccactaacgcctgtcgtcaatttgggcttcttcgggagtaatgtttttgtcacgtaaattagtttatggcctttaattggataattcacggtccacacgttcaatactaattgcgattatttatctcttcacttttaatcaaaatttccaaggcagagacacatgtaagggttgatgtatatagtcatcaattcacgagattattggaatctttattgcataaacaatatcaaaattgtgtttttatatataccctttcaaaacgttatgggattcaaaattacacccacacccaccacttattgattggacataacatcattcaatgtaaaattacacccacctcttattcatgttttaattttcacttctgtatatatttttcgaatttcatgtattctgtttgtacttttttgggtcttatgttaagcccatttgtgggtttgtaaaagtctttgacaatatccaataaatcagtgaaaaaaaaaagaaaaaaaaaattattatcactgtaaacttcaaatcaattcaacttgtgctttacatgggtcttcgctggaccaatatgttttgtgggcctttcaagcccaacaatagttatctaccctagctcaaaaagagttatcttattctcattctctctctctctgccgcagctatcaatttactggagaagagatggtgggatcagaggttttggaggaatgtggagaaaaaataagcaagaaagagtcaaagaagcgagccgctaaactggagaagttgctccgtaaacaggaacgagaagaagccacatcatcatctctttctctggaggaggaggatgaatcgtgttccagcaactacggtgacgtgactactaacgagttgcagtcggctgttgagggaaaagagctcactgatgtgagcaacttggttgaagagattgtggggtcagaggtttcgatcagaggtcgactgcacaagaatcgcttagtcggtaccaaattgtttgtgatcttgagggaaagtggattcacggttcaatgcgtggtggaggagaccagagttggtgcaaacatgattaaatttgtcaagcagctgagtcgtgaatctgttgttgagcttatcggtgtcgtctctcaccctaagaagcctctcacaggaaccacccagcaggtttcctttttttctttgattgattcgaatagcgacatacatgaactcatcgataatgttgttgcaggttgaaatacatgtcagaaaaatgtactgcctcagcagatccttgccaaatttaccacttgttgtggaggatgctgctcgtagtgaatcagatattgaaaaatctggcaaggtagaataatgttttaagatttggagctgcttatgattatttatatattccttcataagagagctgctgcaggatggcaaacaagctgctcgtgtccttcaggacacacgtttgaataatagggttcttgacatcagaacaccggctaatcaagccatcttccgtattcagtgccaagtccaaattgtaagctctgatttgatatgcaacatggaggattatagctagttagtgtcaactaggatatgatttgtcattatcctaatagttcattgcatgatttaattgtttgtgtaggcgttcagagaatacttacaatccaaggggtttcttgaaatccacacaccgaaattgatcgctggcagtagtgaaggaggttctgctgtgtttaggttggactacaaagggcagcctgcttgtctggctcagtctcctcagcttcataagcagatggcgatatgtggtgacatgcgacgcgtctttgaggttggtcctgttttcagagctgaagactccttcactcatagacacctgtgtgaattcgttggtcttgatgtggagatggagattcgaatgcactactctgaggtatgtatgattgtgctactgttaagatattaataatatttcatctcttcactagtgcttataattggtgcagataatggatcttgtgggggagttgtttccgttcatattcacaaaaatagaagaaaggtgcccaaaggaacttgaatctgtcagaaagcaatacccttttcaatctttgaaggtaatctatcttttggattcttaggaaaaaactgagtttcttttgtgttggatactgatgattggcactaaacttgtagtttcttccgcaaacattgaggctaacctttgcagaagggattcaaatgcttaaggtatgacaggattttttttgcatccaacttgatgagttagactatgaataaataatagttgggtcatcttgacaggaagctggcgaggaggttgatcctcttggtgatctaaatacagaatctgagaggaaacttggccagcttgttctggaaaagtacaagacggagttctacatgctgcatcgctatccatcggctgtcagaccgttctacactatgccctatgaaaatgattctaactacagcaactctttcgatgtcttcatcagaggtgcgtgcatctatgagtttgtcacccaattatgttacttctacacttgatttaataatactaaatttgagctttctgtcttataggagaggagatcatgtcaggagctcaacgtatccatgacccagaactcttggagaagcgcgcaagagaatgcggcattgatgtcaagacaatatccacgtacattgatgcattcaggtaaccacaaactgatcgatccagttgggttcctactatgagttgagttgagttgacgagtggctgcatgtttacaggtacggtgcaccacctcacggtggattcggagtggggctggagcgtgtggtaatgctcttatgtgccctcaataacatccgcaaaacttcgctattccctcgtgactctcaaaggctcactccctaatatcattgctcttccctggcgactctcaaaggctcgctcccttaatatctatctttgataattgtccccgctcccgatttctaagttatttttttggtgcagttcgttaggtgtttagttatctttaaactatgtatgtgttgtaacctttaaattattaaggagcagtactatttgggctttttcgggaataatattttgtcgggccacaagattttcacgtaaattagtttatggcctttaattggataattcacggtccacacgttcaatactaattgcaattatttatcttcattttatccaatttcccattaaaaggctgagaggacatatatatagtcatcaattcatgagattattggaatctttattttgcataaacaatatcaaaattgttttattcttttatatataccctttcaaaatgttatgggatttaaaattacacccacacccaccacttattaattggacataacatcatccaatgtgaataattgtttaacctgtatatatatgtattagagtctttttcttctcttttttttttttgttaaaagagtgatagacttttaattagctttagtttaatttgttgtgtaatatatatacacccctctcttgtgatgatggatcgattattcacgcatagttacatagaccgtagacgcagaactcgcccagctcacacggatggttacactgtccacaatggcgtttatcgtaagctacgtaaacacattggccgcgacaacacgtctgtgagaacttgcatttgttcttacacgcgccacagttattgtcgtcactggacacgtctatgcacttattgttgcagcatgtcatcgtcgagttgcttcctccccctccgtagggggtacatatctcagggttcctgttgcaatggtctgcagcgttagggtttcgctcgcctacttccttttgagccaataaccggttcggccttatagtcggcgtactcggtgcatcaaagcttgtgtactctctaatggtggttgtattgttggttatggttgtgatgactgcgattgtgattgcggttgttattgcaatggacacgagtagcttcacgaaggccattttctttttgagctttagggttcgagagagagagagagattgttcttcttcctttttttctctttagaaatacttaaagatagaaaggattgtgattggtgaggaagtaggtgagggtggacttagtgtttatagttgtcctcgagtagagttgacgcaggaaatgcgatgaaaaaagtgattagattatcttttccgtttggctttttttaattatttctgactataataagttttcttgacgatagaaatttgaagtagaaaggaaacaataggaatagagctatatgcatgtacgttgctatatatgttgcgtgcattacgcctttcaaaataaagatacatacactaacaaatataaacgcaaacgaaccgcaagagatgatttacatagacatgaatgaatccatagccccatgggacgacctgaggcaattcaggcgagttgaacggagaagcaaaggcgtcgatccatttctttaatcgatctctttatttttcttaaatttgattatattgtttgcgagaaccaagaaacattgatctctatttctaatataggcaaaattattcgacaagccagctttaacttgtgtattaaaaaagctcgttcctccgtgtaaacttaattagccagcaatgtacatgaaatacgaaattcattacgtaagttcgaatatatagaagaaaagaacatgcatgtattagtacgttgacgattgtagaagattcagagagatgaagttaacatacgcgattcttgacacgaaatggttgttagcttttcactcaatttcatcgttgacgattttgtatgggctatggccactcgtttccaataggtcgtgtgtgcgttaattaagtattttaaataaataaataaatacaaatatatatatatatataacattataaatactatatcatttctattaacgtcaaaaatacacaactttacgtcattaagtcaacatcatttctattggctgtattatgacctctacaaattattaccgtacgtatactgacttttctattttgtgcatgttaatactcaaaccacgagtatagtctttcgtagtcggatacgaagcatgtataaacattctttaatatatttaaacaaaagaaaaagaaaagttttgttgatcacatacctctcatttttgttttttccgtcaatcacatacctctcattaggagggtgttttaaaattttcaaatctgaagcttccattattcaaagtctagcatgtgaagtgaaccctactaaattataaagactggtttaaaggcccatattgatacccaacattgaaattgtgtttccccccaccctatacttttgcaaaatcaatattactaaaactatttttacaatagcccatttgatctaaatttattaatttagtattaagcttgatacaatcatacaatgattaaacttcctaccgaacaagaaatatagtttcaagagcttattatagtttataatcatagcttaataacttaaaacaatttataaaaaaatgtatttgagctgaagttctcttaaatatgcttatggtgatgcaactaaccttcgttctcctatctttctttatttcgctttattttaaattacgccgcaaagtttagtggttagttcttatggctgcaagtcgtgagttatcataatattatatgttcttagttacctttgctcagtgattttagataactatctcatcagttcaccgtttatataatttggtttttagtttttacacgccaatatttatcaattttgttcgaaatcacattgttacttggagagatgatataaggagccaattcaagttagttcattttgtgtattctacgcctgaaattcagtaataggaatcatcttcataacttaattggtatctcactaataaacctgtcgccaaagatagtaaagtacatttgaccagaaaaaagtagcaaaaattataaaccaatcaaattctgcatcataactcataattaaggcctttcattttgaaaagaagtcacatgaataactgaccctaacataaataccaacataaatagtaagtaggctatatatacgcgtaattaagtgtagaaatagaaaactaggaatgaacataaacactagttttcatgtgacttctttcttatgttctttcatagttttccatttctacacttaatcttgcggttaaatgaatacacacacactcactcaatcttagacacgcattttgtccaaatcacatgcatgaatccgcgttttccatccaactattaaattccattttaaaactctcattccataaccgaagaaagaaaagaaaaagtaaactctgaaatccaactgtatcctcggagcaaaagcaatgacgaataaatattcccagcttgcattctaattaaagacattatcacttgcattcacatttgtgattccacctctcattttttactttttttactttacagcctcataaacaaataattaaaatttaaactttgatcagttacttaaatcattgtttatataagtcgagtgacgttaaaatggtctgaaacttgatttgatccacgcgcctccgtccactctggcttcatgccgtcaaagctgtctttaccaatttctctttcgccacgtggcttctttcacgcacttttatattgttgccacacaaaaatgcttaccagacttgatctgtgcgttgccaaatatgtacgtatctgtgtggttagtctgtccaatgcaattaaatttaaaacaaacttctcaatttaagtattacacaataagttaatgcagatgacttaacatgcggctgttgccaacaatgacaagtttgcactcactagatgacatttcagtttgcacttcaaaataactagtaaaaccatatacttaaacttccatttgtactaatttaataataagtatggtagtccttggtatgaatcatgctaattatatttccaaaactcaaacgacaagtgacgcttgtcataatattcaacatagattaaactgctgtaaacagtaaacaaatagtaaaataatttatctaaaaatagataaagtgaaagataagctaaaagtataattggaggagaagaaatcaacaacttaagaataaagaatgtcgtatccgacttcgaaccaaagccccatgccaaagtcacatacacacacttctacataccctaaacacacacactcgaatacataaactcttttctatatataaacttcttataagccatttgcttaaacaactctcaagtaaaaaaaaaaaatcaacaatctctaaactcttctctgttttctgatctgttccaatggagattaattggacaagaggaccaatcatcggtcgaggctctaccgccactgtctctatagcaatctcaagctccggtgagctcttcgccgtcaaatctgccgacttatcttcttcgtccttgttgcagaaagagcaatcaatcttgtctacattgagctctcctcacatggtcaaatacataggcactggtttaacgcgcgagagcaacggattggtgtacaatatactgatggaatacgtttctggtggaaatcttcacgatttaatcaaaaattccggcggtaagttgccggagccggagataagatcatacactcgtcagattcttaacggtttggtgtatcttcacgagagagggattgttcactgcgacttgaagagccataacgttctggttgaggaaaatggcgttttgaaaatcgccgacatgggttgtgctaaatcggttgacaagtcggaattttccggtacaccggcgtttatggccccagaagttgctcgtggtgaagaacagaggtttccggctgatgtgtgggctttgggatgtacgatgatcgagatgatgactggatcaagcccttggccggagttaaacgacgtcgttgctgcaatgtataagattggattttcaggcgagtcgccggcgattcccgcgtggatatcggataaagctaaagactttctgaagaattgtttaaaggaagatcaaaaacagagatggactgtggaagaattacttaaacatccatttcttgatgacgacgaagaatctcagacaagtgattgtttgaagaacaagacttcttctccaagcactgtgttggatcaacgattttgggattcatgcgaaagctccaaaagtcacttagtttcgattgatcatgaagacccttttgctgaatactcggaatctttggattcaccggctgatcggatcgagaaactcgccggagatgagttttcaagcttacttgattgggatacggaagacgatggcggatggattcaagtgagaggcgagaaacataaagaaaccgagaaacgcgacggcgacgaagacgtgatttgcgttgaagcaacgtcatcgtcgcaaacgattgaagaagttgaagattggatttcgaatcaagacagcttgttctcggaatattcctctgacgacatcattaataatttctactctaatgttgctattcaaggaaatttaattgcatttcattattgtactgatgaaggtgaaaatgtatccataaagaatatgtttcgtactaataacaaacatttgtttttcaaattgcaagctcatgttaaattcactaaccaagtctgatgaaacaatgtccatgtgttcaaacttcaaaataaaagaatctatgtacattagtacattacctaaatatttccaatgcaacatatgcgttaggttatgtgctaacgatcactattgtatggactctagaagacaattcaaattgcatatttcaaagttggaaacacaagtctttgtgttcttgttagaggttacgtcaatctataagataagattgactatagacgaagtcaaaactgtactttgtccaagatttatttacacacgaagtcatgtcaatacaattttgtgtgtgtttacctaaaccgcataagaccccgttatgttaacgcagacgactctctgggagtacataatcatagtcgtaaattaattactaagcaccaaaatacatatttgaacaagtaaataaaatgatatctaataactttagtcaactttcaccgtctgaaatctaaaaacacacatacaccgacactgataatttcgtcggtcttgagagttgatagttctactctatagacatgattattggagcagaacattcctactttgacaccgatacctaacaaaacaaattagtttatatcaataccgtacaatttattaggtaccgtttgtagaaatttgttgaaacattaattatatttttcttcccgtacttatccaaatacaacaatttaagaataccacttaatagaatgatatcctttggtcgacaatagctctaaatcactttcacttagtataaatgtattatgtatagtacaattttttttgattattttatatttaagtatttgtcttcttttaaatcattaaaacattgatatgaactgttgtaagctaatactattacaaaataaaataaaaccattgtttcttaccatcattctcattgccactatctttaatatttcataaaagcataacatataataaagtttacctacaaaatgaaaactgatcacaggtagaaataagttcgttgtgacttaaaagttgatgctgatgattgatgagtcagtgatgacgtcctggtgacattcatcaaacgcataacataccaaagttacttgtcatctctttttgtctatcttttagttttagtatgggtttgtgaattggtgatagtagtaagtggtgaatgcccaaatttgaccacttcatcgcataataaacttatataaaacaatctgataaaaatattcacaattactgcaatcaaattctatgatgaaaatggttattaagtttacctgcagaaacacatgctatgatgttctccaattcaaaataaatcaattcaaccgatccaaaaacctacataaatgttttgaatttatgtatgatgtaaatgtaatagtgtcttgttaaaactagagcatgttactaaatcattatatagaaatgagtcagatagaagaagtattaaaaagagttgacttgagaaaaaggatgggaacttgggaagagttattgttggcaaacacactcaataatagcaaatatcatataaaccttttatttttgtccttttctgttttgctcatctttcatgccttgcattagatggctggagttggtgtattacatataaaccgtaagcccttatatccattctccaatatttaatttcatctcaaattcaaactggtactgaaaatttattatttctgttgttatttctctaagagacttatctatatatatatctcctatgcatgatatactatatagaactttcaatatttttttttttttgatcaaagattattttcttttctttaacttgtgttttattaatcactttctatccgttgtaaatcatatatattaagagcatgagtctaaaatactcacttttggtgactagtaactttgctgtaccttcattttttttaaaaagagctacaagactctgtaagagtgaaacgaagcccaatcccattatctgttatgaaaagttcataaaagcccaattaatatacaaattcactacacgaggagaaacgacgtcgttagtggagtggtaagtgttgacaaagtgacgagtgacgacgaccttttgaattaacaatcgaagcagtgactgagtttgatatcaatggaggctacggcggcgccattctcttcaattgtctcttccagacaaaacttctcttcatcttcttcgattcgcgcttcttctccggcttctttattcctctcccagaagagtattggcaatgttaatcgcaaattcaaatctcccagaagcctctccgtccgcgcatcttctacctcagattctggtactttctattgtttttctgttgccctgttgtactatatttgattagtcttatttattgctgaatctttcttctgtctctttggtgagtagttgtgactttgcttgactacggagctggaaatgttcggagcatccgcaatgctcttcgtcatctcggcttcagcatcaaagacgtatgttttcgaatctaagtttattccttgtatatgtactgatctcttattggcaaaatgaaattgattacatttgggaacttgaaatgttaggttcaaacgccgggagacattctgaatgctgatcgactcatatttccaggcgttggtgcttttgcacccgccatggatgtacttaacagaactgggtacttactaatcacctctgctgattttctcatttagaataatgtcttacttagttcttaatatacgatttttggttctttgattgttgcaggatggctgaagctttgtgcaaatatattgagaatgaccgtccatttctaggcatatgtcttggtctacaactacttttcgattctagtgaagagaatggaccaggtttagctccgttgctccactttatattatgtcttctagaatttttccctcgatacattcaactacattatgatatcatgtatttttgtacttaacaactgtatatgtgacagtcaaaggtcttggtgtgataccgggaatagttggacgctttgatgcttcagctggtataagagtaccccacattggctggaatgctttgcaagttgggaaggattctgaaattttggatgatgttggaaaccgtcatgtctattttgttcattcgtacagggccattccagtatggatctaaataatctcttctttctttctgtcattttcgtatctctaccatattgtattctcttctacatgcatgtgataattatagtttcataatttctatagtcagatgaaaataaggactggatttcgtctacctgtaattatggtgaatcatttatatcttccataagaaggggaaatgtgcatgcagttcaattccatcctgaaaagagcgggggtatgatagtctagtcattttctggtgacatcttttttctcttattcagagtctgttttcatatttggtatcgtactaattctgaatatggaacattcagaggtggggctttctgttttaagaaggttcttgcatccaaaattacctgcaacacaggtagatttcactctagccatacatgtacaatgtaattcctgatttttttggtgtctaatggaaaccacaattcacttgaagacagaagccaatggaaggaaaggcctcaaaacttgcaaagagggtaagaagtttgtcctgttattattgaaagtctgcctcctttgcaacattgctatctttgctcttaactattctggtaggcagtttttctaatgatattttgttttcctttaggtgattgcttgtcttgatgtgaggacgaatgataaaggagatctcgtagttactaaaggggatcagtatgatgtgagagagcaatctaatgaaaacgaggtttgttgaaaattgttgcttcaatgtcatatcctgcgatgtgttctttgtgaaaaatgaaacattcttgatatttggatgtttttgtgatacgtccttatcttacctttaagctgttgggtttagctaattattaacgtctgtaacaatgctctgaattcattcctttttcttgcacaggttcgaaaccttggcaaacctgttgatttggctgggcagtattacaaagatggtgcagatgaggtatacttttactgtatatgatctccttgcaatattatgtgaatggctccaagacaccttttttagatttggtttggcgctttaccgtgctgtttgtgggttttcagattagctttttaaacataactggattccgcgattttcctctaggggatttgccgatgattcaggtacctagatttttcattctcagtagaatataagtattacttccacaccttccctgtaatttccgatttagatctcttttcatactttataggtgttgaggcagacatcaaagaatgtctttgtaccactaactgttggaggtggtattagagactttacagatgctagtggcaggtacatgttaatcttttcagcctgtttctgtgaacatgtctgtgcaggcattatgttcttttatatttcagcaaggactttgcaatttttattccctacaacaatttaacatcaagttaatttggctcaggtactattctagcttggaagttgctgctgagtatttcagatccggtgctgataagatctccataggaagtgacgctgtttctgctgcagaggagttcataaaatcaggggtaagtttgtagttgcccgtctaatttatccgagttgtttttcatgctagtatctaaaaacggaaggatcattttatccccattttccgcgtttttgtaggtgaagacaggaaagagtagtttagaacagatatccagagtttatggaaatcaggtaattgcttacagatcagaacaattggctttcttttttcttgcttgcagaaaataaagggatactagttgctttacattaggatattaatatcttagttttacagatggagtaaacagtgaattgactgtgtttagatagctgtttctcatgttctctagtttatgtaagaaataggaaacagctttgcacttatttgatagattttttcgctccacaggcagtggttgtaagtattgatcctcgtagagtttatgtgaaccatccggatgatgtgccatacaaagtcatcagagtaactaatccaggtatgctggtattctcacctctcttatatttgctttctcatttgttcaaaggaaaattatgtaggctggctatatatcatgcattaaatggattaatttgagctttctaatacattaaaattacaaggcaaatgttattaacttattattgctatgttaactcagaactctattttcctaacggacattatataattcatcttgcgtcaatcttagtttagctttcgttgaaaagccttgagctgcttgaactacacaagcagcacagtcacattgtatagagtttctccataaatttgcatacatgtaataaccgggatgaaatcttgctggtgttaggcccaaatggagaagaatatgcctggtatcagtgcacggtaaaatttcggccacccttttcattttaagatcgatttgtatcatttcttaactattggtttctcaactaaaaggtcagtggaggacgagaaggtcgacctattggagcatttgagcttgcgaaagcggttgaagaattaggtgccggtgaaatactattgaactgcatagactgtgatggtacactcaaaacttcaatctttgaattagtttcatgtctgaaaatttggaccacctttacacacgatgagaactaaatatgatccacgaaaaacaaaaaagcacacaaccaccttttaaactacactgctgctggagttaaagatcaatgtattataagtttttatctccttatgatgccttccttctctgcgagtttcaggtcaagggaaaggattcgacatagacttagtaaagctcatctcagattcagtaggcataccggtgatcgcaagcagtggagcaggtactcccgaccacttttccgaggtgtttgagaagacaaacgcatctgccgcgcttgctgccggcattttccaccggaaagaggtaaccgtttttactcttgttaaaaccttttgcgtttatacctggtaacactattattctactattttgtataaaggtaccaatccaatctgtgaaagagcacttacaagaggagcgcatagaagtcaggatctgagaattttctggtctgcgtgttaccataattcatgacacattcaacaagatagaatctttaccttcaataaattaaattaagtcggaaccatcggagctccaataggtctgagtgaatcctcttatagttgatttccttttgttgacagtaagactgatacaatttatggatttcccttgaaagtaagaaagcaacgtatgttcactttctcagcttttctatttaatacaaagaaagcatgtaacttctctctcgtctagatcttattaggaaatcattcaatccgaaaaacctcaaaagggtatcttattcagtcaaaattgaacatatctgtatcaaactgtgtaaaaagtaagaacgtagacactgaggcctattcttccaatcccgcaatactcgggaaactgtaaagaaacttgaaagataagaattgttgttacccccaaacgttttaaagacactgcaggtctataactggcaaaagccagacactttgtgactcctcgaaaccaaatcttttatatgtcaagaagaagcctttgtggatcctccacaacatccttgacacggcgcaggaagtacacagcctctctaccatcaatcagcctgtgatcatacgtaagtgcgacatacatcattggtctaggcactacgcttcctcctactaccattggacgtgacacaatcgagtgcatgccgagtatggcagactgcaaaaccacaggttactgttaacaaaaaacgtggttctgactgggacccggtgagatgggaaataaatttaaacctgaggaggattaatgatcggagtgcttatgagacttccatagacaccgccatttgaaacggtgaatgatccgccagccatctcatctatggatatggttccttcatttgccttcttggcaagtgagtttatcgtcttctctatctcggcaaagttcattttatcagcacctcttatgactggtactacaagtccctggataagagaccacaagaaaaaaaattcagcctcacatacatgatcgcaataagaatgaaatttagcacaaaccaatgatagctaaagaatgtgaactaaccttagaggtaccaacagcgatactgatatccacatagtctctgtatatgatatcatccccgtcaataactgcatttacaactggttgatgctgaagggcgctaacagcagcctgagacagataacgaagaatagggtattatttttgctatcatttaactctggcattgtattattaatatcgaaaaataagtaagtgtatactttaataaatccagacataagccccaacttcactccatgcttttcataaaatgcatccttgtattgggatcggagcttcatcaaatttgtcctacacgcagaaaagagctccataattagcaaataaaatcaaactgactagtataattcagtgcaccaaaaggactcgcataactgatatagacatatcaacttgacgggtttaagctgttactcacatatcaacttcattgaaagttgtcagcaacgcgaaagtattttgagagtctttcaatcttgttgcaactcgtttccgaagtcttgtcatcggaacctgcagtgttgttagatgtcatatcactgattatgtgactgtaaagctttttattaggtaacaaactaactttatttaacctctgatcagtcatttaaaaattttcagacggaagccaggaaaaatgatagattttgcatacccgtctttctctttccttaggaggaagctgcggttctttagcagactgtttgggtggaggtggtgaggatggtgctttgggtttctctgctacaggagcactttccactctgggcttctgcttatcttcagcaggaggagaaggtttggtatcagttgtctctggtatcttctgagagggggtaacctgagatgcagtatcctcagactttgatataatagcgaccttggttcctggttctacagtatctccttcgttgactagaaactgcattagaagacaaaatcaaacaggtctagtcagtgaagactaactatagagagacaccagaaagagaacaacaataacgactgaataaacaacacaaagagcaaacatatttacctcttggattacaccacttgctgggctagcaatatctattgtcacctaatccacaaatatgaatcaaataatagattttaaaatttaacacagatgtctttagaaaaatgacaaagaaaaaataaatattgataccttatcagtttcaatttgtgcaatagcctcatcagcctggactctctcaccaggttctgaaatgtgccagcaaattaacttttagatatatattcagacatcagaaagaaccggaaaagataatgcaaaagagacatactcttcagaaaggtggccaaggtgccatcagtaattgattcccccatatgaggcacaactgcttccacggtatctccttcagtaacaataacaagaaagcgtgtgagaaaaccctacaaatccaatcaaagctacagtagtagcagattgcaaaaccataattaagagatacacgtttcataagaatctgcatccgaatggaatcaaaactatgagctcctggatttcttctaagcaatcataggttcccagatatggcaaacctaataccacaacaaaaagagagaaagagctcaggttgaacatacataccagtttcagctgaaaaaggcctgacccatctttgcagggttgaagaaactaaactcgccgacctcgagatgcccgagttccctgctagtgggatacaaacaaaataagagcacaaaaatcttaagaaactaaaactaacccaaaagtcacatataaataagttgtaagaagtacctggcaaagcaaggttatgaaagctatgagcatgatttccacgatgcagatatgcctgttcagattctcaaataaaactttattagattgttcatcgaaaataagcagatacatagaaatctgatgataagatacataaccatatactaccaactcgattgggaacaaaaacaaaacgtacccctgtttctgaacctgatagcaagctaggggaagatgcagcaacacgagaagactgcagtgattttgcgaataactgataaaaatatatagagataaagttgtcacatttcgatagagccgatcaagttgtaccaaatgagataaaatcgagcactaaccgaaggagaagagccattactggcagctctccttataacagcacgcatcatcattggttccgaatctctgttttttttgaagaacacaggtcggaacaattgatcagcaaaatgattaaaaatcaaaaaggaaggattttttcatcctcatctatagtttgtcagctaaattatatttgaagaactttcaaaccaaagaacaaaactcagattcatatgttttttccgattcagatattttctcgctaccgaaaacaaaaatgaatcaagaaagatcgaaaataaaaaaatcaaacctcaaggctgtggaaacccagaaggactaatcaaaatgttagggtttggaattggagaatcgagaagatcggtaaacgcatatgagactttggagcaagtcaccggaatatggcaaagttcataagacttgtcttctgatttacacgtgtcaaactataattcgttgttttttattttatttttggcacaatgtataaacagaaagttgtacaattttgacaaaagaaaaagatctggaatttgagttgaattgcttttcaattccatattgtggttccggttactgttaaccggtgtgaataattggtgtacgaccattatgaccattaagtcacaagattagtcggggtacggtctcaattcacaatgcatgtcgatatttagaggatataaagcctaacattcggtgttatcatgaaatcgaaatgaagatcagtctaccattattgaaatcgttttagagatcttaagcaattaaaaaccactccgatgttgtaaacttgtagttagtacgataagacaagcaatgttaatcaacaatcaacgaaatatgcaacttttaaatgtatttgttttcaatttgtttccgtcatttgtgtttgcttttctgaatgtatctattttgtattcatcacgacgattagttaaagattgaaacagtgaagaactgaaagaatctccattaattgatggtcctgtacatgaatcttttacagttgggaaaaagttgatagtgaatttctttactatttgaaaaactatatggataaagatgctctaaagttttataacaaaatgtttaccaataaccttttacttgataaataattatttgagtcataatttactttgaagttttaaaattacctaaaaaaaggatctaaaataaataagttcctaactttctttattgtatattttatgcgttgaataagactcacaaacaaaaactgtcaacactattttccaatttttattcaattacttaatttattcatgtcttctgatcgcatttattttattatttatgaaattaataaatttttaactatcttttagatacaatttgtttaccaaaataatgaagaaatgatcataagaatactaccatagaaacaaatatgcaactttgacatgagaattgtcacgcgttttatattttctataaaatttttatagttttatccaattacttgattcatttatgttttctggtcgcacttattctattatttatgaaattaacaaagtttgaaaaaaaattagatacaatttatttataccaaaataatgatgaaatgatcatagtattatcatagaaacaaatacacaactttgacataagaattgtcacgcggtttatattttctataaatacgaatgactatgacgaaatagaatatacagcttttttctttattatgtaatgaaaaagatttaattgaaaaaataattctttggataataaagaaatttttcctctttgcactagatttagaaaataaaatttcatacttgcatcctccccaatcagatcccttgtagtttgcttcacctaagacaccagttcttgcatcgcaaatatttgatacaggttagtaaaatatatacaacttttcaatcatctcatttatcttttgataatttttatttttatattgcaatttttgaaatgtatatttttaaaaaaaggctttgataaaatctccaacccctttaagggaaataaaaatatgtgtgcatttgaaatgagggtatttgaaattatatcaggataagatctactttgtcatatcaaatatgttctttagtaaaattaaaaaaaggtaactagatctatgttatccaaaacctttaattccttactaaacgtttgtaacacgaattacaggtagaccatggcatctcaaaaaactttgacatctgaagatggaaacatcaaccaaaccgaaattttgtctgaggccaatgagctgcagttcgagaatgctgtttcgcggtctgacaatgagacactcaatgccttcacaatgttattggatttttggagaaatcaattcccgaacgtgtcctcgtacttgcttaacttatgggtggtcttggcatgtatagtcaacgaaattattgctttagcaacgctcgagtctcctttgtggaggagatcacaacgtgaagagatgctgactctgaacgaatactactctcgattctttccttggtacgcaaaaaacgtcccaaggtttgtccatgaggcgtcaagagcttctgaagtaatccacgttgatgcttcatggcttttgacaaaacttaaaaaccctgtaagtctatatattccttcaagaataactaactagaatgaatcatattaatttcttgttacatgtatagtagaattagggtttaatttatttttcttttctatctataccttttttagatgcgttgggtgactattttcccatcactcgttggaaatgtgtcaatcgaatcaagcaacgacgatgttaggatggtataaaacgttttttcgattaatatattaattttttccttttttatttcaattatattcattttatctttaataatagctttcatttgtggacatgtagatcattgatatggagtttctgacattaattaccccggtcattccgacccgaaaagtaaaagttctccgatattgtcaccgtatagcaaatgatacatggattatagcggatatctccatgtacttaagctcctattcagacgatttacgacctgagtttctcagatttccttctggatttattattaaacatgtagcaaggatattcagaggtacacttttttccgttttacaatactatatatagtatcgttttagcctattactactttttttttttttttgttatcacattaagtactgtttgaaaacatttgatatatataaaatatctaatttgatgttagagagaagactaagttcaatcggttaaacgtatgtacgtaggtaactatgttggaacactgggtttacaaggaggatgcaattctaaaccggttgaggccttacctctcttctggtttaggatttggtgccaagaaatggctcgtcgctctacaacgatactgctccaaaactacttatgttccatcaatgactatggggaaccaacttctctctagtagtaaaagattttctgttttatttttgattagttcagattaaccgttttcttatactgacataaccaccatggtatactcatgcagtaactaattccgccggtaagaacaacttgctccaagcatcaaaacgtttggttcacatattttgctccggtacgtgtggggtaatcgggaaccgagggaggtggctcggtgcgggtcgaaggtttgacgtcagagtttccagtctagagagtcgggacatgataaggcacccttatggtattattagcgctagcggtttgactaaaatacatgctaaaccggaaatactatttcctttaatctacggtgtaaagaaactagagatacataaccacttacgattatctggaaatgatttaaaacaagtccttcggatcacaagagacgacattacttcgaggaatgacgtctccctattcagtttccgggtacgtagataagattatttcttatgaaaaaacaaaaacgatcgagttatacatattgttcactaacgtaaaatataattaacacgttaatgaatgcagctgaataattctacggaggtgtttttgcttcaagaagcatacaatgaggcatcatcgtcgatggtgatccactccatacttgacgtgtcatctcttgcgaagattataaacggtgaccgttcctactcctttacctatccgtgtggattcaccataatgccgggccaaaactccggcgatgaagacgctggatgtgttgtgtctgttggatttctgacgattgcaactgaagagattgtagcgaatacactggtgagtgatgtggagagaggaatttatctgctactattacaaatttcgagaatgtcttagcgggaaatcagtaactccgttaaaagctttcatgcgtttggcattttttaatatgttgtttggaattttcaaactttttagtcgtattatatcaagttctatgtatccacatacaaacttattctacaccttttaatatattggcattaattatctctaccaaagaagacaaattcacatgcatttacacaaacttgctaaagatagataaaaaaaaatgatttacgtagataaagcaaaaaaaaaaaaaaacttgagatttatatatctaatgagttggctttatacgaaagtaagccaaatatactcaaggggactttttgtgttgtctccagagaaacaaactctggcatgtctctctcttctctaatctaaatatcgtatatcctctgtttttatttataggttctgcgtatattaccagagttaaatctttgttccttttaccttcttgctccttgtcatttgtcagagaggagaggtaacaaagaccgagtatggaagaactcagggggtgaatatcattttgttggttccaaatctttttttaagaccccccctgacgttctaccaatcacccgggacgcagagggggcaatgatcgtgtacggtgggggagcatccgaggacggtgaaggtggaggggtggttctgaagaaagggccatggacggtggccgaggacgagacactggcggcttacgtacgggaatacggtgaagggaactggaattctgttcagaagaagacatggctggctaggtgtggcaagagctgccgcctccgctgggctaaccacttacgacctaatctcaggaaaggctccttcacccccgaggaagaacgtctcatcatacaactccactctcagctaggcaacaaatgggctcgcatggctgctcaggttaatgatcaatcctacacttatataaatctgataaaactgcattgcttctctctgttttctaggcttcttagttcttcatgctctcttcttcttcttccagctctcaaaaaactttaaccattgtcttcttctactgtttgttttgaatagttaccaggcagaacagataacgagatcaagaactactggaacacgaggttgaaacgcttccaacgccaaggcctccctctctaccctccagaatattcccaaaacaatcatcaacaacaaatgtatcctcaacagccctcctcacctctcccgtcccaaacacctgcttcttcctttacctttcctctcctccaaccgccttctctgtgtcccaaacgttgttataacactgccttctctcccaaggcctcatatatttcttctccaaccaatttccttgtctcgtctccgacctttcttcacacccattcctctctttcctcctatcagtctaccaatccggtttactccatgaaacatgagctctcttcaaaccaaattccatactctgcctctttaggagtctatcaagtaagcaagttctcagacaatggggattgtaaccaaaacctgaacaccggtttgcatacaaatacctgtcagctgttagaggatcttatggaggaggccgaggctctagctgatagctttcgtgctcctaagcggagacaaatcatggctgcgcttgaggacaacaacaacaacaacaactttttctcgggaggtttcggacatcgtgtttcttccaacagtctatgttccttgcaaggtaataataatcagacaactcaaaatgcttcaatctgcaaaaacaagtgtttgaattttattttattttgattgacacaggtttaacaccaaaggaagatgagtctctccagatgaacacaatgcaagatgaggacataacaaagcttcttgactggggaagtgaaagtgaagaaatctcaaacgggcaatcctctgtgataacaacagagaacaaccttgtccttgacgatcaccagttcgcttttctgtttccagttgatgatgacaccaacaacttgccagggatctgctagagaaagacgaaacaactaaatggaaacatgttcctgattgtacaattaaaatcctgaatatacctgtcaaatatgttattaaagcaatatgatcctcatgtatagagatcttagcattgttcatctgttacatgctagtggacatcccaaatgattcacctgactctttccaaaacactcaattgctgaactaagcatctcccgcaagtggaatatacctgccagaaatcattgtgtacacattcctcttaaccaagaaaagtttttattaagcttctgaatttcttctcatatggtctaatctttattgactagttttgtgtttcaagtacacacataaacaacccatgtttcaccacaatcatggcaaaggaaaaaatgaacaaaataggcaaaatccaaaaagaaatgaagaagaaaagctcaaaaggcagagaaaacgcctcaatgaaatgactctgaaggtgcactcatggagtccgcctttgcagctaaaatctgcattttctgtgtgcaaagaactccagaccttcagagaattgagaaaagcataaagaaacaagaaaggagggcaaaaagcacccttctcatctcagttcacaagatacatacatacatacatacatacatacatatatagagagagtttgactgtgtgtctatactaccaagtgtagactgtcgagcggatttgtctctgtactcttcttcctcaatgtgtttctttagttattgtgttcagaaagatgcagccagaagggccttttcaccttctccacacctacgatgaacatccttcatcctatccgctgatctacaaatcccactgcagctccaatcgaacgaggcaacacagatgttgcccgcctgcgccttccactcacaatctgcagtttctcattgatcaacaaatggaatcgagaaaacttccatacttggacatagataagggaacttgaattttttttacctgttgtaccacaacatagcctacggtcatctacatgctccacatctaatccaagaaaccatgatcctaaagagacatcttcattcacatatttgtgaagtacgtttctgtatacacaattcgtccttggttaatacacaatcagcgtatgagcgtttaagcataaagcagattaattttttggattgtcaaggcagtgggaaataactcactggtttatcgatatgtaagacgccaactccctggatattgcatagagctgacctgtggcatggcggaagtatttgttaccctcttctccaaatttccagtattcgggttcatgatatctcactcctctaaaattggaaatttcagagagagatgaaagtgagacaaacattaaaaatgaggagtggtctcttgaaggaaggtgaacaacttacttctgagcaagaacaggtccagatttcatgcaaccaatgtacactcggggcttcatccggtatcttgctaattctgctccaagcgtggctgcagaaatatccatgacagaagtgagcaaaggcacaaacttgagatgacaagaaacaaaacaattcagatactttaagagagtttatattcacctatatttacatgcacatcatcatcgactttgacgtagaagtctgcatcccacattgcaaaagccgtggtaaagtaagttttagtctttgctgacagctcgagataaccttcaacatgatcctgctcaaacaaacataagaatttaaaaacagaaagcctgaatatcggtaaaatgtgactgccgtgaacctgcccacaacaagtataattccatgagaaaaatgacccgcacaagtcttaccagcctcaagaagtctccatgtttactttcttcagcctgaatcgctctatcaagaattccaccgggagtagaactgcccacagaaaacactcaatcaggaaatctctaaccgaataaacctcgcaaataacgatttttgccactcttatggtacaagttttacctatggcctatcacaaaccgcatcacgatccctttctcttcctcgagcttctttctctcctcacctaaagaagacacatgtttagtcccagacaatatacttaaggctgaaaccgctgcttagatcaacataccgggaggcatccaagtagcacggactgaatccctgcgctttctgctgctaaacgcagtattaacaccaacaaccatcagatactttcttttagtgacagtttcagggagcttaaagtcatcagaaactggtgaaccattcatgatagattcttgcgcagctcttgcatcggccagttctgtttccagctttgaaatcgttttatcaagcgttctacacaacaccattgaagcaaaaccaaaaagttcaatgcaaacccgcattcaaagtcaaaaagaagttctaaatcatatgatttccacttactgaattgcatctggactcttgtaaacatctccaaggatgtctttcgattcacgctttaaacccttctgataaacagaaataatgctatgaaactcaggaatcaaaaactcctctagtgctcatgactatcaattcacctaaattagaaacttacttttgatgaatcacagtcctcagactctaaccgcagccgttcatctgatgctactgtgtcccttgatacaacattggattcaggctctggccacattctattaacaaacacagtctgattagtctactattagacgatcaacagcttgcgattgattttggttcttccatgaactactttgtccataaagaatatacttttgtctataaataaatctcaggatgtacttttcgttacctttgtgaagaattacaacctttccaatagtgaatgaaattaaaaaatttgcgaaacaagaaaatttaatcacactttcccggaaaaaattggacccaaaactttcacagcatgaattttcacgaaaagtcgttagatttacaaatctgggtgtttcgaaaatgagataattttacccaccgacagtcctaaaagagataaaaaaaattcccgggaaaatcgtataactgaagaaataagaaaagaataagtgagttcattagagagcattgttttgttacctgtcggagaagagaattcctgcgcagaagaaaccgatacagagaaataaagtccatttctttgagacaaaactcttcgaagcagagagctctaatcctctgtgatgatgcttcaacgacatctttttgtgcgtgtttctaagcgaaactataagaatctattgaacccagaaagacagactctcaaagagatactaataaacgagagacatccatctcacgagacgacttgtcccgagtcaaaaccgagtcaaccccaaaccaaaccaaaccccagatccagaagatcgagacttttctcctcggaaacgagaatgtaaacagagaaagtatagatcgtgatattagattgatcctatgaaaagacgaatgtatgtggaaaacgacaagagagaaaagccgtggctttgtgtctttgcctttggtgcgtggaattcgaagctggaagaagatgaatcgaatcttatttagttgcgattttagtgttgggctaattaaaattatattattatttttgctttattagttaattttcactttacagtaataatatcaagtagattggattaagagaaactaattaaaattgaagctaccgacaggaccactctacgcataaattttgaccaactaacctttgtcaaaactctaaaccaataaacaaatcaaattagttagtttttaggcaaaatattaggtgaattttgtctttcttatagaaatttagagtaaccagctacataaatatgaacttttatgtgtgtttactgtagttttaagaaaatctcaacatggtacgaaagttaaaactcaatttgctctctcacatgcatggttcacaaagctgtcgaagaatggcgacaaagggaatcaacattgaccacgtgttcagcacatgatcctcaatcaacgatttccaacttacaaacaactcacctctacttttttcagattccttttttttttcttaattaagatcaatagtctttatcatcgacggttcgaatcgtgtaactcaatgaatcttaagctcatacaatctttacttgcaagtcttttttcacaacctaactttaggttaagaaaaaattaatcttataacattcattttcaacaatagttttatttttgccaaatcaaatcacctactatttattaaaaccaaaagaaaaaaaaaattcacctatatctgtattattgttttactatgccaaatcaaatcacctatattaaaaaccaaacgaataaaaaaagccccacctatatatatacatcttaccaaactagagtttttaagaaatgaaatcacctctaataactaaggtaaatatctaagcattcggttcatacatatcttaacatttatacaatcttggtctactcaagaaatccagtttgcttcaatattgcattccttactttgctcaaatctcttcctttcagttttcttccaactccttccataactgaagacgacgatgatgatcgactgcgccgcaggaaatattcctccggtgacacattctcatcatcaacaactttctttgtcttctttctttgaaccattgaccaatcagggacattgacagggaccgactgttgtctcataggtgccattccttctgtcctctgcctctcaggaatcattctaggttcgcttggaagtaaagtttgggttgagaaagaaggtttagtcgtatggttactactaatcataaacggtgattgatatccatcaagaacatcccacacatcatcttcttgaaaatctccatctccccatagctcatgcttcatgtagctcttctccattgatactcacctgcttctacaaaacataacatgacgaccaagaaagatcttcgattaaacaaaaactctgagctagccagtagtcacaaaatcgcaaaagagacaagaatgtaagagagaatctacgtacgaacgtaccttttgacgtttgattaaaatgaagcttaaaataatattctgagattataaagagtggaatctgtgccaagagaagcaaaatagcttcaaattttgagaagagaaaggaagaaagtgacacaagaggtgtgggattgaagaacgaatacgtagattggttcttattttgtctttatagatatgatccaaagacgtgggaatctatattcattattcgttcgctcatttattatgatcatcagtatttgttgcgttctgtcatagtgatgagttttaaaggtcaaaaaaagtacactacattgctacactaaaggctaaagcatatgtagccaattttacttttagtttctttcatcacggaaagtaattaatcatcatgaattaaatttactctgcaagttttatattagaaaaatgggtaccacattcgatatatgttactgattagtgtcgatatatcacttttcacagattcatccccttgaaagatcgaaaatgtggagcctgtggcttgacaaaggtccaattcagacggctgacttggtaatagtgtaagttcttttgacaaaacaaaagctacaagataccagcgttttattgataacgaaaggcgaccatgcatgcatgttacacagttggtcttgctcagagcttaatttaatgaagccatgcatttatagatctcaaaattaatctggatttcgcatatccaacttaaaaagcaaccaaaaaacaattacttaaaaaaagattaaaaaaatcttaaaactattattcgtaaacagaagaaatgattttttactcgtgtgctatagttttttttttccttattaatttgatacaaaagatcgattttgaacagaagtaaaatgtcgatttatagatcataaatattcattggatatgttgctacatgttttttttttcttcttcttcttatattataacctaaagttttctttctaagagaattagaggaaatattatccatggcggctaatgtaggcgtgaaagagttgagaaagtgaaaacttaaaagtagtaaactagtaatttgatttacttttttaagaagaaacaaaacgtttagcttgaaaggaaaattcttcaatggttgacgagtgttttgggccctttaatttgtgtagccgtcattcatcgaactttgttgttctcttataggagtataaaaaaaacaatatcactcacttcaagacttttaacttatctttgctgacctaatcaatttgagccatgatttgtgaaagtgaaggttttggtatctactgggccttcatcaacaatacattttgtggtcctaattcgaaatcaacaagctctctcatgtgatttgtccaagaatcatcgatgaaaaaagaagatgagttaggaacaaccaacgtacaaaaacagatgtacatgtctacaagcgaaccaaagctaagcaaaaatatttataccaccaaaatttttgaagaccatttatttattttaaagtagagattatatgaacctgaaaaaagagtagtagttagaactattatgactagcatatcagtttttcttgtataaagcgaatattatttttaacaattcattagtggttatatccagtaaaagagtagatgttagaaatgaacctagaagccacatccgttaggtgaaagaaaatctgtatgctcaatcttgataatgcataccataatgcaatgatcttatccacttatacgaaaaccccaattttagttaaaggctaatcattcatcatctcatatagaagttattgaattgttttgatggccactctgttactagctattcttcactgccttaatcttcttgaaaatcttggacgatgattgaagaacatcccacacatcatcttcttgaaaatcttgtttcccgataatgttgtcacttctcaccctcatttttctgtttagtctactgtcttcatcaccgttttccgagacatatcgagccgcttcaagttcggaatttcttataattttggttcaagttcggaattgattttttatgtcataccgaaccaaactttgttacttctaaaccgaacctaaccgactcacttattccaaaattatatccaactttttagagaattgaagtaaactaattggattaggtttttaaggacaagtgatcggcaagcataaagatttttggaattaaaaattttgattttagaaaataaggatatatattttttttaaaatagggattttagaaaatagggctataaaaaataggcttgaaaattccgaaagaactttatggctcagctatgtttcttctatgtatgcgtctatatatatatatatatatatatgcatacatctcttataacgggcctgcgtaataggcttcagcccaatttgttttctcctaatttaacgaggattttgtgttattgatctcagtgcaaaacgtacaacactagaatttaacccgcggtacaccgcggggctattatgttttaaaaaatgtaaatttatttttcaaaagattaactgaagatatatcatattaatttgtattttaaaatatagatatctatccctatattatttagtatatgattactattatttaggtttcaaattttgaagtatagatatgaaaacatatatttttttaagtaacaatgtatggtagattttaaaattttgaatattttgtctgcagtataccgcggatcaattttttatagctaaattttttaaattttaagttatatttgttttgttaatattgtatgtttttgtgtttaaggttgtatgattgtattttgattgttaattttatgatttcatccgtgatatacctttctttattaatattgatcaaaacccgtcatcccatataaatccgtctatattatctcgttagctaaattattagtgttataagatccaagaaaataaattattattgttctaattccaataatttaggatctcacccgtggtataccgttccttgaatgatttaaaatttatattactaatatagattttaaatttatcatataaagtatatgatttcaagttttgtgcttttaatttaaataaaagaacggtttaaatgatgataaatatagttttttttcctgtatctgtatatgattttttatgtgaatattttaattattataaattagtatttttattgctatgcaaaatgttgatataaatatttgctataaatcggatctatgcatattttgtgaagtaaaattcacgattttgtttttaaaagatatatgaaaagattgtgtagagatttttagaaacaaattaggcaagatatagtttggttaatatctttttttatttttttttaactaaataataaatgccagtggcaggcattgtaaataagtcccaactccaggatttatttcacaaaatggctgcaaaaatgtatatgtagattgtgatagattcatgattaaagtttggattgacatcaactgaaaaagatctgaagagtatttgtacaaaaaaataaaaagatagcaaaaattgaatgtcattgaagtcaacacttttggattttttgtcactgcatatatcaatattagagaaatgatcgtgtcttggatgatttgaaaattgttcaacttgattataaataaactatttatggttttatttaatctccaaatataataatccaacaacattgttataggctcatgattaaatatatagaattgatataaactgaacaagatttcaagagtattcttttaccacatcaagtcttggtcttggattttataattgtttccttggattctttgggtttgggggttttacttttctgatctctaatcgttttgttgtcgatacttgggggttttagaggtttatgttgattttagatattgttgtatgggatctatccttttccggtaaaccggcgctgatctaataaatacacacgtcacatctcggtttttgattttctggtttctccgattttataatcgtcttgattttccgttatcgtcaaaatatggtcgtcttattttaaccttttatacactatgacaattgttcgtcgttgttgttccaatttctttcaagttttcattctcattctaaatttcccactacatttgtctagagaaatccaacatcgctcacgatattggatatcaaatttcaagattactgactaaccaataaatttgcccacattcattcatcgacagaaaacatagtcatcataaaggagatgcaacaataagatgttgaggctataaaaagcatgacccgtataactcgcatatgcttcaatccttgaaaccaaatgagacccatatatcgatttgtaatcagaggaatgatagacattatatatgagatcaatcttgtatccccttatcaagggttgatttacttcaaaatcaagtctagataattaggttaaagtctgagaaatgatccatataacaacagaacatgtataataaacatgtaggagtaatctatgatctaagccaaacagggaatatgaattcaattaacaaagtgatatcaatctactgatagatggtgaagaaacatgaatgagattctggtatttataaaagtctgatgagtagtgaagatatttccccaaagagtatcagttacaaagtaatctacagaagaagggaaatttcactttaagcttcattcaatgagcaactaaaacatcattattgttcagtacgttgctgttaccattaatagattcgagtatagaatttggagaagggttcaatttcaccatcgcagatctcgcagggccaagtttcttcctaccgattcgatacggaccgtagatcttgctcaagagatggggcatctgatccatagttatcgtctgcggcgtcgcggcaataggactctcggaagatgatgaaggcgggtcgactgggtccgagagagaacgagtcagggggaaattggatctagcgttgttgattctagcgttacggatctgagccagagcccctggtttcatgtaacgatggaaaccgtcgtttcttctcaccggcgatctggagattcctttcatggtgtagaagaggattgtgagggacctgagaaaggatgattggggaaacgaaggggggctctttgtaaaggaaggagtgggtgtgatggagaggcgggaaaactggaattgggaattcgagaggcgggaaaattaaaattaaggttttgttttgaataagtaagaatacgatacgtacgttcgataaccagctaatcctgaaacttaaaccggtgtattccaatccctggttcatttaattaaaccggtgattaatcgggtcggatattcttccacattaaatacccgttaccgggtcggattctttttgatccggacggagcagactcgattggggaacaattcattcttctgggtgtgttgtgtttgagtttttggatcatacgaagaagaaatcggcgggagaagctatgtcgaggctatgggcgagatttgcgggattgttcagtagcaagagttttatcggagtagacaagactggtaacaagtacttttccagaatggaggagattgacggattcggcgagtattgttcttccaacctcttatttccttaaaaaatctttttttttgtttgatttatgttggaatttggttattgcgtgaaatttatgtatctcttaaatttgtcaagttgctgaatttctttggttttctccgtacgatttgatgaatcagctgtctttgcatatcgcgagttgcagtgaagcaaatggatttagaaaaattaatatcgtattgttttaaagaacattgtctgcttcttttcatacatgaaaagattcagctaagtgtgatcatgtaaaatgaaactaacagaggttatttagatgatcaaaacgaatattaagactcttgtagaatccatttgtagagtaatatattctgatgtgcttctttctactatccagtgaaggagaaaagatgggtcaagtttagacgagaggaggacccaacctctattcctggtaactcttctttaaaacataaaatgggttgttatatacgaccatatattcatttacttgagtgatgtcagatctgaaataagcacatctataagatatatggcatgtatacacgaatctagttacatttttgtttgatcaatgttgtagttgaatggatttgttggctgaatgggcagcgaaaaagggctcctactcctgaggtaagataaactcctttttaaccagaattatttgtggtcagcatagtgttcttaccatggaagtttttcattgcatacagactggctatgcttggcctttgatattggtgtttgttattggttcaggaaatgattgaacttgaagcaaggcgtgagcgtgtaaagcttaatgttgctcgtaggtgtttcagcttataaatacattttctaaacttatatccttttaaacgtcttaaaattattatttccttgtgtcattgatccttactgcaaacagtttatgactttgaggacttgattttatgaacttcgaagttgtgaatgaacaaagtcaagaattatttctgtttctgtgttagcaagtcaagaaatccgtatgcaaattttccatttaatatgtcgctcaagttcaaggcaaaacatttatcgtttttcttttgcctttatttccttgtcaagttctcaagaaggaagaggaggagaagaaagccagagtaggcaccggacgcaaaatcaccattggtaattaacattagagcccagaaaatttgtttcatttatgaattggtagcttaatgttcggtctccttgtgtaaaggtaaagttgatggtccagatttgacaagctttgttcgccaatttccaccagattcaaaaggtattacattttctctgccaatagattaattgagtcaccatagatgctgatgactaacttcttaggaatcccttgtgtaaatttgatagagattatgatggatatgcgtttatatttttgtggtgtttgacccatgaaatggtgtccattggctgatgattataatagttttgtgaaagaaacatcttttgaatgttccccatataaccattatgattgcggtagcttaaaagggcaacaaaattgttctcatgcaccattatatatcgtttaagtcatttgttgattcaagggctgaggttactacagttgctagatttcttataaccttaaaagagattatggttcgaccataaagtcgtggaagtaagactgacagttaagtttatttcctttttttgttaatgctttaaggtggtgaaccagaggaagctagtgaagaagcagataaatcaaggtgagtcatcatgattcataatatctccgcactaatcatatatgtgttaaatcttcttacattctattttttcctggatgcaaagcacaacatctttcagaagactaacataaccacatgttctcacattgctttacagggccaaggaacatgaacccgagatagtttctgcagaaccacccgaaccaaagtaagtctagccaacttgacattgttaatcctaaagttcagattctagctcacggatacgaaacatgactcgttctttctgatagttacagactgctactatgctgaaactgttctctatgaacataagttatgtattgtgtttggtatgctttaaattaaactaatgttaatgttgatgttgatgatgatgcaggacaacagagccatcaggatctggatcatcatttaggcccgggacatggcagccaccatcctaaacacatctctcttcacgcagatgacaaaccaacatactattcaattattttgtttgttgtactctacacaaccgattggtttgagccttacagatgagccataagaccagagagcttttcaagaccctaaaattgtgtcctttcacgctgtcattgaggacttagaagagtcaaaatgagaagccatcttcttatactttgttttgtttagggtgtttgtctcttggcataatgcttgagacttttagcctgccttgtccttcatagctgaagaggagcctagctaccttttgtttctcttcgttgacttgaataaaacagtttgattgaataacagttattcattttcatgtcatgatggtagtggatataagaaaaaacaaatacatagaataattattttaatgtttcagaggagaaatcctacttggcttgtgccagactcataacccaatcaaaacttcgtattaccaaaataagtgtagttctaaattttattctggtttaggctgtagttataaattactcattttagtttgtgaatataaaattactttctgcaaaagaaaatattctcatctttcgacgaaaagccaattattcgaatgttctcacgttggtctgtagctgtaaactttatagtttatataataaggtgttctactgttcttatataatttgcaagaacaaataatattaaatgcaaataaaaaatagtcaacggtccaaagtggatcataagccgtccgttcggtcgtctgaacttcatccaacggttaaaagaaatatacctgacgtggccttgggccattgtatattagtagtgagtgtgcccttggaaggttctgtaaaatgttttattcgcctctatcagaagcttgacgaaatctcttctccgtctctctctctctttccctcgtccattccacgatcttcttccaatctcaaatctcccattttctagtgtttcattttgatccttcttccttcctctggagatttctcaaatctcttcaactattttgatttgccgccatgtatcgacgcgccacttccggcgtgcgttctgcctccgcaaggctttcttcttccctctccaggatcgcctctagcgagacagcttcggtttcggctccatctgcgtcgtcgcttcgcaatcagacgaaccgatctaagagtttctcctcggctctccgctcctttcgagtttgctctgcttccacgcggtggagccatggtgggagctggggatcgcctgctagccttcgcgctcaagctaggaattccactccggttatggagaaatttgaacggaaatacgcaaccatgggtatgtctgtttgctttctctgacgttctaagaatgattgctcttaacttgtgtgacaagaatctgtgtttaccgcatatctgcttagatcgatttttcgctttaaaatgatgatctactgattctgatatgttctgattcaaagtaaaactagctagatgaacatttgatttgctcttgcattttggtttatgatttgtagatttagtctactaaatttcttttttgtatattctaaaaggacaagcaaattcatgtgttatgtgtcaattgaattatgattttaatgtttgatgtgaaaaacgcagcttctgagcattcctacaaggatattttgacaagtcttcctaaacctggtggtggagagtatggaaagtactactcgttaccagctttaaacgatccaagaattggtatgtttcctcgtgcctctatctgttttgtatgtaatggatttctggtgaagttaatacctttttgtgataatgcagataagctgccattttctgtaaggatactattggaatcagcgattcgtaactgtgacaactatcaagtcacaaaggatgacgttgagaaaatccttgactgggagaatacatctactaagcaggttgaaattgccttcaagccagcccgtgttatcttacaggtttgtagcatattttttctgtacttctacactgaaaacccctccaggcctctaagactggtacagattaagtcagcatatgctaacttgtatttttttgcccaggacttcactggagtaccagttctagttgatcttgcttctatgagggatgcagtgaagaatcttggtagtgatcctagcaagatcaaccccttggttagtgaagtttcttattgctttacggctgtaatatgtttaatccagcacttctcatatttacctgtatatatctaggttcctgttgatcttgtcgttgatcactcgatccaagttgactttgcaaggtcagaagatgccgcacagaaaaatttggagcttgaattcaaaaggaacaaagaaagatttacgttccttaagtggggttcaacagccttccaaaacatgctggtcgttcctcctgggtctgggattgtccatcaggtacaagataacatgtgatgacagtaaattctggttgccttgttgaaaattttgaacaggttttctgaaacataagtgtgattagagtattagcctgtttaatctgtttggtagactactagatttcaaggggtgcatgaatttcataatgctgtcgaatggttctgttatgatagcttgttattatttaatactgcaggtcaacttggaataccttggacgtgttgttttcaactcgaaaggatttctctaccctgatagcgttgttggaaccgactcccacacaaccatgattgatggattaggagtcgctgggtggggtgttggaggaattgaggcagaggcagcaatgcttggtcaggtgagctcatttcgtctgtacaccttcactttttatttgtaagtgtcaaatttgctttgccactcatcttagtcatatggtacttcaaaaacttatcagcccatgagcatggtgttacctggcgtggtcgggtttaagttggatggaaagttgaaggaaggggttactgctactgatttagttctcactgtgacccaaatattgaggaagcatggtgttgtcggcaagtttgttgaattttatggtgagaaccatggctgcgtaactttttatttctgatggactattatttggtcagtatccatgttttaacttatttctttcaatacgaaggtgaggggatgagtgaactttcactggctgatagagccacaattgcaaatatgtctcccgagtatggagcaactatgggtttcttcccagtggatcatgttacactggagtacctgaagttgacaggaagaagcgatgaaactgtgaatcctctctctctctctctctcactttctctacttttttattctttcttttttggtaaagtaaatcatcatgcctaaaatgtgctttaagtttcaagttctggtacttgtggtttacatgtgctgaggctgactattgctgcataatctgtttcaagacattttaaggagctatctgtagacttaggttgttatggtctacagtttgcattatcacgtggcctattttttctgtatcgtatcctgtttcctctggtttctgtgactcacatgatcgccaacttggtttatttaggtgtcaatgatagaatcatatttgcgcgcaaacaatatgtttgttgactacaacgaggtatggacattcttaatcagtttactgtattttatttattttgacaagattctcaactccaaatatctgtacattattgcagcctcagcaagaaagagcatacacatcttatctgcagttagaattgggacatgttgaaccatgtatttctggtcctaaaaggtatattcacttcgttttgatatttagaactttctgatccatcgccgtacctccctaaggtttcactaattactttattttctgttcaacaggcctcatgaccgagtgcctctgaaagatatgaaggctgactggcatgcatgccttgacaatcctgttggattcaaggtgagatgcaagttgtatttacaacaaaaatcattaaacaaccaatgacgttgatttgtttttttttttttggataagttgtaagactttgctttttgtttcaagggttttgcagtgccaaaagaaaaacaagaagaagttgtgaagttctcatacaacggacaacctgctgagatcaagcatggtagtgttgttattgcggcaattactagttgtacaaacacgtcaaaccctagtgtcatgatcggagcagcactcgttgcaaaaaaagcttcagatcttggcctgaaggtgagtttccaccttttctcttttccctgagatcactgggttctgaatcctgtttttactgtaagtgacgtttcaattcaggtaaaaccatgggttaagacaagtcttgctccagggtctagagttgtcgagaaatatttggatcgaaggtctgttggagtcaacgctgtttccatctggatatcttatctgatcacggaacatacatactgaacgtttactttctctgcagtgggctccgagagtccttgaccaagcaaggattcgaaattgtcggctacggctgcacaacatgcattgggaattctggcaaccttgacccagaagttgcatctgctatagaaggaactggtaacaacatcttcatcaataccaacatactctaaaattgtcagaacatgttttttttttgttctcttagcatctccttctgccattttcattttcttttcatctggaatcctcgtcaattgtgtttctccaccaataaattagtgcccctatatcgtcagactgaagctcactttttggttggtccattgtgcttcctccgtgtcacagatatcatcccagctgctgtgctgtctggaaaccgaaactttgaaggtcgtgttcatccacaaacaagagcaaactatcttgcgtcaccaccattagttgttgcttatgcccttgctggaacggtttgtactttccaactttggatatccttaattggtgtggcatcatagttcatcaccaacaagattgagtagttattcgctaagtagtctcatcaatcttgaatttgtttctatatattgatctctacgattacaggtggacattgattttgagaaagagcctataggaaccagaagtgatggaaaaagtgtgtacctgagggatgtatggccaagcaatgaggaagttgctcaggtacattggtgacatgcttagaggataagctattcacttttaaatgttccttgctaacattcctgatactcttccataggttgttcaatatagcgtgctaccaagcatgttcaagagctcgtacgaaacaataacagagggaaaccccttgtggaatgaactctctgcaccgagttccacgttatattcttgggatccaaactccacgtacattcatgaacctccgtatttcaagaatatgaccgcaaatccacctggtcctcgtgaagtgaaggatgcttactgcttgttgaactttggggacagtgtaacaacagaccacatctctccagcaggaaacattcaaaaaactagtcctgctgcaaagtttctaatggaccgtggtgtgatttcggaagatttcaactcatatggaagtcgaaggggaaacgacgaggttatggctcgtggtacatttgccaatatccgtattgttaacaagctcttgaaaggagaagttggccccaacactgttcacattccgactggagagaagcttagcgttttcgatgcagcaagtgtaagttgaatcgtcagacagcttcaacacatatatatagatccttctttaagtccctaactcatttcacatatgctttcagaaatacaagaccgctgaacaggatacgatcatcctggctggtgctgagtatggaagtggtagctctcgggattgggctgcaaagggtcccttgcttttggtaagctttacattgtttacaacagttgtcagattgtggctatgtcttgtgatcgtaacagttaagcacaaattagggagtgaaagctgtaattgccaagagctttgagagaatccatcgcagcaacctggctggtatggggatcattcctctgtgtttcaaggctggggaggacgcggaaacccttggactcactggtcatgaacgctacacagtccaccttcctacaaaagttagtgacattagacccggtcaagacgtcactgtaaccactgacagtggcaaatcctttgtctgcaccctgcgttttgatacagaggtaaactggttatatagcaaacaaattcagtaaaatcaaaacttcatttgatctgagacttgtttttgtggggacgtgcacaggtggaattggcatactatgatcacggcggtattctaccatacgtcatccggagtttgagcgccaagtgatctcaaagtgtttttcgccttttgttttcttcttatgttaagatcccaataaagcaagttttgtgagcatcttttttctttcaggttacactaaacctttgttggcaagagttgctataagaaaatgcaaaaatacacacttcattttataaacagtttaacgtatctttgaccgtagcatcaattgaaagacctggaaacaagattaaactgttacaaacacttttctctaaccagccactctattcacttttgctccccagaaactgctgtaaactgattgaacttgaccacagtagagaaaagaggcatgcattcttagaaatccactcatcttcctcctatattttctttgtcatacattttatgaagagaatccatattgttaactcttgtgcaaagatctggtagcctttgatgcaaaaaccattgctttggcttcgtcgcttgacatcatccaatccctctcagcacgacgttgacgttgccttgcattctttgcacgtttaggggccattcttgcatctctctctgcaaatgctagtctgaacttctctgctattgacagttcattgcttaacgggaaagatgtgggcttctgcacaactccagtaacaacccacgtcttaggatcaatatctttgacaaatggttcgtccagtgcaacatctggtagtgcttctcgaggaacctcgtctgctctgtacgcgacaagtgatggcttgggatttaccactattcttggacactccgaggataacatctccagtgaatccttatcaattcgtggctgcagaaaaagcaaattaaatgagtacactgagtggcaagagacacagatggagaaagtagattcttttgtttactggtagcttattagtcagtctgtcagagggacgatacatacccaaacaagccaacgcaatgattgaccaccatggccaatctctgaagtgtctatttcttcccatgtttctccttcaacattactcaagtttggcttaaaaatactcaaagatctgcgtgccgtggactcactgcttgggcatcccctgcaatattaaattttctctcattgcctgttttataaagtttggtagccctaggcaaacccacacactgggttcaattctatcttactttacccaaatgatcacttactaagtcataaacaaaaagacaagccaccccaacaacaacacactaaaagccagttcactgcagttagctagagaagtaaaatatacccgcatctaagagtctccaatgatctgcagtgttgtacaagctctaagacgcccatggatgagattttgttgcaccggctgcataacaaaataaggcaaattatatgatacttgagagctaacgagcaccacttatccaacatacagaagccccaaactaaagaaccagcaagaccagagctacaagtaaataaactatcccaggttgcaaaactcaaacgatacccaacacaatcagacatatgtgtggctagcttatcttgttcccatctcaaaggaaacagcttatacagaaaacatagagaaagcatactaaattcttagcaagcaactataatacctaatgtccacagctcggagagatttgcagatttctgccactttagctaagccaaaattcgtaacatctgaaccgctaacatctagaatttcccaggaactgtcagccaaacagataatcacatcatcatccagcagcttttttcttctagcaattgctgcaatcgacatctgttgcacatgagtatgcctttgattagcaaatggatatagtactaaacagcttgaaagaagaaaacactgaaaccacaattaaccttgatgtctgcaggaaatataacagagatttcagctaaacaacgaatcatatcctccaaatgcttcccaataacaccaagacatgagctcacaagagatggaggttttgatttcagtggagacattcctgcgattgaagcaaaccattgtcaaattccaactcctaattaccaccagccatgcttagacccaaattcagtaatccattctcagaacccaattttaaccgagctcgagaaaagaaagattgtcgaaagcgaggcttacgtgacgaagatacataagctgaaacaagaatcttattctctggtccacgaccacgattcgtattcaaatcgagattcttgagcgattttggcagcttttcttccatcaaaattcaccgcgagatttctgatcgccggagattctaatcgaggaatattagcggacggcggattatatgaacttctaattagctcaaaccgaaacataaccgacttaacgtttatgatctctcatttgtatctctctaatctctcttgtgtaatatgttacgtgattagtctcgctctgtttcagacgtaatttaacttccaacatttatgaactgcaatttattgagatcaccaatatgtgatcaacgatactttttccaaagaatcaatcatataatgttttcatattctacaacatttttcacccaaattcaactccgataaaccaatgcaaaaaaaccccaatataataagccaaaacagagcttaacactcgcaacatacttacacaaaaccgaagaataggaaaaaactaggaaccaaaactaggacctttttaacccttattaggttggagaggcaaagaataaaggtatgaaaccaaaaacaatgagactttgtttatggaaactttgtgtagaaaccattaggaactgcaactgtcattggctgattcgtggggaaaggaggctgctgcatagctgggaattgggtgggaatgccataaggttgcggtccaccagtcgtgaatggtagggagacacatagcggtagcggctggccagctgctactacacctgcatcacataatggttcattctagttaaggcacaatcttttggtttggtccaaaaaggcaaatcaaggtagactcaggtatttaccttgatgcttcaggtattggacatgttgtgcggtaggtagagggcaggagagcataggtgagagaggcggtgttccttgaaccagatcctggaaaaataagaaagactattactaaaaatgactataacgatatgaataagaggagattttcgaccaaacttaaaccaatgactgcgtaataatatttcttatttcactcagcaatacaggacatacattcgattaaactaacatcattaaaggttcatcaagaagctatatacatcaagttctaacctgagaaactgattggacatagacaagctgccccgatcttgcaaccatcacctggaggacagtaaaaagagtctttagaaacaataacaccaatacatctcaatacagataaatttttcttaaaaccgcgctttcaacaaaagtgagttttggggacctccatgaaatataacctgaggacttggatttacaagcattggtgcagcttgaacagaatggtactgagcggtgtatctctgaggctgtgctctgttaacagttggcccaatcatctgcaggaaaatgggttgcaagtggaagaatgattcatccatggcaaaacaaacaaaagttggtggcagaaagtatatggaagcattttaacagtacagacaaagccatatcaattcagaatgatcttttaatctggtgttcaatactaacatttatggttgttaaccattcaggcgcttagtggtgagaggaacagtctattctcaattactagttgataaaagccctttgacataacatgctcgaagagagtaagataatacttacgtgttgaggaaattgaaatccaccgacagcatgtccagcggtcacattaccatatggtacaaacttagaaggtggaagtgcttgcggcacataagggttgtttacaacttctgggtaaatagcttcaggaactggtagcatgggagtgttgcttggtatgtaagcaatatttccaacatgaggcataccgacaggagacggtgaaagccgttttgtataagacggagaaaaaatcttagcctctggattcagcttgaactcctgtatgtggtagaagttttagaattgaaaacgtggtaattgagtaatagataaagtaaaatgaacactcaggctgatttgacaatataacaacgactataatgaacacactcgtttgaaatgtgagagaatgaatagattaacaaatctttaggaccagaaaatcaatctaaactgtacttaggagtttaccttaggctttttgacggcctggataggtactgatgcagttgaagatgccgccactctaccccgacacaattccaaggtgtcatcaacaggtgtactttctgacaataaattgtcagttgaagagggttttgcagcagcattgtgaaaaccattactaagaggttccggcatcaagttatcttcttctataggtttaactcgttcggacatgctatccactggatgtttgtaatttcacatgaatgaaagttgagggataagtatgttagataacatttcactatcaaaaagaagcagaaacaagaatacgatagctataacaaagataaaaaaatatccgtggaaaatgaactcacagctagaacttgagctttggatatcaatctgcaataggaaactaacaagtaagcagctgctaagtaataaccgaatcaaacaaatgaactatctttctacaagactaacattatcctgttgataaacctctggaatttgtacactacgcttcaaaatctgagctccagcctgcctgtcaacaaaagcatacaagaatcagagagaaggaagaaatttatctaggcaaagtttagacattggtatgctaaactatactagattgctaagattgacatggaaaaagaaaatttgtcacagaatgcaaatattgagatggaaatcagggttctgttaacatatttacttcatttttcagaaaaattctaagtaatcctgttttcggaagttaagagattttcacaattatcatctggcgatttcttaaagcaatttacctcttatgattaaagccccttccttgagtggaaacatttgtggatttatttgcagcacataaacgaggctcagaaggtaatgtttctgtggctgatccgacctcattattggctgttgtaacatttgatggaagcgagactccctatgaaacagagatccacaagcatgtcacacagattgttactaatgaagctctaaaaaaggtaagtaactgaaggaaaaaagaacgcacttccgcaattatttgaacaatagtggaagacagaataacaagtgtatcgaccacactcccgcttgctacattcgatatacttgtccccttcttagtaattcttgcatccttcaaaacaatgcctgtatcacacagagacatattaagaaactataccaaaactgtacatgtccttgatctggacaagcctaactccataattgtccaaatcatagactgttataaactgtctgtttgagttgaaattaacagaacctaggaggattcaatagtaaaagatcccattcagatctctaataggtaacaaattccgataagaaagctcgaaaaccaaatcactcaaaaacatatgaaaacaatcgaaacatttaccaaagccattgtcgacggaagcggtgaagaaaatcccagaaaagacggaaccatccttgacgtgaacatgaacttgcaatccgattatacacatagttgctgctattaacaccgatgatgaagacttgttgttgttgttgttgtcgtcgtcttccactttccttgcgtttcccatccttttttttctttctgacgacctttcaaatcccttgaagaaagatttcaaatctgtagaagtttctatggaaatcacggtctattcggagctaaattatatacatatatatcatcgtactaggaaaaaaattaaaaggtgaagaaaatgaaaaaacagatctagaaattacgagggaaccggtaacagcgactctctctctttttcgctctttttttcttctttttctccacaggcttaatgggcccttatttggtataacacggcccatgttgatttcatgctaccccattaaataaaatcttatttaagtttactgttttcttttaaccaaaggtgaataaataactcatcacaattctactatatattgaaaacgaatcaactataataggatcacaaaacgagtattattgaaaaattatgagggtactactgaataattggaagtcataggtgatacaagaagaaatggtacagcaagaaaacataatggtcatattagtcatgacaaaaaacacttgggtttaagctttttgttatgacttgcaaggacactcaacaatagccacgcgaaagaaaaataatccaaaagaaaaaaaaaagagttgaagagagaatctgagacaagaagagctaatacacatccacttcaataattcattcaccattgtcaaacggttacagctttctacaacttcagctcgatcacgacttacacatcatgcttcactgcaaattcggataaacaaacagagtgaagaagaatcagttatctcgcaaaaaaacagaaaacatagatacttttcattcgaagatattcagataaaaaccaaagaatgttacctgctgttgctgctggtatccaccaggctgctggtagtttccatagccgcccccagcataaccaccgtagtaggcgttagggtcctgaggaggaggtgcatatccgtatgcttcatatccttgaggaggatacccatagtatcctccaccaccaccatactgggcttgatcaggttgagtctgtgaaattcgtggatcaacaagtcatcagatcacataacgtatatgaaagcgtagtaagcttggtgcattgtctaacagatacaaacctgtttgttggaaggactgcgaccccatgaaagacgaatgctttgtcccccaagttgtgttccgttcaacacagaaagtgcttgctcagcacatgccctgaagcatacagacagattaaatatgtgaaaaaacattctcaaaataagtaaagatgaagttcgtctccaagttcacatttacctattggcgtattgaacaaatccgcaacgttttcctgcgggtattttcacatgaactagttcaccaaattgaccaaaaactgacttcaaatcatcttctgttacactttgatccacagctccaacaaaaatctggaatagagaacataacgcttcaatttcaacaatatatcccacagagaaaaaggcttaggcaacgtcaaagaaaaaaaaggcttagggaaaccaaaacaagttacgcactgttgtgttagttggatcactttctcctgaatttccttgagtgttctgatatgaagctgcaataaaacagtcaagagaaggtaaggaaaaaaacctcaaacatctatttatttaattaagctgacagtgcaaggacacagacactaacacaaacgcacacacacgacaatagcagtagcagaacttatccaaatcaagacccaaaattatcaacatataaagcaaatgccatacataggttacagctcgaagataaaggtaaagtgattctgaagttagttgctaattaatacaaaaaagcacattaaagatatactaggggaagtgcctgcaagatccaacttcgagaaattagagaatcggacctaaattctctagggtatcacaagtaacctaaattccttccaaggtctgacagtcttaccattgtaatcaacttttccgaaagacgaaatgtaacactaaaaaaggttgcaagtataaatttagaggcacaacgtaactgaaagaaggaaaaaaattgcagcactaactactggaaaaagatgaattgagaggtatgaaaaagatatcaaaacactctttaaggattcaaactggacaaaataaagcgaagagtaatgaactatgtaacatgaaaagaaataaaagatagggctaaaaattaaaaggaaagacttatgcttgataagtaagaaactggaaaataatttgcaaatggagtaaaagctttgtaattaacttcttctgaaaacataaccaactgacctaaatgaggccacgcaaggtggaatcattttcagctgaaatcagttccaggcccccgaaagagagcctcttgttctcctgcttaaagacaacatgagtttttttcttataagttttaggatgttttgcgatattaaattctttgaagagctgaaaggcaagaagcgggagaaaagggtagacagattctccagtaatcagaaagatagcagtaaaggagtaccccaaagaaaagacaatcaactaacatagacagtgtaagacaaagtgagtcatatcatcactcaacttattcataagtgatcagatatcaggctccttaatatcaaaacatacctggttgcattgtaagaggcttcttgttggcagcaggaccagtacgcataggccttgatgagcagtattgaccattcatttcagtcatggcacgaatctgctcactttcatccgcaaacctgacaaatccataacccttggaccgtccagtagtcctatcattcacaactttagctcccttgacagaggaatacacagctttaaacgtttcagtaagcatgtggtcggtaacatcaggtgccaagtctccaacaaaaactgtgtgctcaggcccttcagcctggcgtctctctccagctccaagctgagcccagttcaacctgaaggcctgctcactgctcggcatcggagcaccattgtaagtctgtaaattcctctcagctgtagcatggttcacaaactcaataaagccataaccttctgaatatccgttctgtttattgcgaataactttagctgctgtagcctgcaaccacaaaggatgaaactttcaatacttgtagaagaaaaacgagagactaaaaacagaaatcaacaggattttcaaaattacctcgccagtaagaccaaagacgttcatgagatagttctcatccatccatggctgcaagtcaccgatccacagggaccggatctcaccagctgatcctggattctgagatccaccaccaccatactgctgctgctgtggttgaccagaagacggtgcagactgctgattccatcctgcaggcggctgaccttgttgttgctgctggtgctgcatcatccacgactgctgctgctggaggtaagcttgttggtcggaaggaatctgccctggccctgttgcagcaccgttggaagctggaggtggctgctgcatcatgacgacgataacctagcaaaaggtacgactgtcgtagatgcaattaaagggttgagctcgaggacgtaagggcaaaagagagagagagagaaagattcgctgtcgctgtttcttttttatagtcaaaagttggttctaatatggcccaatataaaagtttgagctcggcccattataagagcactcgaacaacccggttaagtaagtctagggttgaccaaaaaaatcgatacgaaccggtcgggattggtttgggattgagatgcctgatttcgaactctcagcgtcgccgatatgttttgtcctgttaaaccctaaaactaaaaccccgcgaagagagaagagttctctgtagtgttcttttgatggcggaatcaatatcatcagacttggaagatcaaggtacgataatagcttgacatgtgcagactcttttagcaatatctgtttggttttttccaacaaaaaaaaaactaaccattagaattttttggaattaattgttggaatttttgagtcaattaataaaattttagctgaaatttgtctggctttacctttgaatgaagacttgtatcacttatttgtaattgccttgaaagtttttgtctttgagtagcttttaattctcttgaacagtgtggactggtggagaagtagtttcttactatctgattgaatactttgtttgatatatcaggaatggtggtggacggagggaatagagatgttgaggtaggaaaaattccagtgatggctttcagaccatcccacgaagctaagcttagagaattgttgcataatatttgcttacatgagattaagctatgctctgatgctgcaaaagaatttgttaagttactgaagggagaaaccggtggcgatttgttgcgtctttatttccagagctcaccaaactttgctgagcttcttgaggcatggaagcttcgacatgaaaaacaaggattgtcctatatattctcgcttatccagacgattttgagtcatccagagggaaaagatagatcaactgatattggaagagctattgaccagtttggtaggttacttgttgaagaaaaattggatgatatttacaaagaattgaacagcaaagagggaaaacaacagtctgctgcactttcattgttagcttcgattgttagacgtggtccaggaatggcatcagagatagctaagaagtttgattttaagggttttgcaaaactagcagagtataatacgcaagggactgaaaaggttaagaaacactcaacaaggaaggcatttgttggatttgcaatatcattccttgaagttgggaagcctggattgttaagctcagtgttaaataagaaggaaatgtactcgaaagtcctgccaggccttgggaaagatgatgatgacactgtggcttctgtcttgtctacgttaaaggataagatccttgttgaagaatcattaatttctcctggtctaaggagtgttctttttggaattgtgacgctaaagcatctagccagcatttcagcaagagaggatgctgggattgtgaatgagttggcccatgatgttcttgttaaagtttgcacagacccctctaatggattgatgccagatgcaaagagaaagttgagaggcaattctgacagactactaatgctcatgaaggggttgagagcagcagaaattggttatcacagggatttgcttctagccattgttaggggtagaccgtcgttagcttcagatttcttggacgagtttccatacaatgtggaagatttttcatcaccatcctggttagtcttcttcagagtacgaaagtgtatctatctttattttactgcgtctaccgtccaatttctgctgttttgtcattctagtaactgaagtcattgcaggttttcttctatttccttggcagcaaatttggtatcgtcagtaagaacttcatgttcttttgactttctcaatccagatcaacgtgctacacctccttctggtggctcagatgttcagactatcatgaaatgcatatgcccccgaccatttagccggtcactgatcactaaagggatgctacattctgattttcttgtgaaacatgggaccttgagatttctcttggagacgctgaggctgttggattcgtttcttactgcttggaacctttgttcatctcatagatgctcggttgagcaaattcagatttctcttgagcggaacgtcatgggtgaagtgagcagtttttttccagattcccaggtgttattgattgtactgaagtctctggacggttctagtggaactcaaaagctgtcattgaagagagaagcagagttggatagtggattagtaggaagaaaaaaacgcattaagcgatcggagaaggatgttttggaagaagaggctgttgatattgtcattggtggggtaggttctgataaagatatctttttggctgaggataatatggatgctcatatgacagatcaggaagatgctgaaaaagaatatcttgggattgtttcagatatttggatttcagagctttgttctaaccctattgattcggtcgaagaagcagagatgtgttttcacataaagcttctggattccctcaagatttatgtggtacgttgatttttcttattgttattttcgtttgtgttgttggaaaaaaagccgaaccttcacaaaaaagttattagtttaaatatctagcttaatgattatagctagtgacaggatgtcttattgttttgcactgtcctttaaaattttccttgtcaaatattagttttgaagtccttgcaatgtataccaattgaagtttgatttttgagttgtagtggtttgtccagttgagttgacagctagagaactggaaacgttcatgcgttgcttacccagttttggtcaaatgtctcgattcttgtgtcacgtttctatagtttatttattattgtaaagatgtctatgcattattggtcgcttagacgctcctcatctgtacttgatgagttctggttttaagctacatgtttcatctttgcagcgtgctgtacctaatgagcttgaaggatcgtttgatatcttcatgaaatttctgagcaattctttcggtatgccagttgaactgcagagggctctcttgtctttgctaagtgagtacatcagttggacgccaaagtctcaaagtgacagaggtcctacaagaattccaccacttatgcacaagcatttgcgtgtgttcattaatttgttacttttttcaccacacaacggggtgaaggatctagcgtacaatttagcagtggcagctatgaacagtactggtgcatttgaaaacaacccaagtgaaattggtgcatggttcttgtttctaccatgttttgaaaagattaaattacctcttgagcttcaggaggctgtacagagcatgtcatcagttgtcgtgtcctttttatgtgatgcagtttcgactgttggaaataatttattcaagcactgggacattgtcagaagtagcttgtcccatttaaaaggtataggtatttttgtgccctcgagatcaatggtttggtataaaattgatgaaaacttggtggttatcaaacacgattcaattaatctcatgcaagttttatcctagttacttgtcctgtggacttgttatagacctagaaatatttttttgacttgtgtgtatcttctctgcgttggttgcaggtgtatcaattggttttagccccctaattatttgtctactacagaagtgtgtgaggctactaaattctgaatctaaaacgtctttaccagagaagtcagcaatatctctgtacgtctgcagcacactgaaatatcttttgcaaactcaggtaaaatatcttttgcaaacgcaggtctatgtatattacttttaccatgcactaggtttatattctagttttcaccgcttaagataccaatatctttcctttaaattcaatattgtaggtagattccaaattactctcatgtttgatccagtcagttttatctgaggtggttgatgaatcgaaggattctttatgcgaatggaggccattgagaatgttactttgtttctcacaatccctgtcaaacgaaaaacctatcatcttgcattccagaaggacaacgggtctacctgctgacagttcttttgcagagactcttgatgagatcaaaagactagttagaagcatttctccggatgaaattgcaggaatagttaaagcgttttcttctgcattgatatgtgcaacacctgaatcgatcttgcaaaattttgcttctgtgatggatgtttcttgggccttttatggaacaccattctcatttttacagtccatcacctttctagaggaaaatttccttggaaacctttcaaagctatcgcctgacttgtttgcttcaggttcagaatttactgggtcagggaatctgtgtgaaggaacagtagatagtgagattgatttttctggccactcatccgtaactgaagaaatcagaagtaagatggacaatcgtgatatggaatcttcagccttctctatattcttaaagcaggctccttttcctgtattacttaacgcaattatgagcatggatatatcttgcttaccagagtttccaagaatatcagagctattgctgctaaaagtttcacagcctaaaagtggtagtattgactccaatattcaattaatactgttctggctctttcaaatacgatcatcttacaaggttcaaccagctccagtacttcatcaactctctgagatctgcttacgtctcatgaagaacttgttctctcaaatatcagaaccggagcttgtttctggaccctcttcaaataagttgcctgcttcttttgcaaagtggaagcatcaagtggccgagacagttctttgccacccagttgtgatggcactgttagagagtcccttggattgtggcacattacctccagtgcagaatgttgagattttttcagaaacatcgctgacaatgggcaggctagtatttagtgaaatagatcaacacatccttaatctattggtttctacttgtgaacactttttgtttgatgagaaaccccccaatctgtggaaagaggacctcaggaaaaataagtcaattatagcgtttaaggacttggttgaaaggcttctcttggaatttagggtcaagtttgagctttgtgttggttctcaaagttacgtttctcttctccaaccagcacaattgattcatgctttgttgagatttatatcaccttttaaactttttaatattgctcattccatgttgagtaaaattgatgaggaaggattaacaagcccaaattcaagtattattctcagtttgggattgggtattgcaggtggagcttttgaaatgcttgtattatattcacaccagccgactgctaagagaggggtatatgatttgctgtgggaattagaagaaaagaattatgccagtaacatcattgagaaagtatatagcatggcatgcaagttttctacctctcttgatttggattcagcagatatttgtttgcttaaagtttgtggtggtattttcaggggaaaacataatcaaaattatgctgttgacccgttggtcttgaaaatttcactgattgttggaagaacccctgaagacttgattatccattgcattaaccgggcaagcataaccagagccaagatattattctaccttgtggagtccagtcccttgcatctgttagtctttggacactttttctttagtatgctaagtaagaaacaggatgactctgctcttacagatgatcagtttatcatgcttctgcctgctgtgctatcgtatctgacatcagttattgcaaaactcgagaagccttgtaatagatgtttggatataacttcagtttattcaaatatactaataaatggttttcttcagtggccgaggtttttggctaggtgcatctttgaagagaagcatgaagagattcttctgtcaacgactgaggatatggaaactatgtttaatgcgagtcttattgggaaggcagtacgtatgtttcaataccacttttccttgactgaaagtccaactaaagaagatgatctctttaaggtatttaattccatgtttcctctcagtagtactggcaaggagatgttggattacgagataaaggaagtggacgttcagtcagtagaccaaatattaaatgttgctatccgtgtggttgcaaaagtaacagtttcaaggatttgtttgtttcctgaggatagcagtatgtgtcatctcaaacgtgcagcaggtacttgtgtgaaggaaagttcttcaaaaattggatgcaatagagcaattttatcaaagccgttgctagatgctttagttaatagttggcaatgtgttgtcaagaaatctgatggatcttttaaagggaattatgaaggaaaacaagacagatgttggtccttgtgcaaaagtcttgaaaacttcattttgagaagtattctacagtttttggaaagcatgtgtgaggagcttgttcaattggattctcttcccttcctggacagattgatgaaatcagttcttctctatagatttgaggactcgaagacactgaagatactgagagaaattttctccttattgtctagagggaagtactcatatgcaccatatatccaacgcttaatatatcactctcggtttacaccaactatcagttctctctccatatcatcctcaaatactggtgaattattcaggcctgtctccagcatcctaaatcatcttatcatcttaagtccggattctgtcagagttaaaaggtgttgtcttgaagcacctaagtatgcaaagcagttagaaattgtcaaaattctcagagtgctgctctccaattgtggaaaagattcaggaatgaaagagctgctttcagatctacactttcttcttttgtgttcttatggtgcaactctgagagaaatcgacttggagatctacaagctgatgcatgatatcaagttgattgaggccgaacagacactgaatgtttctgaaacagattatttgtggggtaaagctgccttgaaaataagagagggactctctcaggatgcatctgatgtttgtcaagttgatttagtggaagatgtccggcagggtcttattaaagagaatctttgtgttgatcccaaaatctgtgctctaactgttttgttttttccttatcaacgtactacagagaaatcggagaatttttacctatatgatgatccaataaatgaggtacccgtctttagttttaattttcagttagaagttcttatacttgcttttttaacatcgatcaaattaatccctcctccctgtgtagaaatgctcacctgttattgaagaaatggaacgatatgatccggcattcatcctgcacttctcgatagactcattgtcctgggttacattgaacctgtggaattcgccagcttaggcttgcttgcagttgcatttgtgagcatgtcttcagcagatcttgggatgagaaaattgggctatgaaactcttcaaatatttctggatgcccttgaggtaaaatttattttgtgtgaacttatctgtatgcatgtatcgttccttttgtaaatggtactttgagtaactttaaattctacaaaagatgggaaaagatattgtagagggaaatattttggccttccctatctgcacagaggacttgtgaatgcgactgctacatagcagaagtatttattttgtaggagtttcgggtcctaatcctactaatgcttttcttttctttaagtaattggttttgcaaaggtttaatggtcagatgtgttctcgattattctaatgttaaattggttctgaggacaccggtggaaacttctttgtttaacgataacttttttgatgtagaattgtaggaagaacaagcatgtaacagggcttaggcttctgctaatgtatgtacaaaatggagttgaggaaccatggcaaagaatcccaactgtttctgctatttttgctgctgagacatctatgatattgttggatccttctcacgaacattatgttcccataaataaacttttgaagagctcatctacactgaaactgagggtacgtattcactgaaaactgaaaactcttgtctttatcctttacactatatgccagcattcaaactacttacgatttttctctttgttagggaataccattgtttcatgattttttctggagcagcgctgttaactttagatcgcagaggttttgggaactacgcctagtgtatctgggcttgaaatcagatgatgatgttcaaatttacattaaaaactcaatccttgagacagtgattagtttttcctcatctcctcttgctgatgatgaaactaaaagactaatccttcaggtgatactttctttccttcatgtcatttagtgtttggtcttccttattcaatatcaatataaggttaatgctcataatgtatttatttggtctgtaaactatgggtatcttttctaaaccttcaagcccttaattcaacgctacataaactgtcgtcctttcacttttcaggttgtgaggaagtcagtcaaattccataagatagcccgacatctagttgaaaactgtggtctgttttcatggtgttcgtcgtttatttcaaattttactacaaagccgattggagacaaagatctgcacttggtagttgtcttggaggtatgtacagtatatccattaatggtattaatttagtcatggacaagtgtgcacactgtttaagaatatagattctgtgttataaatatgatgatgaatgcaaaattaatgaaatttctcaatggttaacaatgattgttgtctgttttgcatcaagagtccttatgtagaatagtgtattcgttaattgacttactttgtgatattgttgtatcagatcataactgatgttctcgcctccagaaacattacagagtggttgcaacgatttggcctcgaagggctaatggaaatctcatcgcgtttatacaaacttttaggtggtggcttggtatcagtacaagaaaatggtacttcagttgatttgattttgcagatactatctgctactctaaagatttcacagaaacgaaacatgtaccagccacatttcaccatcacaatcgagggaatattccaactctttgagggtgttgctaattttggttctcctcaagtcgaagctagtgcagagagtgggcttattactatattaatgagcaccccgccagttgacatattatgcatggtatctctctccctttctctgactattgagcatccctccaattttgtttgaagagcttaaagtgtttgtatcatatgatatcttttcaggacgtggacaagctgagaaggtttcttttgtggggaacctccacagcattaaagagtgactttaaaaagggatctaaacctagtgagtctcatgaagatacaaaaatactcattgaaggaccacaagaggagactatggtagcaaagtttctacgctggctgtcggcttcagttattcttgggaagtcttattctaaagccagtgattcggacccaacattcttaagtaaaacaaaaccagaaactttgctgacatcgttagaatactttaagaaaaggaatctcgaagacagcatgcaaaattcagagcacataataggggaagtaattgtgcacctccaacagttcctgagtacaaactacatgtttcttcttccctctgttgtatttgcactttctctcatgcttcttcacaatgacctcgggactggaggtatgctgcttttcaccgacatacacaactcttgttttccgaattacttagctttgattgagaattgagctcttgactagattaggtttgggttttgatattggaatcaagatttttgcttgtttttttcagctggttagagattaagaaaaatgatctgttgaaactatagaattatccaggcttgttcttaggtgttaagctgcatctacatcagagtccgatgtcgacatctacaaatctgaagctaaaaaatttctttcttcttttcagagtctgatggcgattacaagctcatcaaatctctgtgttctaaaattagtagtcctcctgaggctattccgggctggagatggtaaacgattccgctattgctcatcattccaaagttttgcattgtttatcactccaaatcttgacctgaatccttctcctcaggtcatattatcaagcgtggagggatctgtcatcggaacaagccacagatctggataagatcaatgaactccatgcgtgccaacaccttttgctgatattctctgctatgcttggagaaacgccacaggaatctcaacaggtgttgcttcgtaaaagttttgacatgtctcatgtattcgaatgggaaagaagtttagttgagacctagacactagtcattgtattgcaggattgtatcatccagatctatcaattttgtaatattaatgacatgagttgttgggttttgttgtatcaatgagatatgttatgtgagtcagagtccatataaatcagggtatctcgccgcagaagatatgtgtctgtgaattatatatacaaaaatatacagaaacttaacaatggttttttttttcatgtctatttaaagacactatattaaaaaaaaaaaaaaaatcgtgcatataacacgaagtcattcctaacaaacagacaatacagttgacttttcggttctagcagttctttggtctgtggtattttggaggcagagacgggcagtgctcgttcatatgtgggtatggctccattgtgttgtaaccgggaagttccatcctgtatttcccaagtatttgacagtacggaagcttcacaacgtcattgtcattgcaccatttgggaaaacgacttgcattactctcgaaaaacttgagcatgtaagcatctttgatctgttaaaagtaattttactggtcagtgtgtgtgtatcagtgtgtatcttctagagtgtgtacaggttggttctcaccgtgaattctgtgacttgaatggaactagagattggatcgaaaagcccagcttctttgtacatttcgaggataaaagcgatacaagacgttgatttcccatcgctatatatccaatcatcttgttcaggaactgccagcaactcgtcaaaagaggatccacgcttttcgacttccaccagtacatcaggaagatcaagaccctgccattttagaacatctcagagaaagaactaaagaaaagaaatcaatgaccatttactgaagaatagagaagaagaaaatagaaagcatatggtaccatgtgccaagagccaaaatgctactctaaaaccttctacttattttaatccatagaagagtaaaatgattgatcaagcattatgaacaagtgaaataaatgaacaaaatgctaatacctctgttccgagtcgcttgttaagggcttcattccacatgttagcagcataatcaggctggattttgctccaaactgtcatgacagaagcaacctggaaaaacataatagagaaggaaaagagatacagagaaaacaatcacaacctcacccataaactaactgatagaagctgattaaagagagaacaataaagagataaactgaaacttatgttgtcatcaatgccaaaattctgagaaatgaaaacctacaagttgagcatccagaggaggtgggtaatttccgctgatggtatcgatccagctaaagatcaagttgtgatagccatatggtttgccatccatgctacgagcatattcccatgcagctgtaacattaaacttggctcgataatcaggatgcaacggtagcaatgcaatgtggggattcgagtcatccttggtttgttcaaactcccaccactcttcccatggcaatatcgctattacatcttctccctatgacccaaaggttcgaaggagaagacagccaaaaaatcatgatatgcataaaaaaaaggaacaaaaatgcagttccattaaaagaatcagtttccacaagactggcttggaaagaagccactgggaaaatatgaacatgtcatatcaagttcagcgaaactataaatgttactagtcaagcatttcgatgatgttcaactaaatcattttagtttgttcttagcagagataagcatctagtgatactcagaacacgaactaactcaatggccatactatttttcaatagaacccaaaaatttaagttttaccttttcattttcattcccggattcaccaacccagagtttcccttcagagtccctcaaacagacagcagtgtgaccagcataggctccacttacccacttctctagggtctcaaaaccaccccaccgcccacggattttggagatagctagtaagtctccagagtgaatttcatcggtagtaatatttgtaacccaaggtttaggacgaggatagaaattagcacccatatgattcttaagaaacgctatgttagaattctccccccaaccagtattggtaaacagagggaagacatcccacagagctcggagagttcccaacatccctgcttccatgaggaatatcgaaactcctttctgcttaacctgatcaaccgtgagccagacaggcaaaacaaaaatccattagatatgttaactataaactggaaaagacaaaaagataacaaagaaagaagagcagagcagcttacatattcatactcagctttaccctcccactccttgaattccatagtgtgctctctcgaagcaaagtaccaatcccatgtcacacgatatggtgtgacaaagacataaatatccatgcacgtccaactatgtgccttatcgacctgcacaaaagacgtttcaacagaatcaattaagtattcatcattcgaaaaacagcttccaaggtgaagaggaaatgtaactctaagcctataattttttttgacaagtctaagcgtataatttgaaatgttctccgaaatatcaggaactcagaagcctaatatctaaaatctaacagcgtgagaacataaacaaacagagcttcgagatttaagctcatcaacaagtttctaagaacctcaaaagctaaacccataaacaaaaccctcaaaagtgaaaccaagaatatgaaaagcaacgattttagagctcaaattcatcattttgtaaccttaatgtgaagtgtgccgccgccgaattcggaaccggacttgttattgagctccaaccaagctttgttctcataaaagcaagcacctttccactccacggcgtcgtttctaacagaagcggagccgatgaaagtagggaggagatcgacggcagtgttgagagaattgactaccggccacgagacttgcctcggaaaaagcggaagcaggtctcgagggtgaaatggtaatttcccggatgagaaagtgagaagcagcaccagtaaggtagtggcgaagaagatgcacggagacgatgaagcagccattgttaagtcggttactgtctcgcttccgtgttgaattcgcaagtctcgatttttcgatcgtccatgactggttttcttaacgtgtttatttataatttatttcgtctatcctccagattgatgtaatgatacattcaaattaatttaatttagtataaccatttttgttggtcaaacgttctaacatattcgaatttcgcatctattaaaataagacaaacacaatccaaatataccaatctaatcgaatttcaaactaaaccagaataactgattgagaaaccgaacaaaaattattttttgggtaggtgggtctaatagaacatttttgaaatgttgggttttaatttgtaacttttagaaactaagaatccaaatttgaaaactattttataagtttgacagttggtataaccaaccaacttggtaatgtgctagtgatcagaatagccccacgcaacactaacgtacaccacaacataacttgagcgtaatctcgtcctctatcatgtggttatgccgtcgagaaaacgagaacatttgacaactttcacctgcaatcactctcaatggctgtatcacttccaaccaagtaccctctacgacctatcaccaacatcccaaaaagccaccgtccctcgcttctccgtgtacgtgtcacctgctctgttactaccaccaagcctcagcctaatcgtgagaagcttctggtagagcaacgcactgtgaatcttcctctgtccaacgaccaatctctgcaatcgaccaagcctcgccctaaccgtgagaagcttgtggttgagcaacgccttgccagccctcctctgtccaatgacccaactttgaaatcgacatggactcaccggttatgggttgcagcgggctgcaccactttgtttgtctctttagctaaatctgtcattggagggtttgattctcatctctgcctcgaaccagctttagccggttatgcagggtacatcttagctgatctaggttccggtgtctaccactgggccattgataactacggtgatgagtcaacacctgtagtaggaacccaaatcgaagcatttcagggtcaccacaagtggccttggacaatcaccagacggcaatttgccaacaatctacacgctctggctcaagtcataaccttcacagttcttccactagaccttgcatttaacgaccctgtgtttcacggctttgtgtgcacatttgcattttgcatattgtttagccagcaattccatgcttgggcacatggaaccaagagcaagcttccacctctcgtggtcgcgttgcaggacatggggttacttgtttcacggagacagcatgcggaacatcatcgagcaccgtataacaacaattactgcatcgtgagtggagcatggaacaatgttctggatgagagtaaggtctttgaggcattggagatggtgttttatttccagcttggggtgagacctaggtcatggagtgagccaaactctgactggatagaagaaaccgaaatctccaacaaccaagcataaatattttttttacagagtgatacatgtacaagaaaatttcagtaatatactgaaaagatttcttcgtaatttatatgtaacgagtgtgactgtatttaatactgtataaaacaagcaaaacaactgagcatgtaccatttaagtatcagatccgatggatgagtaaaccgaagaaacacagggaaaccagtaccgacactttccgtctttatggccattgtcgatcatggcaaggccctcctgaaaatgaataatagaattgcaaggtttcaggactcgcataggttgcattgcatctatcagtataatagaagtattgaagcacataatccaattgaagcaatgaattgcaaatgcatacctctaacaaagtttcgagagcatctataacgcgaccagatgtccatgagaggcgtctttgtacctcttccacaatcacaaagccttggccctgtgcggaaagcaacagaaatccttgagttacttcaggtagaactactaagatataatgtaacacatgtaatagttgttttcttttgtggaaatatgtatctcatatgattataacctgagccaactccaaaatctggttatggtctttgttcagctctgtgggtactgaacggacaagctttttcttgccaatagtgataacctcaaatccgctacccaatacctgaggagaaaatcccaagataccagcaagaacagttcaaaattttcccattgattaaaaatctgaaagaaaaaagaaaaacacaagttagatagaaacctttagcttgctaatagctcgaagacaatcatcttcagtcacagcttcacggtctttcttccttctctgacgaagatggttgcagagctcttgcaagctgatcaaacctccattatgtgatcttgtaagcatgcaaacttcaataatctgaactcctatttaatgaattcacgaaaattgttacatccctgctttctaatatcacagagggcatgtccaattcaaaacaagagaaaaaagtacacaagagattttatatcccttaagactcatagctaaccaaaaatcagaagcatcttcttcagtggcactagaaagagagagcaaacataccaagttcatagtagaagtcaccaataccaaggagctcagcccagaaacccttgttagaagcaagaggatccacaccaatgttagcacacatttcatggaactgagccctgaaggcaggattcttacgaatgtcattctgcaaccaaagaaaaaattatgcctcttttcaccacaattttatcaaattcaggaaaatgttattaaactacatgttcttattacgaaatcaagacgatgacaaaacaacagcaaacacaacaacaacaaaatataaaaaagaatcaacaaataacgaccttgtgtttacgagcgaactcttcaagctgggaacggaacgtggagagctgttctttcatcatatcagtccgtaacttggctacattttctcctagtaaccggtactgatcctgtttttgatgtatagagaattaaaagcccaaattcaatcaaatctgattcgagagaaaacaatgaaattgggtttaggatcaataccctagcagctgcggccttttgtaatcctccaattcctggtcgtcgtcgcatctttcaccgttttctgatctttgaatttctcttccggttgggggaacttataatatgatgaagaattggattttgagaagacgaaatatttttataccttataatatcaacaaatcagtgttcttttaaattccaagtaagtgttgagtatttgaacttttttacctcttatgtcagagtcagaatctctcaagggaacgaactctttagacagcagttatcaacaaacttgaagcctttctttgtctctatcttttcatcacttgtcgtcttgcactaatcaacaaaatctcgaaaacgtcaccaactcaagaaaattgagaatgttaaaaaaaaaaaaaaaaaagtaattgacatgcttaggaatctcaccttaaaaaatcagagagccgggcagaatcaaaaggaataagctcaaacttggttacccagaaattgacattaaaacacactctctttgacaaaccaaagatatggcacgagattacaaacgtatcaccacatcctatgaattcaaaactataaatatataacttcaaacagagacatatccaaccaaaaagatagaatctgcagcttatgaattctaacacatcatatacaacaaggggaaagataaaaacccaaaaacttagaaattcacaagtacctattggtatcgagaatctatgaatcgatccacaatttcaaacacactttaacccagatttctttgagctgaaactattaaaccccaaacatatgaatcagattccaaaaaatagagaatcgatcaaagtgtcaaaataagaaagatgaaatgtatagagagacaaatcataccttttcttacaatcgaagaagagataaaaaaaaaaaagacagagatcgaagaacaaaggttgaagaagaagaagagagctccgtttgaagaagaagaagagagctttagatcgaagaaagaaaaagaaaaaaacaacaatgaagaaaaaaaacgttttagggccagccttatcgaagcccgaaaccatttcagcaaaaccttttcagccttaagaaaaaaattgctttttttaacatttcttcatcattattctcattgttagaagcagctggaactatcataattactgtttttctaaatcatctttttaaaaaggtttgacatagtaaaatccttttttgtgtgcataactctgttttcttgtgttagatagtgtaagaaactcttaaacgaaaattttgagaagaatgcatatatgcttttgcaaaaacaaatttctaaactttaaacaaatgcataaccacgagagagaaagagggagaaatcatatgaattgaatcttgcattttgatgaaactctggggagagccattacattagctaccaagtagttactctttttgctgccctctttaacgccaactttcacagtttcgagacatttcaacttccccaaaaaatgcctcatttgtttcagctctctaaaacttcctccgtaccctaaaatcttaagcaccttcactcgacacctcgacaaacaggatactatctccctgtccttcatacggatgcaagcgcacgcgtctccacaacaatatgtaactctgtgcacaagaccctgaaaccacaccaccatttgacatgtataatgacaagaaggaacagaatttatgtgtgttttcttgaaaagatgataataccttgacgactaaagtttgtagatttggggacttgttgagcagccttggcattacttcccagcctttttccttgtcactttcgatagataaattaacgagatcttccaacaccggcaaatcacaacaatagtaaaacacctgatatgtgtaagccatatataaataagttaaagaccttgctagctagcactagactggctctctcctgcatcatgtgaagactcaagagaagaagctgacctcgagagaactaggagacaagtgaaggatcttaatggttctgatcgcctcaatcagattcgtaatattgccaaaaacttctgcattccacaaaccatcctcatcatagatgattggctcatataatcgaagatccagtctagcttcgactagcgaatccaaaacaacataatagtttccagcgacataactggagtagtcaaggtacacaagactcggtgtcttcagcaccatgctaggacgttggatatcgtcatcaaaatcactagtgatggtaactcgctttacgtttggacttgacatgtattgcatccaaacgcataggaataattcctcaagcgcagggcatccatggatgaagaagttaatcatctcaacacttgtaaaacaaactgaaacgagagtaagtgttttgagcgcagggaaaaacacacccccaaaaggaagaagatggcctccaggataaaatccatcggaaatggtgagtttaaccagtgtgttgctagtgaaatactgagaatctataggtagataattggctgcctctaagtttagctccaagcagccacgttctagcgcggtgcgaatccaacggttgatacgagctccatcatcttcgtgatagcatttaagagagaatttctcggtaagaggagcattgcttaacagagcaagcgttttgtccacgaaatgagagaagctatgacgtcgacgttgaccactctcgtaactagatgcttcgtcctctccgtctttgttgtcgggatagaaaagcatcgtttcgtcaaaatcaaggctatctacaagcggaagcagattcctccacctcttggacagaaccgacgttgcagcagcaagctttgtcggaactaaagacaggattttgccaagaacatcatcggggagattgctgatcagatctgtgtccatagagacagagactaataaagagtcttttcttcttctgcaaaagaattagaaaaaaatttcttcaaaaccaactcagttttaaattccaagtaagtgtcgagtattatttttaactttttacctcttacgtcagagtcagaatgtctcaagggaaactccttagacagcagttatcaacaaacttgaagcctttgtctgtcttttcatcacttgtcgtcttgcactaatcaactaaatctcgaaaacgtcaccaactcaagaaaattgagaatgtttaaaaaaaaacagtaattgacatgtttaggaatctcaccttaaaaaatcagagatccgggcagaatcaaaaggaataagctcaaacttggttacccaggccagcaatgagagcaagagattgacataaaaacacacccgacaacaacaaaaaataacaattggtttaaaatcgatctagagtctgctccaagaaatcttaccgaattgaagaaagagaaggatgtcgatgatgaagaggaataaagtttcactcaatttatcaattcttccggtgggatgttgttgttgttcacaaagaaagaaccagagtaaaaagcttaaggtataatttttttttttttgtagtaagagacgacggcggagaaccgtaagcttttataaacaagtttgggcttcctttaggcccaacaatgcccaaatttcaagtatttggattcgcccggaaaagggttcgtgtgtcattgtggaaagcaaacgacctcgttttgtaagcaatagaaccgcagattctcttcttctttcttcctcgacaagtttcggctctctgagtatctcagagctttcgtcgtctcctgcaatacctctcagatacctctcaggtcgagctttcgtcgtctcctacaatacctctcagattccggcgattctttcttcaatctcatttccactaccaaatctgaacatcaaccggacggtcggaatcaatgaaactgtgttagtgttcttaatttgttccttgttgcagtttcttagtgacttctatttttttccatgtgatcgttacttgtaaatcagaaaagagagaaaagaaagaaaagaaaaaaccctttaagttattgttttcgccaaagcatatataaatgggattatgatatttttggattttaccgtgtcagcaccattaagtcatcttgtaagtagaaatgaatctgactctcaagaaatagtcaacaaatggaccaaaaatgagaagcgaaatggcttggatgcgatcgactgttcccagagagtagattttatcagaaactcttgaagatcatcatcaataaataaatttgtcaagcactaagacatcttatctgtacccacttttgtaatgtttggaacctctctgtttctaaataaaaagaacattttgtgaaaagaaaaaaaaacatcttatctcactgatatttattaacaataaataactaacactattatatatcgatgtttgacaagttatgaacaatactcaaagcaacacgacaacttatctaatgagagagtactcaacactaaaagcttaacgtatagaaccccaaagattcattgaaaggatagagtcattgccaacagattaccacttatcttgaaaaagtttgagacttgtagagaatcagattgcacaaaatcagcgatcgagaaataaaagaacggaagaatattgaatttgatataaaaagcttacgatctgctaaggcatctgtgatggttgtggttgtaggagagttgggatttgtagctgatgttaaggttaatgccaaaggtttcatttgtgcttgcactgccaaggttaaacaaaaggctaatttggttggtgaatgttccaacgtgtggatctaacctttcagatagaacacctccataataaaagtaaaaggtaaattttcagagcaaaaacaagaaaatgattcgagttaagcaaagctgagttttaccaaggaaaggaatccacagcaacaacaaaaattgattagcgagtttcttgcgcttgtgtgtgttacaagtaagcctttgttgtggtttgtcaactgctcaggcctgcataaagccgaaacgagattagattgtataaatttcaaacatcaaggactaggataagaatgatgttatagatttttttaagatgtattcttcttacacgttgggctgagtaggctccatgattacacttccaatcttggcatcaagccttgagctatgtggacacatatacaaccaaatacgtgggaacttaccccatgtcaaacctttggtgaattttgcaataggtttcaaagataaataggcggggagttgaaaatataacatcctcaactcggcatgccaagagaatggatcattcatcattcacaatgacctacatcatgttaaaatgtcagagtgttgattgtgcagtgttgttctgcaccagcaaaaaatagctatacaaatatgagatgagttacctcttcacaccctttcatcaaagtcataatcgccaaacacacgccagggactcgataattggatctttttagtagtaggactcttgtagaatgaccttgatgaaaacttttaaatgaggtctactttttttcttgacaatgaaagcagttgccaactatggagcactagtttgagtaacaataaaagaaagataaaaaattcttcaactagtgactactaatcactagtttctgactcatctatgagactaaaccgttgtttatcacaacctctgtaatttcatcatttctattatttatttcacaaacgggttggagtttaaaaatttgtttttgccaaagtcatatattcaaaaagttgatttggtcgcattaagagtcaaacagaacaaatacacacccatgtgggagtatagataagctctgaatcaccctgtttccctcgaggttttgagattacactggcaatgagggaatatatggcatgaaaaacttcatatgtatcaatccttatcaaatgggatttctttttttttccagtacaatgaagtctcacccattgtagggtaattatttttgggagggtctttacagaaaaacgtccagctcctacatgcttcgtcaacgagaggttgctggtggaattc

SEQ ID NO: 634 - DNA, 45980 bp, Arabidopsis thaliana
agccttgagctatgtggacacatatacaaccaaatacgtgggaacttaccccatgtcaaacctttggtgaattttgcaataggtttcaaagataaataggcggggagttgaaaatataacatcctcaactcggcatgccaagagaatggatcattcatcattcacaatgacctacatcatgttaaaatgtcagagtgttgattgtgcagtgttgttctgcaccagcaaaaaatagctatacaaatatgagatgagttacctcttcacaccctttcatcaaagtcataatcgccaaacacacgccagggactcgataattggatctttttagtagtaggactcttgtagaatgaccttgatgaaaacttttaaatgaggtctactttttttcttgacaatgaaagcagttgccaactatggagcactagtttgagtaacaataaaagaaagataaaaaattcttcaactagtgactactaatcactagtttctgactcatctatgagactaaaccgttgtttatcacaacctctgtaatttcatcatttctattatttatttcacaaacgggttggagtttaaaaatttgtttttgccaaagtcatatattcaaaaagttgatttggtcgcattaagagtcaaacagaacaaatacacacccatgtgggagtatagataagctctgaatcaccctgtttccctcgaggttttgagattacactggcaatgagggaatatatggcatgaaaaacttcatatgtatcaatccttatcaaatgggatttctttttttttccagtacaatgaagtctcacccattgtagggtaattatttttgggagggtctttacagaaaaacgtccagctcctacatgcttcgtcaacgagaggttgctggtggaattctggtccgagctcccatgggagaacagagaatatagtttcaggagttgttggaattcctacacctgttccacccctttgttcagtgtaggaaggcgatacataaactaatgcataataagtatatgaataagctttataatagatcgaattgttgggaaaaaaacctaacttatttatacaatactgaaatcatggtcgaattaataaaatcttttaatatattatacagtttttaaggaaaatatttcatttagataaagctttgatatacacaaatgacattttttttttctatatacaccaatgacatataaaactattgaatgtatcaattggcgtggatggtatttggctatttgccttagagtagtgtgtataagataagaaaatgcgtatttatatatatgaatgtattggcatctcacaaaattacatatctagatgattgaactcaaaaccaagtaagattatttatatacacactattatttttaggtaatttcttgatttttttctcatgcaaattgtgtacattcaaaaactatttgtaattgtttctgttttctatgtcgagaattccaatttgacaaaaataaaaacattaaaatttacatggatcaatgattaccaaaaaaaaaaagttaaatggataattgtctcaaactcgtatcatattataaattaattaattttgtctggccaaaacaaaaacaaaaaactttattttaaaagtctgttataaaattagggatttattaatgatattcttaaaataatttctgtcttatttatttgttcttcaaagttccggctttttcaattaagcaaaaggaagaatgacaaaatattgtaaaactcaaatacatagcaatatttgatcaattccagtcatcttttacgggtttttaataagaaaaatcaaactctagactctagagtctagatgttgaatcctgtctgtacgaaaattatgaacaacaacggtactgaagttaaagctccgttcacaagctcatgtttacttgtcgaactgttggagatcgatttcccaaactgatgccaactgcaccacgagctgttccggcgcaggaccttcccagtcttcaggtggatccatagtcgaacatgcgtcttgtaagttgtacaagatctctgtcttcagttccattggaactccaaacgtgtctgcaccgtcttgtaaaaccaattccaacagctgcaaatggaatggcaaaaagagagaaagagaggttaaagacaaaacatatgtgtgattcttggaacccagtaatgtactgtaagagatgtacctgttgactccaagataagcaaatgtcgtagagactatgatccagcagaaactgagagatgaagtttagagcttcattggcaatctcattcgacatctggtcaagagaaggtcccgtcttgtccatcagcttgatgaccaagtgctggtcaccagcacagaggacttctgcgtaagcagcatcaatgtcaccaacacggagtgagtgcattgcattactccatgaaacccatatcgggtcacgttcctgcccttcgttatcatcatctcccatggcttcagcttcaggggcaacagccactcgggttggacgagggactgcaccatcctcgccggctactctaatagcttcaagtgtagcttcatcctttgatgcttgccacacacttcttgctgaagggccttcaccaaatctaatagttccagatgctttattatcccaccctctcctgccattacccatgtgctcattctcatattgttctgaccgaggtgatcttcttggcccggcttgtccgtttctggaagcagcatgtggaggtatgaaccagtcatctgccatgtcagaattccacattctccccctcatagctccatctgtttgtgagcctctttcccctggagctcgaccattatactttccagttggatagttagcaaaactattatatttgccaaacccagctgtgagattagccctacgacctgatgatatcgaaagatctcttgccatgtcttcaacaatcctttctaaaccccttactctgccctccaaggtcaccatactgtcatgtgagccaccaataaactcttggagcatgttcataagatttgtttgttgtctctctagctgcaacaactgcctctggatggctgaccaatttcctctattacttgtgaaggatccttcagattggttatcagtattggagacaggagcgtgatgtccaggtgtctcttttccgtttacaacaccagccttatcatcaccagatgtccttgcttgtgatccgttcccatcaaacctaccttttacctgtttatcatctgcttgggtgttcttgaggcgatttgaagatcccatggcattgagatcatcgagtcctgattcttcctcatcattgtttttacatctacgaggaactactacttccacggattgccttctttctagtctttggaaaaactcaggattaaaatctttatcacttaagacaggtgctttcttcttcaacagtcctactgctttttcaggaaaacatccttttcctttagaagcagagtctggtgagagagtggaaccatcggatgcctcctttttcattagatcagctagattagaccttttctccccgttcttctctgatccaagctgctcactagctgaaagctttgaatcatctgaagcaccatcgacatattttccagaaatcttcttccataactgcagcgcctctgtcacactttccctaacaggtttgatctgtccaagaaaattccatcagtaaagtgtcttgagaagatcattccatgtcctaagtaatagaattttgatgaatgtgtagagagccataatccatttcataaaacatccagccatttcaatgctcagtagtgaaagaaaaattatagatgactgaaaattcttgagatatgtaaatcatatagtagtcaaaaatcaaaaggtaaggcttcgtgagaatttcaagctacttgcttgtgcgtttcatcagcatagcaaatgaggagaaaggtccaaaagcactatcaaccactaacagatatgtctgagctgctgatgacatttacaaggaattgaagagcttatggggtttacgtttacttcactacaggaccactttagattactagaaaaatgtagctaccttgtaaaaaatgacgtgtctcaaacacgataatagtggaattagattaattagagaaagaaaagatagctaccttgtcaaaccggcaggtctcaagcacggtaatggtggaatcggttttttccttaattaaaccgcttgaatgtgatgccaatgcagtcagggtctcagccgcagcttttcgtgttacccaatctgtacttccaaggcaatcatggatgctttctagcaatgactccaagctctgaggtgcaatggctcccacctgaatcaaagtaattgctctttacttctctttttcataaacagatttaaccactaaacctactagcattgaactaccagaagtaaagagagagagagatattaaacccctcaaaatttcactgagacttgtatgctcaaatcaaacaataaacttcagcaacacctaacagaaaaagtgtcggattaagactaaaacctcaagcagtgttatttactaaaactttgtgttctacttactgacactgatattcaaaattcaccatattcttccatttgctgtctatagcatgacaaggaggagattataaggattctgggcaaacctgagagagacttgaaacaactggcaaaagggaagccttagcaaggaaactggaattgctcaatagcttgcaaattctagggcaaagcttttggaaagaagtaactggaggactagcagctgattcaaccatcctagccatacacattgaagctccagattgtaccactttgttctgctctcccattgcctcaaacaatggcttaacgaacaaacccaccgctaacgacgctgaaccagtattagtcccctcttcttttcccttgagataaatcccagacaaagcaccaatcgtatctctacaagcatccctaactccagaatcagaatccttcaaccgtttaactatctgagcgatgattttagtgagatgcgcagccgtcgaatcgcaatggagactacaaacgtaggagagaagatggagacactccttcttcactgcaggtttcggatcggagcacgaatcgtagagacaattgagaaacatcggtagggtttcgggagtgagagattgaatagttttctcgagatcctcgacggcgatctggtatgtatctcgatcggcgagcttagagattgaggtaaggatcttttgcttcagctccaccattgcttggaacgaagtgagggaaccggaattggaacatgacctagttgctaaactcgacgaccgtgctggtctcgtcggtttcgccgccgaaccggaagttgtaggtgtgctcatttctaaatctccgacgagagattagattaatcggagaagaagatagacgagttggagaagaaagacgagatctgacactcgaaagtgtaacagttaagactggaatcagaaatgtgtcgctcaattttattagtatttcactttttcaattttttcaaattttaatattgcataattttcagtatctggattttgcatttgtcgcggaaaatcgggtgtgaaagacaaagtatgaaaatatagtttaaattcgtgatacttcgtttaaattaataatcaataatacgagttctagtgtaatatataaacatccatgcaaataagttcggacattatcaaatttagagacatcacgttctacattatggattgttaatttttatttcaaaatttaagttaaaaaaaataaaaataaagaatctaattattcaaaatgtcaaattggtttcttgtacaaaaacatggcttgatatatggattaaggaattttttacatggtactataagtcaataatgaatggttcaaggaattttacatggtacactaacgaatgctttaaggaattgtgattgctattagttgtttaggttgtcgttaagattgttacgttacgtacactttgttggagttagagtcgagcaatgcacattggagaggcttccgagtgagtccgcatgcatataccattcattttttagcttcaacgactcaaaggccttcgtctggtgtttaatgcacgtgtgtaaatcataaatggatcagaggctggtggttcatcggaccaacaaggtctgcctaaatgacaagttaagacggtaaaatcgataagagacaaaccttaccgatttgatatttattttttttggttcgaatatgtaatcgattagtgtcattttgactatttgcatgttggtcattaaaagatcaaccacattttattattttaagtacaaaataaaaaatacaagaaacttaataaagttttggaaaacgtttaaaaatcatgaaattaaactaaaactatatagttagttcatttgtattaatttaaccataagtacatgtctttgtaatccttttatttatcaactccaccaaaaacaaaacgagtagtagtacgtcgttcattagcactattagaagcctttgaatcatattagcaaaaactgctatacgtcattttgtccaaagaggacgtttaccaaaagaaaatagataacactaaaattaggcatgtgataaacactccaacccccaaaatgtacaccgccctattctcaccaacctcttctgactcttctctcattttctgttgttcacaaataagttaacgtggtaccgaactaccgatttcctccactattttattgaatttctggtcaaaaaacttaagtgttacataacgaatctataaaaagaaccctcactttcaaggtttttgtcagcaaaacatttgtcttcgtgtttgaaagctagataaaagattcactaaatggccaccgcaagcaccgctgctactttcagaccctcctccgtttcagcttcttccgaattaacccatctgagatcaccctccaaactccccaaatttacgcctctgccatcggctcgctcacggtcctcttcttcgttctccgtctcctgcaccatcgctaaggacccagctgttgtcatggcggactcggagaagattaaggccgctggatctgatccgactatgtggcaacgacctgattcattcggtcgtttcgggaagtttggcggcaagtacgtccccgaaactctaatgcacgccctctctgaactcgaaacggctttctattcgctcgccaccgacgaagatttccaggtatgcctgctgattttgtttccatcttgttcatagtttttgaatcgattcgaaatgatttggctttgtgagtttctgattcaagcgttgtcattgccatggctagtgataaagtttaaaaaacggatttttttgttccaattctaaaaaataatctgccaaacaatgttaagccgtatgggacaaatcgatttgtttgcgatgtaggatgtaattctgggaaagtgttgtatttttccagaaatctggaaacgacattcatttcatattcttagtttcttcagcattacatgcttctgtgtgatgtaagttagaagtctttttggttagttcgtttgttgggcaatgtctaactaatgtttgatgaatctgtagagagaattagcagagatcttgaaagactacgttggtcgggaaagtcctctttactttgcagagaggctcacggagcattaccgccgtgaaaacggtgaagggccgctcatatacctcaaaagggaagacttgaaccacaccggtgctcacaagatcaacaacgctgtggctcaggctcttctcgccaagcgtctaggaaagaaacgaattattgctgagacaggggctggtcaacatggtgtagccacagctactgtgtgtgcacgtttcggtttgcagtgcattatctacatgggtgctcaagacatggagagacaagctcttaatgtgttcagaatgcgtcttctcggtgctgaggtgatgtgaattctctgcgtaaaccttgcaaaatcgcaatgctttcaaattgttatctaagtctgatgcttgtaggtaaggggagtccactctggaacagccactttaaaggacgcaacttctgaagctataagggattgggtgaccaatgtggagactacacattacatattgggatccgttgcgggtcctcatccttatcctatgatggtcagagactttcacgcggtgattggtaaagaaacaaggaaacaagcgatggagaaatggggcgggaagcctgatgttctggttgcttgtgtcggtggtggttcaaatgctatgggactcttccatgaatttgtcgatgacacagaggttcgaatgattggtgtggaagccgctggatttggattggacagcggcaaacatgctgccacattgacaaaaggagatgtcggtgtactccacggagctatgagttacttgctgcaagatgatgatggccaaatcattgaaccacactccatcagtgccgggtaagagattcttctctgttcaaagttggttttaagccacatgtatctggtcacctgtatctaaagagtaaaagttgatgttatcagattggactaccctggagtcggacctgagcatagtttccttaaagacgtgggaagggctgaatactttagcgttactgatgaagaagcattagaaggtacttacttgacacttcatttttctccttttagatgtttctttcacaactcatgagaacttgcattgtgtattctaatctatgcgtgtagctttcaagagagtgtctcggttggagggaataatcccggcattggagacatcgcacgcattggcccatctggagaagctttgtccgacgttacctgatggagccagagtggtattaaacttcagtgggagaggcgacaaggatgttcagactgcaatcaagtatctcgaagtttaaagagtgtagattactttcattttcacacagtgctatttcttttatgtagtttgttagttctccttgcttatggtcgggaatccaaaagtttggatcaaagggttaagaagagaataagtgttatgaatgtatcatataaataaaaatgttctatggaacgtttgatgttcttataagcaattcgaactgttttgttcttgacttagctggttttccctttcatatcttaatttcaccaatgcttagaaaaaacaactctgatcgaatgatttataaacaactctgctctttaatggtgatcattgtaaattcaaacttgtgtattgtttgtactaatttgttctgatagaaactattttgggttaaatgggaaacgggtcaaagcatagggggctagtgttgtaatttagtagattggggaggagtttcaaatctgaacgctgaagataaatcacaagggaggtgcttcgtcctcgaagcttttagaacttagccaagcagctgttgtttcttagttgactccctctccgacgaaaatggtgtccacgagcaagatcaaatccgttgatttctataggtttatgtctgttactttgtgtatttttttcccagatttctccagcttctttctcctgttatatagatttcgaatttcatcgatctaggcatgtgacttggatttgtagtggtagtttactatgaattttacttggggagaatcaacattttgtggattttcttactcattagtgatagggtttagttgtggacaagcgatcctgaagttgtaggttttgcctctcgtgtatgtgcattgtcattgtcttttgatcttagtgatattgagctgtttagatgctattttctgggatttaagatgatcgttagtcacttcgatttcggtattgttgctaagagagttgcttcaaagttcaatggaatctgagatttgtgattgtggacgataatacagtacttcaaatttcatatatattctttggaaactctgtgcctacaggaaaatcccgagggatttgacagaggcgtctctgtctggtgctggattgtccattatagcagccctctctatgatatttctatttggaatggtaagtttcaccagctcactggacttgtcattatgtggatgattttgaccattctgtgccgattgttcaagtttcattttgtccttaatttatattaactgctccgtttgttactattaggaaaaatgaatgttgttttgactttgtaagtttcttattacaggagttgaataattatttggctgtcagcacttccacatcggtcattgttgacaggagcgctgacggagacttcttgcgcttagattttaatataaggtacattatactcaattttgtttctcaatacaaatgtcttatagttttaatatttttaacagaatgtcatatgtgtggcctacttaaagtcatgcaaagttcagcacctgtctgattgctaaccagatacagattctattttttgacagcttcccgtcactttcatgtgaattcgcatctgtggatgtcagtgatgtattaggaactgtaagtttggtttcatcataagttgaagtctctatctcttttctgttgctcttgaaaattctttgttttaaaagtatttaaaattttgtgaacaaagaaaaagtattttaatatctgctatgtacgttcaaaaagtttggactgacaatattttcttcaagggaaacccgaaaatgtcaaattgtgaaagagtctatcgtatgtgtggtttgaaaatagtgttattctttcagaacattggtccatttggtcactcaaaatttgcggttgttccttccctcctgattttgctaacttttgttttcagaacaggctaaatgtaacaaagacaattcggaagttttctattgattcgaatatgagacccactggttctgagtttcatgccggggaagttttatcactcattaatcatggagatgaaactggtgaagaaatagttgaagattcggtaccacttactggacgcaactttgacacatttacacatcagtaaggagtttaagtctgtattgtgcattttgtaagtatatgcaaatatactaggaatgtattcctagtacgaacttgtttgcttctggtgacaacatatgaagcatacattttgcagatttccaatcttggttgttaatttctatgctccgtggtgctattggtgtaatctcctggtaactccttatcttctctcttcatctcctacagtttctagatgtcactgcatattttccatccagaatcatattttgctgcctgttggcaagggttatatgactcatattagccttcttgcttgaggaaattctacatgtttggtgccttagactcgctaatattgcaatttacagtaacttagtcaatctttcctgtagtcgaaatattttcctcatggaaagactagacttatctaaggatcaacttgatattgaatatcaaacttatgaagtagactagtatctggtgatatcatatgcacattatagtgataattttgctgatctttacgagaagactctaactttggtctccattgtcagaaaccatcatgggagaaagcagctaaacagataaaagagaggtatgccattacactctctctagagaaagaatatgtgatactatttctccttataacttttttgtttgtgtagatatgatccagaaatggacggacgtgttattttggcaaaagttgactgcacccaagaaggtgatctctgtcggaggtatatcctatcacattttatctggtttcccatcctgactgcttaagctacgaaacctaactaatttccactacagtgcaaaaagtaatatccaagaagctataactccttttccaccgaatatgtcatttgaatttgtgcaaaaaatttcaaatgaaactgggtcttcaggaatgtgggataatatgccagtaatgtattggtgactatttcaggtgtctttaactcatttctctgttaactaaggtctaagatgcattttctactcgtaacaagagggagggattctcagttactttataagtttgtattggcttcgtctaaacgatttctattttatgtaaaatactacatgtaccttttcaaaagatagttatggtcaaaccaaagaagacataccatacataggttaacgactttctttaggatttcatttctatagcataatgcattctctggaaacttatgccagctttaaggtataatttatgctcataatttcctctgcaaataatatccaggaatcatatacaagggtatccatccattcgcattttccgcaaaggcagtgatcttaagtaagagaaagtttaattgttcatattatgcatgaccatcatttactcattctcctaaatttattttccccacttttctttcctctgcttaattttcttgataatagggatgacaatgcacaccacgaccatgaatcctactatggagatcgtgatacggaaagcttagtgaaggtagctgttggtctaagtttcttttcaactttttttccgtgccccttagaaaagttagactagagtcgctgtttgcatctcatttgtagcttgtttctgaaaatgttaccttctcctatagatggtggtgagtctggttgaaccaattcatctagagccccataatctagcattggaggacaaatcagacaattcatcgagaactctaaaaaaggcaccttctacaggaggatgtcgagttgaaggatacatgcgtgtgaagaaggtatgattgggaaaactactactgctttgtcttccttttagaccaccccttaaacactttaatagttaatactttatggtctttgcaggttccaggcaatttaatggtttcagctcgctcgggatctcattcctttgattcttctcagatgaatatgtcacatgttgttaaccatctatcctttgggcggaggattatgcctcagaaattttcggagtttaagcgcttgtcaccttatctcggcctaagccacgaccgtttagacggccggtccttcataaaccaacgagatctcggcccaaacgttaccgtaagtttgtataactcagaaatttttatttggatcacctgatatgctttatagcatgatttaaggtgttgttttccatggacagattgagcattatcttcaaatagtaaagactgaggtagtgaaaagcaatggacaggcattggttgaggcgtatgagtacacagcacatagcagcgttgctcatagttactatttaccagtggccaagtttcactttgagctctcaccgatgcaggtaggcttaaacattttttgtttgctgcctttctcacatgtgttacacagattagggatggtaagatgggttggaattacactctgctcatctttctctttgtttgtttgcaggttctcataacggaaaactccaagtccttctcacatttcatcaccaacgtatgcgccattattggtggtgtcttcacggttagtaaagaagtttgaagcctcttcttcttgtaactattcattaatgtattcccatatgactcgtatttttgcctcttttcaggtggccggaatcttggattctattctccatcactccatgacactcatgaaaaagatagaacttggtaaaaacttctgaagctccctaagggttttatttcgttttcctctgtaacgagtcagaaatttttgccctagttataccagacgtcacttaaataattcggttatatatattcacaaactgttatccttttgaacatatataagtattatcgatgtctctgaagtctttgggagttttagtagaacaaattgttatcacttaaatcaggggaatttacttccaaattctccaataccaaaatacagcttcttgtgagttggttcatactgatgatggagaaatgtaatttttagccaacaaggtttcaactttcaacgtttgaaactagatttgagcacaaatatagcaatcaactttcccccatggctgcttatagcaatcatcgacggaagtcacagcagaacggagagtcctctcgttccctttggacagagttgcatcctctactagaattttacttaggtagaagtaagtatccacagtaaagaatctccttcttgttacaattttcaattttgtgttctcttcaagctaattattagtttagttagcttagcatgattcaactttagccttggtatagaatcataacatagaaccatataaacgaaaataagactaagatcaaaagaacaaaaaactttgagttttgcaaacaaggtttcaaacttgaataatgtctgataattgagcacatactgatattgatagttccaaaaacactaatttccgaatccaaaatcaaaaaagaaagacaacagaattgtagataatatttgatcaggcagtgatctccttcttgagttttgcaagctcttgcctgacaacaccagctttctgcaaacagcaaaaaaacccattaacatttcagttctgacatgaatgaacactaccacagaatttcaaacatctaacaatttaacacactgaccttgatcttggccaacatgatcttgaacctatcaaagtcgttaaggttagccctacgtttctgcacgataagcttcctaccccatgagcttttctcccacttgttcttcacatctgcaagacttttccagttaagattgaaacacttcaaaattcaaatatttacattacgcagcactcaccagccttttccattgcctcgatcaaagccttcttctttggcacacggttgatgtcaatgacaatatcggtaagagacaacctcttgaagttcatctggatcctctccatatcaggggcatccaccaaagcctaaatgacgagaacataataagaactccataaaaacaactagacaatattcagctcaatattcaccaaggaaatgcaataggctccaatcaatgatgcaaactgagttataactgtaagccaattatgcaaccaaagtctcaagctaaatcaaaattttccttaatcaaacaatttaccgaaacatacacagtagcattacggaatcaagcattaaaacagctgaaactcatcaatacatacatgataaagagatggaaatcttcataacctaagaatgaaataaacttactctgttctggtcaacaacgtcgacgataacgacgagctttccatgatcttctccgtagttcacaagtgctactctcccgatctcaacgtacctcttgaaaccctaaacaaccaatcaccagaaaatattaaatctaacaactttggactctaacctatacacaaacgtaacttgattgagaacgtcaaaagcctaatccccaaaaaaaaagatctagaagaaagaaatccgaaatgtgctatgaacatgagctaaatacaggagataatcacgtagaacacagacgaactaaccaaggtattagctcaataagagagtatatctcaccattttcgccgccggtagattggaaggtctaagctccgagtgtaaatgtagacgagcgacagcagaggaaaaaatcgattaggttttgcactatatataatcttcattctagggttttgtggtttgggcctatctttactaaataaatatcacaaaggcccaacattaaacgcccaatatggtaaagagagaaaacggcgtcgttttatgttggatatttttgggggaaaaaaaaaaaaagacacagtgtctctttcatgtggaagaagataaattagagagaagtgatggagaaactccgttatttgtggaggcaacaactattgtgtaatgagaccagctcatcaatcatcatctccagaaaaaaggaatgatacaagaaacttagttgatagatagacgacaggaaaataatatacgcagaaagaaacctaaaaaaaaaagtttctgtctttagactccaatccactaagctccaagctgggtccccttaaattctcaatctttttctccctaaatttcctttaatttcttcattgatcattgctcattgatcgatcttctgagttttgaggggaccccgatccaaagtgtatctctttctgttttgctcagcatttggatttgatttcttttttttcccgggaaagtttgatagagatgtggggaggcgcaggtgagccagcagattcttactaccaagttcgtcctgagtgcaccgatgtccccaagaccagattcaaaatcaaggttacttctttcgatcccttcttcttcattttctccgatttttgcttattctagttttgcttcttcgttgggtcgtctctgttttatgattacgaatacgatatgtgattgctgattcggttccaattacatccagattctctggttatctatgttttcgaaaatgcattgtctctgttgtgaatttgttcctgacattgtaatgttcataaatctgattccttatgaggagatattgatcttaggagctgttcagggtctcatatatattcttgatcccactggatctttttctcagtagcatcacatgaatgattgttttagtgagattgtcactttttccagacataagcttgaaaggattttaacttcttgactccagggtctttaggaagatacataagataggaagataggttatgtgcttgactggtactaatttggaactagattgaataattttgaacctttacattacaggccataaaagcctatatcattccatgtcttgtggtcataatgtatcatgaataattgcatcatgttgaggccaggaagtttttgctatgttgctgacaacacgggtcatatttatgatgtttgtgcagcctggtaaaactctaagtgtaagaaaatggcaggctgtatttgtacaagaagggtctctccatattggcaagactctaagacgcatccgaagaggggtatgtttgtttggataagtctttgtaaagactgatttatcctttcatttgttctgtatctttgataacttatgttactttaatattcctttacaatcaatctatagggaatccatccatcaattagaggcgaagtatgggaattcctacttggttgttatgacccaatgagcacattcgaagaaagagagcaaattcgacaacgcagaaggtagaattttgtcctcatatcctatatatatgtatcgcatttggcataattacatgtttctttcagttcattcataaaccatcgattcagttttgtgaatcctaccgctaattctcttctttcagattgcagtatgcttcttggaaggaagagtgtaagcaaatgtttcctgtcattggaagtggaagatttactaccgcacctgtaattactgaaaatggtcaacccaactatgatcctcttgtacttcaggaaataaatttaggtaaaattttgcctttctattacggaaatttaatgttgaactcttacataaacttgtaataggcatttgaagttttcatgtggctttctcaggtacaaactcaaatggttcagttttttttaaagagctcacaagtcgtggacctcttgataaaaaaattatccaatggctgctaacacttcaccagataggttagcgactgatcatggcctcctttatcgccggctagactatactgaatatctggttcactcagttgcttaatgtatgtttttcaggtcttgatgtgaaccgtacagacagggccttggtattttatgagaaaaaggagaacttatcgaagctctgggatattctgtctgtttacgcctggatagacaacgatgtcgggtattgtcaaggtaaaaccgaatgtatatatcattgtatcatttgtttgaaaaccagttttacttgagaaattcttatctatatactggtgatctgatcaggaatgagtgatctttgttccccaatgattattcttcttgaagacgaagctgatgcattttggtgttttgaacggctcatgcgtcgattggtactcaccttacacatattctcaatgtatttgtgtttttggtatggactgtttacatctgtctctctgcaatcaggttgtattaaacatgttttattttttcgaattgaaaagcgaggaaatttccgtagtaccgggagatctgttggagttgaagctcaacttactcatttgtcttcaattactcaggttgttgaccccaaacttcaccaacatctaggtactacagtactactactactgcaatttctttgcatatatgtatatattcagcggttaatcgagtgctgggtcataaatgcagataaacttgggggaggtgactatctctttgccatccggatgctaatggttcaattccgaagagaattctcattttgcgactctctgtacctttgggaggtaatgatactgattttttgtctcactctctcttatatgtatttgatctcatgccaaacactattcctgcagatgatgtgggccctcgagtatgaccccgatcttttttatgtatatgaggcgcatcaatgcgggaatgagaaaacagaagggttaaaaggtaaaccgaagtcaattaagcaatgtggaaagtatgagaggcaaaacatgaggaatggaggaaaaagtgcagaaggtcctttacctatatcggtatttctagtggccagtgtcttgaaagacaagagttataagctaatgactgaagctcgtggactcgacgatgttgttaagatacttaacgatacgactgggaacttggatgccaaaaaaacatgttctggagccataaaaattcacaagagatatctaagaaaggttatttctatgtttctttgatctgcctgggcttctgtctctctcaaagttttgtctgaaagttctctcttctgtggtcttctctcttattgcaggctaagaaatagcattggtaaacattcatgattctgccgccgaatcatgagaagctttcttttgtaattcgctaaatctggggaggaaccgaatcttcctatcgttttttctaacgatttttttgggtggaagctgggagaaccttggagccttgaataacccttaacacacatacacacacacaagaaaaatatacttagtaagctgttcataaaagtttatgttgtatcccttcatatataaacaaacatggtttttgttactaacgggaaaataaaaaggaaagagattgttcttaagtttacaaatgatcattttatgttctaaaagaagaaatattttgaaacttggggtaagaagtgtttcagataaatatctggatcgtgttgatttgaccagaaacagaggaaatcggtttatgaagtaaagaggtcaagaggccaagagtgtaataataactaatgagtgagaatcaatctgctttagttcctttccgattatggatacaagtttcttggatcaaccaaaactgtgaatagagagatacatatacaaaacgttctcttcaagtttcttgagcatgacatggctaaacagaaatcaatttacataattaactaaagcatctacacaccagttagtaagcgatcagtgatcgcatgaaatgttgtgatcgcgagaagaatcgaaggcaagaatcggataccggataatctcatcccggaactctttttagggaaatacttaggaagctcacattcttctccattgaagaaaactctcttaggaaatccatctcctcctatgatattcaaactccccaaattcttcttcttaaacgagataaccgactgcattttcccgggaatctgcgggtctctcgcaggattcgttccgtttgtgataccaatcaagtagttcataccaggaagtccttggaagaaaatggtctggttcttaggtggaactcttgatccattaaaggagtaaatattctcatatcctaaaccagctttgcctaaatccaaagccccaaaccaatcctccactgcattatttccccagttaaacaaagttactcttgcggaccacccattaccgtaatccgagttaagatgccagtttaagctgattccgcagttgtcaggacaaggaagtttctttggataagccatgtgcttctgctttgcccatacctttgccttgagcgttcggttatcaaacggtaccaagagtgtgtcagtagggaggagaagctgtcgggcattggcgttgcaagtgtcggtatcgatatctttgcagccgcaagcgcaggtgttacaaggaatggccgagtcgttgtaaaaggctgagaaggagacgcagcaacgtgcagcttgtggtttaggcttggttatattgcagatgacttgccagctggcgatagcgtaggttgtggcttggagaccgctagggtcagggaacggggtcgcgtccacccgaataggtggtccgcatttgtacgtcggattcactataccatcaatcttccagtttcgaggaggaaagaatgctgttctgttctgatcaggtggtaccttgtaaacctaaaccaaacatcaaaaccggtttagttgtctttagacctaaatttagtcaccaaacactataaatggtaagttttgggggaaaacctgtaactggaaaatggctttggatttagaaggatccatgtgagtgggcaaaagagtgccattcttgcagcagaaaggcaatttaccggtgacattatcgtctttacgctcagctggtaaatctttgattattggtttcttctggcaattagcaacctgagagaaatcaagatccccgtagaactgtcccgccttgctgcttaagcattccaacgtgttcttctcggccgcgtaggctccacgcatcgagtggatgaactctcctcgcatccactcccatgtcaagttccaatggtctaaccgtcccagcgggctagtgttatctatagtcacctgtccaaaacaaatcaattttggattacgttatgtatatatgactctctcgaggttatattgatacaattgatggatccggcgactaacctgcgccatgtagctgcttgcataggcttgaagaacgtcgtagattatgttcaggtcaccgtgttgtctaggcatgaacttggttttcaccttttctttagctttaaactttgggttcctcttgcagcaaacttgcattgtaccgcctaccgatgaaaatataccgaaccaatcgaaaactggtcactacagattgtttcttctcgaacaagaaactaaggtttttttcatgaaataggtttcgttacctttagaagtagcagcagggcattgccatccatcgtttgtgagcttgatcgatttcggcatcggcgtagctgtacctttcccgccaaaaaccgttccggttatctcgatattggtcgagatctgagtgtaatcgccagctgtcaggatcgaggtctttaggtccgtattctgagacccgataaacgtagtaccgttggttgcatcgaccgggaagtcaccgtcagatgagacagctccagtcgcggaaacgatgatctctctgtgatgaaaccctacgaacatttgccaacctttgacctcttcgataccagtgttcacgatcatggccgttgatttaaaagaccaagcttgagcagtcgcgtttgtggtgcgaggatacaacttttctcggccaccggaactgtaagacatgtaaactccgttgcaacgggccagacctggcggtggagtatcatccttctttggttcatcgtagtcttgagccaatgataatgtcggaaactgaagattgattagaggtaatagaaggagaaggaggtttaaatggacgtaacggagcttcttcatctctatcgtgtttcccaagtttcttaggaacgcaagaaagagaaaacagagaaaagagagatggtaataaaacttaagcgaattagagaggcagagcataacggtttctcttcctctagttttcccctgtttctccggagaaacagagatattatacaaaagagaatatactaataacgttaatcagtaaatgtataagtaccaatttctgtatgtttgtcacattttttctatattctatagaaaatctggattagactgatccaaaccgcatattcctctaagttagttcattagaatttttttattaaactttttacaaaagttatagaaccctaattaagatttactaaagcaaccatgatatcatattcttacacaagactttgtgtgaacaccttgtgagcaccataaatggcaaacattgtttaacttgaggaataaagatttactaaagcaaccatgatatccatttcttttgtgtgtttattttattttctaatggtaagacaaacaacaattttaaacatatggtatttcatgtactgtatatggatgcaagcctaaggatctcaaactagtaaaataagaacaagaaggtatatgacccaaacaccatcatgttgcagtgagcacctaaggcttttaactcttgtttttgacaaacgattttacccgagaaacacaactaagaaactgagatctcttccatgccgctaatttcttcagtcagctgatgctgtactttgggctccaagtcgatgaactggtttgacttgcttgctagatgtgagatactaactcttccttgacgtttgatgtaatctgcaaccgcattcatctcttccattgatatgtaaatgtatttccctctatcatccatgacccccgagagccgccctgaacaaaagagaatgggttcagttcttaagcgtcccatcattgtttcacatcagtgtctcacctgcttattcctattgcttcgggtttactatacccatcgcaaattacagactgccagatgagacaaatgctctttttataattggatagagagaaaaataccaatgctctccaaagaggcgatcctgttgatgcattcctaagaggacaaacagttgaatcagactagaaagccatgacaaaaggtattctttagttttccacataaatatgtagccagatgatacctgagtacgtagatgaaattctgcagcgagatcttcaagtggaacacatttctgtttctgcaatcacatcacacagcaaaaggaaggctcaacatgtgggtacattgatatgggctgaaacaacatttacatctatacttcattgtgagcgtgtttctattggcaacatttgtatctccactttacttttcgtttgtttatattcacagaataacgattagaatcgaagatcaaaaagtgtttggtatagggttattcaagatagatatacctttatgtattcaacaaattctgaaagcaaatcttgattcccaccttgcacttcctctgtagtaccttcagcatcaactgaaaattcccctttccatttgtcaaactctaacgcagctgcctcttcttctttggcttgtcgcgctttttcttcttcttcctacgtaacaatgtcacaattagccaagcccagtatttcaaaagcaggaagactataacaaaacgaaatctgagatgattgacctaccaacttcagctcttctgcctcgcgttcttcatccttcttcctccgcatttctgcataccaatcttgttttgtattccttgactcgcgtgtagcttcctcagcctataccaaaaaaaaagaacagaacttaatcaggaaagtcgtcccaaaagagatgtaatattctgccaatgctctatccttaagtcggaatctaaaactatcacaatgtaacttaccaactgatattcctagaatttctcatccttaatcctgccaaaaattctagtagaataaatagaaaaatctcacttgtctttgtgcttcccgctcttgtcgcttcttctctttcttctttgatgctctggcttgagttccaccagcttcatcttcatcttcatcttcactcccactgccgttttctgtttcacacatacccaataattttgttccaaggccaattgttcatttagttccaagacttttctaaacttaaactacattcacagcaagatagattacaaatgaaactaaaaagttatcgagtattcttgaataaatgatggtttcgagtgttcgctagctatagtaaactctaaccaataacacaactatctacataaggttgcttcaaattacaaagatagcagaaactcaatcctcaaaactcaaagagaaacaaaagctgtcaaatacaaaccttgaacattggatgtagaggagctagcaccagaagctgcaggtctcctacgcatcctccgtccaccaccagcacgtgccacgttttcacgaggttgaacctttgcatttcacatgaacaaccaatcaaatcccagaaggaaaaaaaaaacgagacattaccaaaattcaaatccattttcgcaaacaatgataaattacctgtggtggttcagcaacttcctcccgtgatctagcatctctccgacgtttccaaaagaacaaaggaatcaccgcaactatgagaatcattgagactatcagagcaaatatctcctccatcgtttacctgtgatccaaaataaccgaagaggggattttgggaaatcgaactagaatattgaaattgaaagaatatcggtttcagattagtctaaactcttaacctaatttcgttttccaaatcgtcgtcttgcccgaggatttgcagagctccactttggactcgatagagaagacaagcggttatttcgtaatttcccagcgactttgaaacactctggacgcctaagagtcttccaggcctctggtcaactttattgactttcgatttcgactactgtgtttttaactgatggttttttgtcttaattggcacataacaagaataatagtttaagtgttgtgatccaccctggtaacaagatatactgagagtagagtcaaacgttaatggagaatgcttaacaatctcgtattacagaagtaacatgtgaaagaaaacgatgatggtctcttagtatcattccaacgctaaaacagaaacaagtaacaagtaatcgaagggaaaggtgaagatatgttttgtaactgcacgatagagtaatgatccacttaaacggcctacgggaaatgcaacagaagctgctcagaaaccatggatcttgatgttatctttcttcacaagcccagcctgttcattgagacgtatgagaaacatgatcgagtaacaatctttttgttagcctgtttgtgaaagagtgtgatttttacctggactaggaacgtggagacgttcttcctctgatcgccttgaagctgaataacctagagatagacagcacattgtatatcaatccctttgtttcactactcgaatggtaatatgccaagactatgaattcaataatttatccacatggacgcaaccatggtgttttaaagcacgtacctgtccgagttctgagtcttgaaccacagttccgttgcagcaaaattctttcttgaggtccttaagtatcttggtgtagctgtactctttcttcagcccctggaccgttgtcaagcttttcctaccattccgctgctggacacgaatatgaacgtactcctttgttcctgcacctgagtcctcagcattcgcatcagcaaacgggtctgcaagcaacaaaaagaaactgattagctcctatcagttcagcaaaccacaagctgaagaatccaagacttgagaaacaaatttacaaaagcccatgttccaatcaaaactgttaccaaacatctgaaatagatctaaatgagcgttggtataattgaaacttaccgaaggcagtagggacctgggaatcaagttcagacatgaaactttgttgatctgaggggcaaacgatagagaagctgagacctgaacatgaaggccatcggaggataagaatttggcacactcataaacaaataataaacaagtgctacaccacaatcgagaaaagcaaaataagtattaataaggtcttagaaaacagttaaagaacacagggaacgcataatacacatagcaagataaaacacacaatccaaatacaagccatgttcatctagagattagtgatatataaaccagatggggaaactaaaacctcagctaagaaaccaactccagaattatcatttgcaacataagattcgaaatgagcaagatgccatcttcataaataaattgtatgttctgtatcctagtcccaggaacctagttaagcaggtccagctcaattacaggatatgatctaaacaaattacatcaatccacagcagatcaaaggaagatccaattttctaaagtcagcagcaaattcgacagatcctaaacaaaagctagcgtacaatcttcagggacatacgaaagacgatataccaatctgacgaacgaaaacaaatcaacaaactccaaaattatatggatcgggcaatgaaaacaaacttcacctcgaaattaccgaaatcaaagaaatagcaaaacgcaatttgtgaaatctgcttaagaagatgacaaacgcaatcagaagaagataagattttacctgatccgaaaagtagagtttcgtggatctgataattggagaagagagaacgagctgaaaccctaaattcggataaagtctgcaacttctgttgtttcggtggcgagaacaaaaataatgagaggaagaggaaaatatcgtcgtttttgtctcacagtctctttagcagcttttctttagatatttattttattttttccatggatagagagagctaggcattccggttatttggagattttggaatttcaattttgcggtttggtattttattttattttatcaatttgaacgaaacagagctttgttttggttacgatgcggtggattttggttcggtttagagtgatatatatttggtaccaaattaaaccaagattcgttttcggtaaaaacaaaatttgatttttaagcatttttggaaaaattagtgttatatatatgagatttcttaatcaaaatctcacttttatccgatttagtggtagttcataaagtggtttcatgtatatgatacctgaataaccaacatatgtattttaagagacacttggaataataattctaaatatcctaactactcgtgtccgtatgttttgtcacggtgaaacgtgagaggactagtttttgtcacccgtccataacattcttagacatacattactttgggagtgaaaaacattaagcttatctttatccatatattgtcttaccatcaatagacaatatccaatggaccggtgacctgcgtgtataagtaatttttcaagatgctaaaacttttatgtatttcagaattaacctccaaaaacatttattgacacactactactctttccgtattgactctcaactagtcatttcaaaataattgacatgtcagaacatgagttacacatggttgcatattgcaagtagacgcggaaacttgtcacttcctttacatttgagtttccaacacctaatcacgacaacaatcatatagctctcgcatacaaacaaacatatgcatgtattcttacacgtgaactccatgcaagtctcttttctcacctataaataccaaccacaccttcaccacattcttcactcgaaccaaaacatacacacatagcaaaaaatggcaaacaagttgttcctcgtctgcgcagctctcgctctctgcttcctcctcaccaacgcttccatctaccgcaccgtcgttgagttcgaagaagatgacgccactaaccccataggcccaaaaatgaggaaatgccgcaaggagtttcagaaagaacaacacctaagagcttgccagcaattgatgctccagcaagcaaggcaaggccgtagcgatgagtttgatttcgaagacgacatggagaacccacagggacaacagcaggaacaacagctattccagcagtgctgcaacgagcttcgccaggaagagccagattgtgtttgccccaccttgaaacaagctgccaaggccgttagactccagggacagcaccaaccaatgcaagtcaggaaaatttaccagacagccaagcacttgcccaacgtttgcgacatcccgcaagttgatgtttgtcccttcaacatcccttcattcccttctttctactaaatctcaaacaaaccctcaaagcgtatgagagtgtggttgttgatatatacatgttgacacttgacacataccacacctcatcgtgtgttttatgataaatgtaagcttttggatgtttgagggtaatgtaagcactacttaataaataagagttttgtttatattttttttgtttgttacattgctgctctctaaaaagtcatgacgcttacataaaaataactttactccagtgaactggaaaaattatagagtaccgctccacctccacggaaagatcatagactagtactacccagagatataaatcgtaattaagacttcaaatgcgtagagacaaatggaattatgacttggcaatttgatctttcttgatatttttaacaaatggtttacgtatgtctttatcaaacaaaaaaaagtaataaatgtgtttaattattgagttgtggctaatagcacaattttaaaaaactgatgtccaattttttcttttaaaaaaagctataacgaagcatgtaaaaatgaacacttaaaaaataaaagtttcatttacgaatcatgtacaattgtggatttgagattaagaatccatctgagaatagtataccatttgtgatttgtttatgaatggtatgacaccataaacgactatactacagtttgagattcactgatcactcatagatttttgaataattcatttgaaaatgatttgagattttttttttaagtgaaattttagttattttgaattgtttttttttcttgtaaaaggggtataatccatattgaaattcgaccgatactcagtcgatagcctcttcaccgaatttgctaatggaccttagccaagccggagttaaaaaaatttaccggataaaaattgaaccaaagagagaacaaactgagacaatgcccgaaatatattactagacattcgcaccgcatgttacaaattaaacggacatcgaaaactactacatacatactcaaccttttttataaacttttatagccattttttgccaatttatctataacgtaatactatgcattccctcatttacatattttttaacattgttcaaagggttgtgtgccccgtgttaatatagagtcattttctaacatctacaattcagattaagctcccaaacatatgttccaattgcaatataccaccaaattaaaagattgactctcacataccccattaattgaaaccaaatgaacaaaaacgttcataagatattaagatgtcacgtcagaacatgatctacaaatgacacataacatgcagacgcggagacgcggagggccggtgttgttcgtcacttgtcactctcttccaacacctaatccagacaacaacctaagatcttcactctcgcacacacacgacacatgcattcttacacgtgatcgccatgcaatctcctttctcacctataaaactaactcttcacttcactctttactcaaaccaaaactcatcatcacaaacgagtaagaatacaaacacaaatagcaaaaaaatggcaaacaagctcttcctcgtctgcgcaactttcgccctctgcttcctcctcaccaacgcttccatctaccgcactgttgtcgagttcgacgaagatgacgccagcaaccccatgggcccaagacagaaatgtcagaaggagtttcagcaatcacagcacctaagagcttgccagaaattgatgcgcatgcaaatgaggcaaggccgtggtggtggtccctccctcgacgatgagttcgatttggaagacgacatcgagaacccacaaggcccccagcagggacaccagatcctccagcagtgctgcagcgagcttcgccaggaagagccagtttgtgtttgccccaccttgagacaagctgccagggccgttagcctccagggacaacacggaccattccaatccaggaaaatttacaagacagctaagtacttgcctaacatttgcaagatccagcaagttggtgaatgccccttccagaccaccatccctttcttccctccttactaatagattccaaacaaaaaccctcgagcgtatgagagtgtggttgttgatacatgttaacaccacacctcatcgtgtcttttatgaaaatgtaagttttggatgtttgaggctaaatgtatttagcacaagtccttaataaataagagttttgtttatgtttcattttcattggcatatgctctctctaggttgtccgtaatattagtttacaagaaaatctcccaaataaatttacaggttaagcaaattagcaattaaaaactgctctatgactgtcctcctctaacaaatcaattatatttttctcacaaccgaagacatggtgaagataaatttgcgagtctaacagacggtgtgttttcattcaagatgatagatttgcaactagttctatatcatctgatcaactatcaagtattaaacatttatccatatgatataatcaaggaacacaacaccatggataaaacacaaaaccaaagcacagatccaattagtgacccaacacgaagaaaatttattcgctatgagaatgaagcattatgcatgtgtgaatttacgccatagtctagttaccaccgccccaccgcatgcgtgttaatatctattttttgggctcaagaaattgcacggcatcaagtggaagagacatgccaaattttaattttaaattagatgatccattggaagcgaagttcaaaaacgaaattttacattacatgatcggtttgatcgatagtcgcttacaattgtggtaaaaaagtgctagccattttggccaagagtgtaaaacgtaccgatcaaatgtctttataaaaaaaacgtgttgatgttgttctgtgaatacaattagttctggttaacagctggtcgaccattttctgatgagaatttatgtaaggccattgctctggtgttgagaaggtttagtttggttcaagctaaccgtggttagaaagttagaatataatgtgtttcttgatcagtgatatcgatcggatttgtattattcatattgtttactctttgagtaattcatagtggtaactctttttttttttttttttttttcatattggtaactctttgaaatgaaaaacatagctaagaattgctagctttgatttagtcgagacgtacgaactctcgattttggtttttgatttgttggtgtaaaactctcgatattcataactcgtaagattttgtacgtatcatcttcttattctcttcatcgctctgttttcaattttatgtcaaaacatggttttggtaatttcttttactcctacttcacggtttgagttataatttttttggtaaacccttaaccacgagttttgatgtattttgacacctctaattatgtgtgtatacgtacacatataattcggtattttcttaacatatatatccctcataaaaatttcttacatgcattgttcgtgagtgacccgttaatatatatattgatagatactcttataaaattatattctaaatttcagattaagctggcacaactatatttccaacatcactagctaccatcaaaagattgacttctcatcttactcgattgaaaccaaattaacatagggtttttatttaaataaaagtttaaccttctttttaaaaaattgttcatagtgtcatgtcagaacaagagctacaaatcacacatagcatgcataagcggagctatgatgagtggtattgttttgttcgtcacttgtcactcttttccaacacataatcccgacaacaacgtaagagcatctctctctctccacacacactcatgcatgcatgcattcttacacgtgattgccatgcaaatctcctttctcacctataaatacaaaccaacccttcactacactcttcactcaaaccaaaacaagaaaacatacacaaatagcaaaacatggctaacaagctcttcctcgtctgcgcaactctcgccctctgcttcctcctcaccaacgcttccatctaccgcaccgttgtcgaattcgaagaagatgacgccagcaaccccgtaggtccaagacagagatgccagaaggagtttcagcaatcacaacacctaagagcttgccagagatggatgagcaagcaaatgaggcaaggacgtggtggtggtccttccctcgacgatgagttcgatttcgagggcccccagcagggataccagctactccagcagtgctgcaacgagcttcgccaggaagagccagtttgcgtttgccccaccttgaaacaagctgccagggcagttagcctccagggacagcacggaccattccaatccaggaaaatttaccagtcagctaagtacttgcctaacatttgcaagatccagcaagttggtgaatgtcccttccagaccaccatccctttcttccctccttactactagagtccaagcccggcctagcacgatgatcatgagtgttgctattgatgtatgttaatactatacacagtcatcgtgtgtgttttataaaactgtaagcttaggatgtttgaggctaatgtaattagcactacaccgtaataaatgagaggtttactttatgttttaataatgttcttacccttgctgctctctaaactgtaatggcgtacggttagctaaactaaagtaaaaatcgattcgcttgagtaaaattagtgaccgggaaagatcatcgactactactgctcagagatgtaatcggtaattaagacttcaagctcaataattaattaggagtaaatctggcttcgaatttttaaattgtcaacttccaaagaaggattggcaagactcaatctcaattgcccaacaaacatatggctctttacaaatttggaatctctttttgatggcaagaacgtcgtaattcctctgtcgatctcatgtaattaccaaactcatctacttattactttctttatatgcacttactgatgctgccttcctatgaaaccactaactggtgtctcctatttacgaaaacgcctctatgattagtagaatattcaaaccgaaccaaaaaagtcaggctgatccggacacatatgatcaaaataacttttggttatatagaattttattttcttttactatatcagattaaaaccaaaaccaaattaaaccagacaatacttcaggagaagtcataagaaatatatatttttgttcaaagggttttgaagtaaaaaaaaaaaaaaaattatgaagaaacaatattgaatattgattgacatatggcgggagtgatttggaaaagtttttcttgttcatccaaaataaagattgtagtatcaccttgaagtaattataatgatgactatgtatatcacatttagactatgtatactaatttatgctaataaaagattaccacaaattagagttatttgggaaattttgttcttttttggctttaatttcatgtattatatgatagacaacattaatataatttcatgttgttcacgacttgtcactcctccaatttgagtttcgaacacctaatcgcgacaacaaccttatagcttctctctctcgcacaacacacaatcacatgcatgcaatgtcttaaaaaaaaaaaattgtgcatgcattctaacacgtgatctccatgcaaaactcctttcttgtccataaatacccataaccccttcactacactcttcactcaaacaaaaaacatacacaagtaattaactaacaacaaatggcgaacaagctcttcctcgtctgcgcagctctcgccctgtgtttcatcctcaccaacgcttccgtctatcgcaccgttgtcgagttcgacgaagatgacgccagtaaccccataggcccaatacagaaatgtcagaaggagtttcagcaagaccagcacctaagagcttgccagagatggatgcgcaagcaaatgtggcaaggacgtggtggtggtccttccctcgacgatgagttcgatatggaagacgacatcgagaacccgcagagacgacagctactccagaagtgctgcagcgagcttcgccaagaagagccagtttgcgtttgccccaccttgagacaagctgccaaggccgttagattccagggacagcaacaccaaccagagcaagtcaggaaaatttaccaggcagctaagtacttgcctaacatttgcaaaatccagcaagttggtgtttgccccttccagatcccttcaatcccttcttactactaaattccagagaagtgtgagcgtgtggttgttgatatatgttaacaccacatctcgccttgtgtttttataaaaaaataagctttgggatgtttgaggctaatgtaataattagcactacaacgtaataaataagagaggtttgtttatgttttgtattcatttattttgctgtactagtgttcctaaaaagtgataacggctagattaaaaaagaaaatcgattcgaaatgtaggataaaataaaaaaaaattagtcaatttaaaaattgatgactttttgattttttctttcttaaatgcgcaaaaaaaaaaaacttaaacaaacaaaaaatcaggaaatatgatccatgtgtaatcaagacttcaagctcgatattaaaatttaaaactcatccaattgccaaacgaatatatcttttgatggctacgggctaccacctacctgtcgatctcatgtaactactagattccggcaaccacttacttatatatttttttccttatgcaactactcactgaattttcccttcttgttagacctaaattcattatggttagtagaattaattattcattcagaacaaaatgagtgataatacatgcttaaaattcagtgttagatttattgttgtcttcatatattctttctgtttgtgatgatatttgttgatgcatgttattgtgctaatagctgcaatgctcaaatagccgtgataaagattaatgaaatgatgcggttaatggtctcagaacattatgattttccagcacacaaatcttctgatccaagacaagagtagaagataacagaaccttgaaactattacaagctatatacagatttagtaccaacatcaagtagtgcccacattcgggtataaacataactttatttctttggcttcagtggagaaaattctcatccaaggctcaagcgataatctaacggcctggcgttaacatgacggtgtgcagttccaatctcacaagcattcactcttgctgcaaacctgagggagcacagagactcaccggttgaggaaggttctggtgtgatgttcacaaacattagcgtcttcgagtcaccacctaaacagggctgatcatagaattccacaaagttttatcacaacacagaatcttttaggttctgtttaaacgatgattttaaatgcttacctgaagaagataagtgagctttgagtttctgaaaggaacgtgatcttctttcttcgctaaggcaaatatgacatcgcctagagacgataagcttttgttgattgcctttcagtaagaagaagaaaatcattaagccaatattaaatctcttgtgtctctaaaaatgtgtttactaagattcgcagacattacttgagtttctttcagtctatcgccagttgatccgctctttgacaaacgctcactacccgcaagatcaatcaggttcaagacaccttgtacttgttgctctgtgctctgtaaataaaagataaaccccagtgttggtttagcagaaacaaacagcggactatcaaatgttgttgttgcagtaagaaacccgattagtacctcgttgaatccagagatcttcaatgtgaaaacgaaatggcttctagaagattgctcgttcattgcggtcttccctactgacctgaaaaaaagtaagacagttaattcattagcagcttccagtttctttaaaagaggaatcattgcgaatcttcaaaacagatacttgcctgtttcgagctgcgtggtctaagaggaacgaaacctgtttcgagcttcgaacatctacaacagtaagttccacaacatgtgtattcccactagcatcatgtttgattgcatatttctgcggagaaacgccattgtctgctctcacagcttccttgtttgttgacaagagatccctaatcgtttcgttgtatatttctaacatagacacctacaacatatagaccagccaataaatactatatgaatgcatcatctatttgtaagtctttataaggtttgttacctgcaactcatacttccaaccctgtgatcgaagagactgccttgtttgaaatatttgctccaaacatcgaggaatcagtcctttttcatccgggtttcctggcctacccatcattgtataagtttttccagatcctgtttgtccatatgcgaaaatgcaaacctgaaaattgtgtaatagaacctttagtccaagaaggtacagtgaaacataacattattcatcattcatgtgcttttattgaccagttagacagttttaccaaaatacactctgaaaatttgaggaatcgaataatgaagacataagtaaacagggagttaaactaagctaaagcagatagtaccttgtaaccatcaagagcgctctggacaagttgagaaatctctacaaaaacatcttcttgtgatgcacttggcacaaaaaccttatcaaatgtgaaacaatgcgattgtcctggcaagagcaaagaacaataagtctctttcttttttcgcaaagaacgatactttttctgaagatttgttcataccattttgcaacaagtcaatgccccgaccaagtgcttctagagatgtagggtaggatatagttttggcctcctcactagaattctctcctgataatagaggtctcaccctacagaatacacggatgtttcccttcagttcctgcaacatttcaatgcttcagtatcggccaagcagctcgctcaaaatttcacaagggaaatggacaccaaatgacaaatcttaacctgtatggtattgtgcaacttcttccgtagtttttctccttcgatgagtttaagttccgcttcttctaagcgacctttcagctccataatgctttccttttgctcttcaaactcgttcattttctcaaaagtagataaatcagccacctaatcataataaataagcgacaagaatttagagattttcatatacattttcgtttctatatgtaaaactcaagaatgtgatgagacctgcagttttctctcagaagctactaattgatcctgcaactcttctatctccttattttgaacagaacacttactctggacaaaacgataacactatcttaagaaacaaaaaatctctatggagatttttaagaagaaaacacaggagtgcatcaagaatgaaaataaacctcaagctcatttatggtgtctttgaagtcattttgcttggttgcttctgcttgcagagtttcaatttccgttatatggcggtcacggtcatctttgacctgttgaatctcaaccttgagacttacaatttcattcaccaattcatctttttgcttcatgacatcatcttgtgacacctaatgaaaacaagacacaggtcataccctgatctaaacaaaagtttactctcattgattaagaacgcagaatcaaatcaccttcgaggcagcaagctgatcctgtagtgctttaaactgaccctttaagttgccaatgctttctacaatgccagtccgttctttctctcctcgctttatattttcatgagcttcgtcgagatcaccttgaagtttgctattgtacaactgtaagctcgagttatactcttgcaagagtttgtacatgtcattgacagcttgaatctgaaacaaacaaaaaaacaggatgtcagtcaaagctaaacatttcctttacggatctttctgactttctcaccctctggttagctgtttgaagctctccttgcgtctttgctagctcttctgtaatggcagcttgcaaactttcaacagcaattcttgcttctctctcttttccaagagattcatttgcagccttacacaaaagaataccaagtttagaaaaccgcagaaaatgaaacatacttataactgaaactagcagttctcttaccaatttctctgtttgttctttggcaagttgcacctgaacagatgcaaagttcttcctcagttcatcaattaccatatttagctcctcttcctttactttcaaattaacctctgcaaacaaatgcatgcacaatataagttcttacaaaatcccaaatgttcataagaagaagcaacttttaaaaactcaaatttgtaacaaactcacccaaatcggcgcaatgcttctcattcatctccatagcgttcttcaacttctcttgctcaaatgcataatctaactcgagttcttgaaaccatctaatgcaaagcctaagcctttttacatagtccatcgtattctcacatctctcctgcaaagataacccatttgatagacttgcttatgtaaattgcatgaagtgagagatctcgaattcagacaccaaaccaaacattaagaagataagaaaaaaaggaaagagagaccttgtaattgtacttgctcttgtacttgattcgctcatgaagaagagtttcaacatcttctctggtaaactcaacagggccaccatattcagatccttcattactggtcagatctttcaccggaaaagatggccggattcttccattgttcgtcatttccccaaccatctattacttttttctcctctctcaaaagagttagctgaaattcttctcgtacctaatttacacacactctggatttgtctctttcaccccaattataagcataaaaacctgcaaaaaaaatgatttttattttcttcttctcatcaaagatctttattttattaatgattcaatggtggcttatataaagattaaatcgaaaaggattgaaacccgtgaatcattgggtttttttttctttcaattttcaaagacagtaaagttgttacaaagagaaaaaaaattaagcaatgatttgagctaaacaacaaaaacactatcagtgaggaaacaaaacataaaagactcaaactttgggtgtggcaatttcatagagaaatcagtgagaaaagaagaaaacacctcagtattattatctggttgtttagctttgaaatggcgatatgtctctccgttgggctctcccgtcgctcgctacttctatttctgttgttttggttttgttcaagagagtgagagagatgagtgtagggccgttgattagatctcaaattcgccgagctagtgcgatcccatccgttgctttttttatttcctttttttcagcaaataaattgaatttgtttgttgtacatttgtcaaatacagttttactttgtttatatgtttgaaagcaatacaaatataaatttcatttacgttactgaaacgtacaaaagtgaaaccatttcttcgaataactcggatgaagtcaaacgatccccttacttttttgtatttatgttttttttctgattctcatgtattatagcatttatttaagtttgaaaattttgctaattttaaattttaaaaatctatatctaaagaaaacaatagtaagagttccatatatcttgaaattcagatgcgactaaataaatcttgaatttcagatgtgaatattactgaacttaactaactcatacacaacttgtgtaggcgacaactacattactatatatcgatcggttttggatgaagtattttaacgatttttatatcattaaattatatggaaataaactatagctagtagattttattctacgtagtagttgaaaagttatctttttttgtcaaaagttgaaaagttatgttgtctagtacctacaacaagaagttgtactttgttattcatgagcatatggagtaatgtataaaaaattctcctcatagcttacatacacgctggtaatttcaaagatcaaatcataaatgtgaactatttttataagctaataaagacttcacgagtaggccagaaaaaaaaataaaaataggtaaagcatgtgtcggtaaaaacagtaaacgtcggcaacttggcattttcagacgatagattcttttcaaaaagtggatttttttactttgacctaaatcacccttttcactggttcaaattttcacaggatgttcacgttcatgcacccaaaggtatgggctaaaattgtcgaattaccaaattctctttttgatcggttctgtctcaggctctcgcaatgtgtcagtgtttcatgtgaaatttaagaagacaaaaattgtttctgattctttaaaggtccctgcagtgaggtaaactctgtaattctaaattcatatttcatgttaaacttgatattgacattttctaaattcatgggggcagctacagggaagggtcaatgatatgttttgagcgataacacattgaaggatagcttgggaaaagacgagactttctttaacacacaattcatggccgcagctacagggaagggtcaatgatcaaatggtaagtattgtttctgcatttgcttcaagttccttataggtgggtttttggaatgcataaagttaggtgatcttttgctttggacaagactttagagcatggttataggtgatactcatatagtatcattatttataatatgtggctaaacattagttagatatcggattgcaatttttgttagctagttctcatatatccaacgatttcaagttatatgcgactgatataaagaaccattggttcaatagatgcatgaggttattatacattggtccttggagaatggggactaaacgaatgcaacataaacttgaatctgactcacaaattcacaatatttatgcattgacataacatagttgtttagttttgcacattcacacttcacagactcaaacaaaattaatgaaaagaacaaaacagagaaacggagatggtgacactcttaggatgtgtctagattatcggctcttatagcatttgagttgttgcatccgctatgagtagaggaacttccctcactggattgaaaaatggttgaacagtggttaaagcagagggatcgtcccattccaaacgctcccaccaactcaattctccttttatcttcttgattcttccacaggtagagcttatgggtaaacaattcagctgattacagtgaatcacttccacttgttccaagcattcccaaacctctccccagttgcatatactcacaagatttggaagatttctcagtttcaagacacgtagatttggtacgaaaggttgatggtataacaaagcctcgtgtagattctgcaaagagtcgcagtagctaatctctatctcctccaggtttgggatagtcaagaaatttcttttgtcgagtagtgttcgaagcttgcgacacatggtgatctcgattatcttcagtgtttccagtttcaacccgagatgtgtttgtagctctgagaaggtttccaagtcaacacgacgcagatgaagttcctccaaatttggaagaaggtctagtatgtcagaggattgttttgaagtgttagtgcttaccatctcaacccaagaattcgtattgatgataacgttctcaatcgtcagagatttcaaattcttgaaacccttgttgtcacttaccaatttcttcatcattgcttcgatcccctgacaatggtttagtgctagagatgttgtataagccaacagccacccgatggatacttgtgatacgttgaggtgacttattgttagcctcctcttgtcgtgccttgtacgcaaaatgtaacgagacccaactacaagttggaatttcttcaatcttttgatccaagtgtttctcttatttaaaagaaatggagaagaatggagcctgatggaaagaacctgtaaacgctggaggcatcctatctcttcaactgttgcttgccctttttgtgtttctccctgtacgctccagcggtagtgacttgacgtcatgtcaagtgtctccaaacttgataacctcgaaacaactctagctggaatgctttcaaggtgaagtgttcgtgaaagatcaaggtgtctgaatctctttaattcttccaaccctcttggaaattcgaggatatgtgtgccacagagatcaagtagctcaagtttggcaagggtttctagtgaaggtagtttcacaagtttaaaacaatctcttaagaagagagaatggagactgaaaaggcgcaaaagagagcaactgggaaatgacttaatgcgagtcccacttagattcaagattcgaagagttggaaatgcttgcaagaatccaatgggtacttcctttagaagaaaattgccttgtagcagtaagactgaggtttttacgcagaactcttctacaagatcaggaaggctttctagtttattgttcatcaaagaaacccttcgaagagaaggagcaagcttatcttgtctaatatcttgcaaacccgttccagacatgacaagggaatgggaatcatcttgtgaggaagacatgatccatatggcgaaatcgcggacaacatcatgcatcttcaccgtgtctctacgatcaccatcttctaacaaacaataatcctttaaactctccacagttgtgattccctcgttcatggagtcctcttgggaaccgagttcctccatgaatccttcagccatccaatatcttacaacctctgtaacttcaatcgagtagtcttctggaaacaaagcacaaaggagaaaacaaaactttgccttgtcttccaagaaatcgtagctcaatttcaatggctggaagatcttctcttcaatgctcttgatccaaggtactgatttacttagcttactcaagacatgattccatagcttgacatttttctttccccgcatagctgttccgactgtgatgatagcaagaggcaatccaccacattcttgtgaaacagcttttgcaatcttcctaacatggtctgacctcacaacatcccctgcatttttgcaaaacaattcccaagcgtcttcttcaagtaagcaatccactctaacatcaagatctgtcttcatgctgcgacagacctctaaaaacctcgaagtcagaatgacttttgaacctttgttctcttcagttcgtgggatgcctaaaagatccaaatcaatgggtttccaaacgtcatcaagaatgagaagaaactttctctctttcatcagtccaacataaatccttcttgccaacttctcttcactttcttccatttgggtatcaatatccagtctctccgcaatctgcttttggacttctcttggatcaaactctttggaaactattacaaagatcaccaagccaaatggttgagtagcaccctcttcccgaagcttattgttcagcgtcctgaccaatgtcgttttacctactcctcccatgccccaaacaccaatcttttgggctttctcgcttgtcaagccatctctaattttggccaacatatttgacgccatcgtttgatgaacaactgagacccctggaacatgttcaactctttccggtgtagactccacggaaagcatgtcgacaaactctattccatccttctcaagcattttcacttcatcgagaatcttgacaagtttcctactcatcctgggtctcaaggacataccgcatgaaactcgttcctcaagttttaaccttgctttagatataacttcttccgcctctctttgccaacgcattagcttgagtctcaagggtttatctttggtcagcaaagtttcatgatcttcactcatgttacccttaagctctgtcaatctctcgagtgattcattaagagctttgacgtttgatttgaactttatggcattagcgactcttgagaacgttgactcatacatcaaacgcaaaatctcaccaatgacaggggcgcaacactccatggtgaagttttagttgaagaaagggccaacaccagcttcaaagaaacctttgagatctgcaataaagaaagacaattagttgtaagttgaaactaaacctacatgttgtctcacctactacaatccgatttgtttcgaatgttcaaagatagactaaaaaaaaaaaaatcctaatctacatgaatcgacaatcgatctccgaggatcgtgttaataagccaaaacgaaagaaagaagaataatttgtttgttgggttggcaattattttaatacagattaagaaatagcaagagatttacatttccatgatttaagtgtgtgatcgttttctatcattgtttagtgcgttataattgatgataccaaatgaaaataagaaaaaaatcgtagacgagttgcttgactcccaacttaaatctccaatatgtttactctgacaagtgacaacaaaccttcaacaacgaaacaacctagaaaacatatctgaccttattcaactacgtgacgatagagccacagaactgaccatttcgattaaaaaaaaaagtaatgatgtggttgtaaatttagtaagaggaacttgatgtgagactagtatcaacaccattcaagtgaagcctcgacaaaactttgtcgtttcatcaaactcagcaaagaagcaaatgaaagcctaatgcaggcccaagaagcccacaactcaagtttggaagcaacggtcttctgagacaaagacagaaactccagaagcttcaccaagtcacgacaagaacagagctggcacaacttcacctaatgcttgtacggaaaaggcattcaacatcaagttggagaatcgggagtgcctgttttccaacgctacgagattatgctgaaaacaaatttaacccttgctctcttaagtgtgtctttctaggctacaatgaaaaatacaagggttatagatgcttgtatccacctacaggaagactctacatcagtagacatgttatctttgatgaatctgtataccccttctctcacacttacaagcatcttcacccgcagcctagaactcctctacttgcagcctggttgcggagctctgactctcctgctccttcaacctcaacatctccttcttcaaggtcccctctcttcacgagcgctgactttccacctctaccacagagaaagacacccctactccccactttagtgcctatctcaagtgtctctcatgcatccaatatcacaactcagcaaagtccagactttgattctgagcgtacgacagactttgattctgcttctattggcgacagctctcattcttcacaagcaggcagtgactctgaagagaccatacaacaagcttcagttaatgttcatcaaactcctgcttcaaccaatgttcatccaatggtgactagagctaaagtaggtatttcaaaaccaaatccacgctatgtctttctgtcccataaagtctcttatcctgaaccgaaaacagtaacagcggctttgaaacatccaggatggaccggtgccatgacagaagagattggaaactgttcagaaacacaaacttggtctcttgttccatacaagtcagatatgcatgttcttggaagcaaatgggtctttcgaaccaaactccatgccgatggcaccttaaacaagctcaaggctcgaatagtggcaaaaggatttctccaagaagaa
